United States Patent Application Publication US 2007/0161031 A1 - sequence listing, part 5

SEQ ID NO: 5206 - DNA, 2300 bp, Homo sapien
gttgcccaggatggcctcaaactcttgggctcaagtaatcctcttgcctcagtctcccgagtagctgggatggtgcgcactattatgcccacctgaaagtcaggattttttttaagacagtatcttgccctgtcactcaggctggagtgcagtggctttaccaaagctcactgcaacctgaaactcctgggctcaaacagtcctcctgccccagcctctcaaagtgttaggattacaggtgtgtgcccagccttgaaaatcaagttttataagtcaaactctccctgcattcctttctttttatctaggtagaatgtttctaacaagattttaacaagtaaccttttgaagcattggctcagaagggtcaatttttgtccataagatttatttcacggaaggcagctatgctaacccctataccatcaacgggtcatataagatttatttcaggcctggtgtggtggctcacgcgtgtaatcccagcactttgggaggccaaggcaggcagatcacctgaggtcaggagttcgaggccagcctgaccaacaaggtgaaaccccatctcttccaaaataataataataataataataacatagctgggtgtggtggcgcacacctgtaagccgaactactcaggaggctgaggcaggagaatcgcttgaacccaggagcagaggttgcagtaagccgatatcatgccattgcactccagcctgggcaacaagagcgaaactccatctcaaaaaaaaatttatttcaaatgccacatttctgattttattcagccaaggtactttgattgtgccattgaaaacacgagtgcagtcatcagtttgctctgccagcctggaatctctgttccttctgtgtaggaggcaaattttattcatccttgtatgcctacattgtagtgcaagaatacatttgtatgaatcaatcagtgaggaaggttaaaagtttaggaatctttcccagaacagcccggttatacttatgtgtatacgaataaaatctaagtgcagaatgggggtagaatggtgtgaaatgcaatgagggactgaatcctttctcttcacttgaagtttgacctggaaggaatgaagattccatgaacagcattttccttaccacggtgaccccattaaaatcctggattcccttgtctgtgtcatgactgctggaagaagcaatagctatcaaacatttagagaaaaattcagatgccctagtcagtcttaattctggcgtaatgccactggttattcctcctaattcggaaaacttagctcttcctgccctttcatttcttcattcataaagtgaatacgaccaccactgaggtccagggccaaataactaacagaaatattatgatgaactttgcagacatccagcccagagtcagggaacacagccctcatctggtttctctctttggtgttgagggcggttttccgttgctggcgacctagacattgctcaatggtgtcatctctgacctggcaccttcttcatacatttataaacatgcaatttagagatcctaaaaactttttctagagctcccctgggaaaaaagttaatgacaaaatcttgacacctctctacgtcttcttcggagacagagaagttgagagaggtggagaacgagggggagggggagggggtcgagagggagtcgaggagggattccagctccagtttgggtaaatccagctcgcgttttgtctctcgctcaactgtgcagggtccagcgaaggcagagccccagcttcactccctgaggtctgtcctggggagacactgctgctccggggggctgacctggcggggagtggccgcgcagtctgctccggcgccgctttgtgcgcgcagccgctggcccctctactcccgggtctgccccccgggacacccctctgcctcgcccaagtcatgcagccctacctgcctctccactgtggacctttgggaaccgactcctcacctcgggggctcgggccttgactgtgctgggagccggtaggcgtcctccgcgacccgcccgcgcccctcgcgcccgccggggccccgggctccaaagttgtggggaccggcgcgagttggaaagtttgcccgagggctggtgcaggcttggagctgggggccgtgcgctgccctgggaatgtgacccggccagcggtgagttggggccggggcagagggcaggggtgcggggagcgaggactccgacgccgaggcccgaggggggtccgggaggcggcgctcggcgcgggctggatgtggccggggct

SEQ ID NO: 5207 - DNA, 2300 bp, Homo sapien
tgtttcttggagaagaggtctcactttgtcacccaggctggagtatagtagcacagtcctggctcattggaacctccacctcctgtgctgaagcgatgctgtcaccatcagcctcccgggtagctggggccgcaggtgtgcatcaccacacctgactaattttttttgtatttttggtagagactgggtttcaccatcttgctcaggctggtcttgaattcctgggctcaagcgatcctcccatcttgtcctcccaaagtgctgcgattacaggtgtgagtcactatgcctagcctagttgtcttttctttttgtatattatgtccttttggtattttatgacttcgctgaatgtgtgaaaagcaaaaataatattttaggctgtatccacaggggctttacatttagttgttattaaattttaatcttctatggctgttattcagatatttaagtagatgacataagtaatttctgtattttacaggcagattttgacaacaaaccagtaaatggccccaagtcagaatccatggactacagtagatgtggtcatggggaagaacaaaaattggaattgaacccacatactgttgaaaatgtaactaaaaatgaagacagcatgacaggcatcgaggtggagaagtggacacaaaacaagaaatcacagttaactgatcacgtgaaaggagattttagtgctaatgtcccagaagctgaaaaatcgaaaaactctgaagttgacaagaaacgaaccaaatctccaaaattgtttgtacaaaccgtaagaaatggcattaaacatgtacactgtttaccagctgaaacaaatgtttcatttaaaaaattcaatattgaagaattcggcaagacattggaaaacaattcttataaattcctaaaagacactgcaaaccataaaaacgctatgagctctgttgctactgatatgagttgtgatcatctcaaggggagaagtaacgttttagtattccagcagcctggctttaactgcagttccattccacattcttcacactccatcataaatcatcatgctagtatacacaatgaaggtgatcaaccaaaaactcctgagaatataccaagtaaagaaccaaaagatggatctcccgttcaaccaagtctcttatcgttaatgaaagataggagattaacattggagcaagtggtagccatagaggccctgactcaactctcagaagccccatcagagaattcctccccatcaaagtcagagaaggatgaggaatcagagcagagaacagccagtttgcttaatagctgcaaagctatcctctacactgtaagaaaagacctccaagacccaaacttacagggagagccaccaaaacttaatcactgtccatctttggaaaaacaaagttcatgcaacacggtggttttcaatgggcaaactactaccctttccaactcacatatcaactcagctactaaccaagcatccacaaagtcacatgaatattcaaaagtcacaaattcattatctctttttataccaaaatcaaattcatccaagattgacaccaataaaagtattgctcaagggataattactcttgacaattgttccaatgatttgcatcagttgccaccaagaaataatgaagtggagtattgcaaccagttactggacagcagcaaaaaattggactcagatgatctatcatgtcaggatgcaacccatacccaaattgaggaagatgttgcaacacagttgacacaacttgcttcgataattaagatcaattatataaaaccagaggacaaaaaagttgaaagtacaccaacaagccttgtcacatgtaatgtacagcaaaaatacaatcaggagaagggcacaatacaacagaaaccaccttcaagtgtacacaataatcatggttcatcattaacaaaacaaaagaacccaacccagaaaaagacaaaatccaccccatcaagagatcggcggaaaaagaagcccacagttgtaagttatcaagaaaatgatcggcagaagtgggaaaagttgtcctatatgtatggcacaatatgcgacatttggatagcatcgaaatttcaaaattttgggcaattttgtccacatgattttcctactgtatttgggaaaatttcttcctcgaccaaaatatggaaaccactggctcaaacgaggtccattatgcaacccaaaacagtatttccaccactcactcagataaaattacagagatatcctgaatcagcagaggaaaaggtgaaggttgaaccattgg

SEQ ID NO: 5208 - DNA, 2300 bp, Homo sapien
ggagaacggcgtgaacccgggaggcggagcttgcagtgagccgagattgcgccactgcactccagcctgggggacagagcgagactccgcctcaaaaagagaaagaagaaagaaaggaaagaaaaaaaaagagaagaaagaaagaaagagaaagaaagaaagcgcaatgttagccataaaatggaatgagttctgatacatgccacaacatggatgaaccctgaaatcaatgtgctaaaacaaagaaaaccaacacataaaaggccacatattgtatgatcctatttataggaaatgtctaagacacagaaatgttagtggttgactgagactgggaagagcagggattagggggctgttgcttaacaggtatgggtttctttttctggtgatataaaggttcttgaagtagtggtagggatggttgcacaaccttatgactatactaaaagccactgaattgtactttttttttgagatggaatgttgcttttgttgcccaggctggagtgcaatggcgttatctcagctcactgcaacctccgcctcctgggttcaagcaattctcctgcctcagccccctgagtagcgggattataggcatgcgccaccacgcctggctaatttttgtatttttagtagaggtggggtttcactttgttggccagactggtcttgaactcctgacctcaggtgatccacctgcctcggcctcccaaagggctgggattacaggcgtgagccaccgtgcccagcctgaattgtgctttaagatattttaaatagtgaattgtatgttaagtaaattttatgtcaatttttaagacgagttaagaatgttacagggtataactagttcaactattgtggaagacagtgtggcgattcctcaaggatctagaactagaaataccatttgacccagccatcccattactgggcatatacccaaaggattataaatcatgctgctataaagacacatgcacacgtatgtttatagtggcactatccacaatagcaaagtcttggaactaacccaaatgtccatcagtgatagactggattaagaaaatgtggcacatatacaccatggaataccatgcagccataaaaaaggttgagttcttgtcctttgtagggaggacatggatgaagctagaaaccatttttttttttttttttgagtcggagtctcactctattgccagggctggagtgcagtggcgcgatctcggctcactgcaagctccacttcccgggttcacgccattctcccgcctcagcctcctgagtagctgggactacaggcgcctgccaccacacccggctaatttttttgtatttttagtagagatggggtttcaccatgttagccagtatggtctcgatctcctgacctcgtgatccgcccgcctcggcctcccaaagtgctgggattacaggcgtgagccaccgcgcccggcgaaaccatcattctgagtaaagtatcgcaaggacagaaaaccaaacaccgcatgttctctcataggtgggaagtgaacaatgagaacacttggacacagggtggggaacatcacacaccggggcctgtcgtggggtggggggaggggggagggatagcattaggagagatacgtcatgtaaatgacgacttaacgggtgcagcacaccaacatggcacatgtatacatatgtaacaaacctgcacgttgtgcacatgtaccctataacttaaagtataataataatttaaaaaaagaatgttacggggcatatcctttctctcaaataatggaacgaggttaaaaaaaaaaggttaaacataaaatggcggcgggctggatcggatcacgtgaccgccatttctttccttcccacccaaaggaaagcccttccttcagagcaagcgcaagacatatagccccgctcattgttaagcgaggccaaggcaacccttaggcgcgctctatttcccctttcgtagcgaaagggccaggcgtattgagcggtcaggggagcgcgcacgcagaacgtcagccagtaagcgccgttcctccgggagatgtggaggaggggggcggcgtggaggaagagggggaagttggcgcatgcgcctaaagctgacgggtttgaaatggcttcgatgttagccgggacccgactcaggtgaaggtctggtccccgtagttggagcagtgggcggccaagccgggtctcttaacatcttgtcgaatctgtggaagggccgggagcgatcttttgggtagcccggcggccccgggcggcgacggtggggc

SEQ ID NO: 5209 - DNA, 2300 bp, Homo sapien
cactgcaagctccacttcccgggttcacgccattctcccgcctcagcctcctgagtagctgggactacaggcgcctgccaccacacccggctaatttttttgtatttttagtagagatggggtttcaccatgttagccagtatggtctcgatctcctgacctcgtgatccgcccgcctcggcctcccaaagtgctgggattacaggcgtgagccaccgcgcccggcgaaaccatcattctgagtaaagtatcgcaaggacagaaaaccaaacaccgcatgttctctcataggtgggaagtgaacaatgagaacacttggacacagggtggggaacatcacacaccggggcctgtcgtggggtggggggaggggggagggatagcattaggagagatacgtcatgtaaatgacgacttaacgggtgcagcacaccaacatggcacatgtatacatatgtaacaaacctgcacgttgtgcacatgtaccctataacttaaagtataataataatttaaaaaaagaatgttacggggcatatcctttctctcaaataatggaacgaggttaaaaaaaaaaggttaaacataaaatggcggcgggctggatcggatcacgtgaccgccatttctttccttcccacccaaaggaaagcccttccttcagagcaagcgcaagacatatagccccgctcattgttaagcgaggccaaggcaacccttaggcgcgctctatttcccctttcgtagcgaaagggccaggcgtattgagcggtcaggggagcgcgcacgcagaacgtcagccagtaagcgccgttcctccgggagatgtggaggaggggggcggcgtggaggaagagggggaagttggcgcatgcgcctaaagctgacgggtttgaaatggcttcgatgttagccgggacccgactcaggtgaaggtctggtccccgtagttggagcagtgggcggccaagccgggtctcttaacatcttgtcgaatctgtggaagggccgggagcgatcttttgggtagcccggcggccccgggcggcgacggtggggctcttgtgggactgggacgggagggacgcggtcccttttgtgcgggtcggagcaggcccggcgcggccagccccacccccaccgctcggctcctcaggtgcccccagcgcccctcagcctcggcatggcgacgctgcagtccgccgccccattgctcccgagccgctgcggttttaccctcctggccccccggcccgggacatcgtggcggctcccggcggcgtgggtcttggggaatagaggctttctccgtgcgtggtaaacgagcccagggctctcgggagccatcgagtgtcgtggggcggtgggttccgccttccgtcgccggcggccggcacggagctgggactggaggaagatggacggccgagctctggcccttgagggtcgtggcggccgaggagggggtgcacgggcggagaatcttcgccttttctggtttatcttggggggaggggttttcccagtggttctttaagggacatccattatctcaacggccttttccttcgaggtcggggttggaaaagaagccccctaggttccttttctactttggaaagtagagatgttcgttatttaaatgatatctttaaatacctgtgatgggggtcttgtcccagtatccgttattggttttaacattaccctggcctcactccccaacccattgccagaagaaacacgcaggctgtatttcctgtgaatataaagttgtgaactttttgttaacaattgggtggatacagcagatggtcttcgtttaaatgtgacaacttgtagtcccagaaaggagtgctttttctgagtctccctctaatgttatcttgtaaaatagggcatttttggtgatctacttgatgtaaaatgtttttgctgcattttggatgttcatttgccctttttctacttaacagttgttatttctgctgaaatctgcgaagacgtcctcgacacattaaacatttctttctattgtaatatccttttgtgatatctgtagcttggttggactttaaaatgtggatccttttcttgatagatcgatgctatagaagacaaacaagggaaggttttttttccttttgcatcatggctcaatttggaggacagaagaatccgccatgggctactcagtttacagccactgcagtatcacagccaggtcaggcttctaaatacatgtactgtaattgtttgtgggggacttgttaaaactacgtgaattagggccgggggtg

SEQ ID NO: 5210 - DNA, 2300 bp, Homo sapien
ttgcttgagctcaggagttcaagactaccctgggcaacatagtgagacctcgtttctgtttaaatacataaataaaaataagtagaataacttttataggattatttcttttatgaagcatctatgaagcaacaattctgattgacccttttctgtgtgtgtttatttttctgttttcagttacagcaaccccagcaaaccctcttaacacaggttagttggtattactttatttgttttggatgtctgaatgaacagtagactaaagctttattagtattctactttttctttcagggtttagttacttgttagattcacctaataatttaggaatataatgctaaataaaggtagtagtatgctagtttatttttgatggtttctccttgtaggttcagctgtgatacagtttgaataaatatgaggttttattttatttatttatttatttatttatttatttatttatttatttattttgaggcagaatctccctctgttacccaggctggagtgcaatggcgcagtctcggctcactgcaatctctgcctcctgggttcaagcgattctcctctctcagcctcctgagtagctgggattacaggcgcctgccaccacgcctggctgatttttgtatttttagtagagatagggtttcaccatgctagccaagctggtctcgcctaaggtccagaccttaggtgatctacctgccttggcctcccaaagtgctgggattacaggtgcgagccaccatgcccggctgaggttttattttaaacttaatactgatttttcattgatactgatttttgtagtctttttcttttggaagatttctgcacgttttttccactttagcagggaaagttattgtgtgacattatctgcttaatttttcagcaacattaaaaagttttgaacttttcatatgtagtgctaccttaggctttacagactatttattgtatctttcacatactctttttctatttttacaaccttttgaaagtgtaaaaagtgttcttagcttataaactacgtaaaaagagcctataggctgtctttggcccatgggtcatagtttgctgatcactggttaatacgtagagtgaaatactatgcagctgttaaagcacaacctctttgtatactgatatggaatgatattccagataatctgaggtagaagtaaaggtacagtctagtatgtattatatgctcccatttatctatatgcatatttgaataaaacatctctaggaggctttacactaataattaggacagtgattgcttcatgtttagggaactgcatagctgaggagcagggataggagagaggcttttcacagtataacattttgtactgtatttttagtcttgaatctcttccttgtcttttaaaaatatacttgaattgagaaatcaacctgtttttattaaagaactacagttggttaacacgtaactcataactcctattttcaataatcaacaaagtagaatttccaaattaagtagaaaaacaatagaagttcttttgttcaaatgctatttccctaagtgtacccataacacattactagtatcttaagatattaaagaaatttcatgagaaaatagttttgtggtcaaagtttgaggaatgctgagttcctttactatacttaggactttcctaagcctttattatgccagtatggatattgtattagtaagaacactcatctaagggatcttgatgaaataggctaaaaataatttatagtttaattttagacctgactctcaagatgtacatgtatatcttctaacataatatgaaatttttaacattctgggttagttttaagtagtcatattcagtttttagatgatttcaaatcattaccttaatttgatgttgattttgttttatagccagctgttgcactgcctacaagccttagcctgtctactcctcagccaacagcacaaataactgtatcatatccaacaccaaggtccagtcaacagcaaacccagcctcagaagcagcgtgttttcacaggggtggttacaaaactacatgatacgtttggatttgtggatgaagatgtattctttcagcttaggtaaacttaatgaggtcttgtcacatggcttcttgcatttaccacaaaacacctgtttagttgtggcagaaattgtatgtagcccaggctggacacagttgtgcaatctcaagtcgactcactgcagcctctgcctcctgggttcaagcaattctcttgcctcagccttcggagtagct

SEQ ID NO: 5211 - DNA, 2300 bp, Homo sapien
ttagttttttgtttttgttttttttttttttgagatggagtcttgctctgtcgcccaggctggagtgcagtggctcaatctcggcccactgcaagctttgcctcccgggttcacgccattctcctgcctcagcctcccgagtagctgggactacaggcgcccgctaccacgcccagctaattttttttgtatttttagtagagacagggtttcgccgtgttagccaggatggtctccatctcctgacctcatgatccgcccacctcggcctcccaaagtgctgggactacaggcgtgagccaccgcacccggcctcacagtttagttttaccactttgaagtaaattccgagaacattaaatggatctcttgcaagtaaaaatgattttaaagtttccatacttctcatttgtagttgtgtaaatcaagattttcttatactaatatgattataagaaacttcgtgcccatgaaatgatttatttgtacttatatcttttgttttattataaattttactcctgtggggtaaaacatgacttcataaattctggtgatacggaattgggaaacaattatacatacttgctttttgtaacacttccttaaaaacaaaactcagatacttgtttcatgtttttattattttgacagcagaatcatatccaaataaagtataattataggcctggcactggtggctcatgcctgtaatccagcactttaggaggctgaggtggaaggatcacttgaggccaggagtttgagaccagcctaggcatatagtgagacctcacctctacaaaaagtagaagttagccacatgtggtagtgcacccgtagtcctagctataatacttagaagctgacatggaaggattgcttgagcctaggaattcaggttatagcaagctgtgagtatgccacactgcactctggcctgggcgacagagcaagattctgcctgtagataggatagaatagatagatagatagatagatagatagatagatagatagatagatagatagatagattctgtctgtagatagaatagatagataaatagatgaataggtaggcaggtaatagtctgttaactgacaggtttattactctgtatttatttttatacttcaaataaagacatctctgcatgtagattacttcatctttcatacttctgcttttagttgtcttttcatcttacattatacttttaacagacatctcttagccttttgccagattgacctttcagttcctctcttttaaaagctctacttcttaggaaaaaggaaatgatcctttaaaaaatcagtgtgagatttaaaaggcaagaaatttatcccctctatacataataatcaggtatggatcttaatcattcacagagaaagggttgtggaggtgcagataatccaaggaacatatgaattttgctttttgtggatttttgtatttaattttgaatgtaagtatgcttgatctaggaacttactatagtaaaataaaagttataatttttctacactcaaaaacctgattgaggggcgtacagaaatactaatactctcattgctgttttgtatctattcaacatgaaccataattttcaagtaatccacagttccaactgaggaaaacctgcttttgtacagatcttttctggagctgagattcaagttatttcaaagcgtcttctgtaacaaaaagtatcaaaataaggataacactgagaatactatttattcaaagctttgcgtatataaatttgaacgtaatattttcatatgtctctatgcaaatctatagctcattagtaactgactttgtcttttttcagcttactttttactatatccagttatatttgctacagaattaaatgtttgtgtaaccttttttattaaggctatttattcactacttatgtctgtttttcagtcccagttgtgacatgatggaactaaggcgccgttatcaaaatttgtatatacctagtgacttttttgatgctcaatttacatgggtggatgctttccctttgtcaagaccatttcagctgggaaattactgcaatttttatgtaatgcacagagaagtagagtccttagaaaaaaatatggccattcttgatccaccagatgctgaccacttatacagtgcaaaggtttgtattcagctgtgatatgcagcttaaatttcttagcagttattcataataaaagggtatgtagaattatccttcagaaagtgtttgttaggtagacccgaatacctgttttcttcttaactg

SEQ ID NO: 5212 - DNA, 2300 bp, Homo sapien
attgtttgctgctttttttttttgaagatggagtcttgctctgtcgcccaggctagagtgcagtggcgcgatctcagctcactgcaagctccgcctcctgggttcacgccattctgcctcagcctcctgagtagttgggactacaggcggccgccaccacgcctggcaaattttttttatgtatttttagtagagacggggtttcaccatgttagcgaggatggtctcgatctcctgacctcgtgatccgcccacctcagcctcccaaagtgctgggattacaggcgtgagccactgcgcccggccaattgtttgcttcttatggatgagcaaagacagtgtttttttgagatgcaatctgcttctgtgaagatgctgttaacattgttgaaataacaaaggatttagaatattatgtaaacttaattaagcagtggcaggattggaggggattgactctatttatatatttatttatttatgagatggagtcttgctctgtcgcccaggatggagtgcagtgccgtgatctcggctcactgcaacctctgcctcccgggttcacacaattctccagcctcagcctcctgagtatctgggactacaggcacacgccaccacaccccacttatttttgtgtttttagagatggggtttcaccatgttggccaggctggtctcaaactcctgaccttaagtgatccatctgcctcgggctgccaaagtgctaggattacaggcgtgacccaccatgttcggcgattgactctaattttaaaagaggttattctgtgggtcagatgctatcaaacagcatcacatagggtctcacttttcacccaggctgagtgcagaggtgcagtcatgtctcattgcagcctcaagctctgggacccaagtgatcctcccacgtctgcctcccaagtagctggaaccgcaggcatgcgctacttagtctgactcattttttaaattatttttgtagagaccgggtctcattatgttgcccaggctgaggcaagatcctttaccagcaaaaggattactgcttgccaaaggctcaggtgattgttagtgtttttagaaataaagtatcttttaatatatgtacttttttaaggcataatgctattattgcacacttgattatagtgtgaacataacttttttttttttttttttttgagatggagtctcgctctgtcaccccggctggagtgcagtgtcacaatctcggctcactacaagctccgcctcctgggttcacgccattctcctgtctcagcctcccgagtagctgggactacagacgccggccaccatgccaggctaattttttgtatttttagtagagacgggatttcaccgtgttagccaggatggtctcgatctcctgacctcgtgatccgcccacctcggcctcccaaagtgctgggattacaggcgtgaggcaccgcacccggccctataactttttttttttttttgagacagggtctcgctttgttttccaggccagagtgcagtagcatgaacatggatcactgaagcttcaccatcccaggctcaagtgattctcccatctcagccctctgcgcaactgggactacaggcgtgtgctaccatgcctggctaatttttgtatttttttgtagagatggagttttgccatgttgcactggctggtttaaaactccggagctcaagcgatccacctgcctcagcctcccaaagtgctgggattacaggcatgagccactgtacctggctgtaaacataatttatctactggaaaaccaaaaaatttgtttgactagctttattgcagtacttgctttattggggtggtcttgaaccagagccttcagtaactcccaagttgtgcctgtatgcaagtcagtggtttttaatatattcagagttgtacaaccatcaccacaattaactatagaacatttttatcaccctcataccaagaacccaaaagagattgattagcagccattccccatcttccctgaacctcttcagtcctaggcaaccattagtctgctttttgtttctgtagatattctggacatttcttataaatggaataacacgataagtgatttttttgtgactggcttcttttacttagcctgttatcaaggttcatgtatgttttagcataaggttttctctttatgtttttgttgttgttgtttaaaagacagggtcttgatctgtcacccagactggagtgcagtggtatagtcatagctcactacaccctcgaacgcctggccctcctgagtagc

SEQ ID NO: 5213 - DNA, 2300 bp, Homo sapien
ccaggctgcagtgagcctcgccactgcactccagtatgggtggcacagcatgggtgacagtctcaaaaaaaaaaagacagtcttgaaattaatggccccagcatatagtgttcaataaatgttagctattgttattatctatcatttattgcgtgcttactgggggcagggtataaattatctccatgtttatagtttttattgaggactgatgagctgagggagtgggaagtctggaatgactcctagattttgccaagcacctctgctccctcacagtactgtgttctggtaccaagcataatgcccttcctcttcttcttctttttctttttttcccgagagggagtcttgctctgtcacccaggctggagtgcggtggcaccatctcagcacactgcaacctccgcctccgcgtttaagcaattcttctgcctcagcctccctgagtagctgggattacaggcgcgtgccaccacatccggctaatttttgtatttttagtagagatggagttttaccttgtaggtcaggccggtctcgatctcctgacctcgtgatccgcccacctcggcctcccaaagtgctgggattacaggcatgagccaccgcgcctggccccttcctcttcttttaacatgttgtattttcaaatgggtttttttctcaaggagccctcccgctgggcctcagtctgggtcctcagtctgaatcggccttcactgctttgaggcacaggtcacattctaccgccacgcatcacaagctctccctttgcctctggggcaggacggtgtccgtcttttcagaatgtccacatctaacccagggcagaatcctacgatatcaccacagcgccacaccaatcagggtggcacctctccactctgctttcctcagcactcaagagtatgggatatccccggggtaggaccagatcctacaacttcagaaagtcatggatgaggccggccgggcgccgtggctcacgcctgtaatcccagaactttgggaggcggaggcgggcggatcacgaggtcaggagatcgagaccatcctggctaacaccatgaaaccccgtctctactaaaaatacaaaaaattagccgggcgtggtggcgggcacctgtagtcccagctgctcgggaggctgaggcaggagaatgacgtgaaccaggtaagcggaccgtgcagtgagccgagatcgcgccactgcactccagcctgggcgacagagtgagactccgcctcaaaaaaaaaaaaaaagaaagtcatggatgaaagggtccttagtttattatcctgtgaaatagtagctgggacatttctgaggcccagagaagggaaataacttgaatgaacaggttgggagcaggccaggcgatgtggcgggcacctgtagtcccaactcgggaggctgagatcagaggatcgcttgagcccagaactcagtgaatagccactgcactccagcctgggcaacacagcgagacctcgactcaaaaaacaaaaatagaaacaaacaactagcttaggcgcagaactgagactcaaacctaggtttcctgctcaacccccacacctcccaggcccccgctgacaccctcaggctgttcctcgtggttgctaacttggaacggccccaaagccaggtcgaaggcgagtctccccgccctggggactcctggcgctgcagttcgcacggcggatggacgcagtcaggttctccagggagctgcgaggagccccaggacttggaaaaaccccagagcgcgcccctgggggaaggggagctcgggacctcgaggcggctggaagtcgagggcatcgccagggggccgagttgggcccgggtgtggagaacgaagccgaacgctgggctctggattctcctccagagcgctccgccggcctaagcacggccgccccacccccggcccgccaggcgcagtcggccccgccccctggagctccgttcccccggcagccagcgccgcggacccgcgcgcagtcggccgatcctcccgccgagcgagcggcgtcgtagccgccgcgctcgccgaggccctgcgttgcgggctcccggccgccggcgaaagcatggcccggcccgtgcagctggcgccgggctcgctggcgctagtgctgtgccggctggaggcgcagaaggcggcgggggccgcggaggagcctggtgggcgcgcggtgttccgcgctttccgtcgcgccaacgcgcgctgcttctggaacgcgcggctggcgcgcgccgcctcgcggctggccttccagggctggctgcg

SEQ ID NO: 5214 - DNA, 2300 bp, Homo sapien
ctcactgcaacttccgcctccccgggttcaagcgattcttctgcctcagcctcctcagtagctgggattacaggcgcctgccagcatgcccagataatttttgtatttttagtagagatggggtttcaccatgttggttaggctggtctcgaactcctgacctcatgatccacccgccttggccccccgaagtgttgggattacaggcaagggccaccatgcccggcataaattggatcattctatacattccctcaacacgtttctcttattaacttaaaaacacatctcggagatctttccatgctaacatatattgatatgtctcattctttattttacttgagacaaggcctcactctgttgcccaggttagagtgcagaggcaccttcttagatcactgcagcctcaaactcgtgggttgaagcaatccacctgcctcagcctcccaagtagctgggaccacaggtgcgcaccactcattcttttatttatttattttcttccttttcaagaatggcatctgggccgggtgtggtggctcacgcctgtaatcccagcactttgggaggccaaggtgggcggatcacgaggtcaagagattgacaacatcctggccaatatggtgaaaccccatctctactaaaaactacaaaaaaaaaaaaaaaaaattaggcacggtggcaggtgcctgtaatcctagctactaaataaacgaatgttttcctcagtcacagtttaaatttataatgggtttttatttgagtgaattcagattttttttgtctatttactcattaacctacccatatgactttgtgtggaccaaattattttcctgttatttttatttttatttttgagacagggtctcactctgttgcccaagttggagtgcagtggtgcaattacagctcattgcaacctctgcctccaagggttcaagcaatcctcccacctcagcctccaaagcatctggtactacagacacccgccaccatgccctgctaatttttgtatttctagtagaggaatgatttcaccatgttgcccagcctggtcttgaactcctgagttaaagcgatctgcctgtctcagcctcccaaagtgctgggattacaggtgtgagccaccatgcctggcctattcctattatttaagttataaatattatttatgcttctttggctttttttttttttttttttttttgagacagggtcttggtttgttgcccaggctggagtacagtggcacaatcatagctcactgcagccttgaactcctgagctcaaatgatccttccacacctggctaatgtttaaaaatttttttgtagagatgaagtcttgctatgttgcctagcctggtcttgaactcctgggctcaaatgatccttccacacctggctaatgtttaaaaatttttctgtagagacgaagtcttgctatgttgcctagcctggtcttgaactcctgggctcaagtgatcctcctgcctcagcctcccaaaactctgggattataggcatgagccatcacacccatccctggcattttaatcacatgtattatgttacaatcagctctgggtttatcaagccaatgtgtagtcatttcagagttactgatttcactcattaaaatttttcttattcaaaatctatctgtaaaatgcttgtctgttttaggcattgcaattccatcggaagatattctttataccactctgggaacgctgattaaagaaaggaagatttatcacactggagaaggatacttcatagttactcctcagacttacttcattacaaatacaaccacccaggaaaataagagaatgctgccatcagatgaaagtcgcctgatgccagcttccatgacatatctggtgagcatggagagctgtgcagagtcagcccaagagaatgctgcccccatatcccactgtcagtcttgccagtgtttccgggacatgcacactcaggatgttcaggaagcaccagttgctgcagaagtgactaggaagagtcacagaggtcttggggaatccgtatcttgggtacagaatggggcagtttcagtgtctgcggagcaccacatttgtgagagcaccaaacctttaccatacacaagagataaagaaaaaggcaagaagtttggttttagtctcttatggcgcagcttatctagaaaggagaagcccaaaacagaacacagcagtttctctgctcagttcccacctgaagaatggcccgtccgagatgaagatgacttggacaatatccctcgagatgttg

SEQ ID NO: 5215 - DNA, 2300 bp, Homo sapien
tacaaaaaaaaaaaaaaaaaattaggcacggtggcaggtgcctgtaatcctagctactaaataaacgaatgttttcctcagtcacagtttaaatttataatgggtttttatttgagtgaattcagattttttttgtctatttactcattaacctacccatatgactttgtgtggaccaaattattttcctgttatttttatttttatttttgagacagggtctcactctgttgcccaagttggagtgcagtggtgcaattacagctcattgcaacctctgcctccaagggttcaagcaatcctcccacctcagcctccaaagcatctggtactacagacacccgccaccatgccctgctaatttttgtatttctagtagaggaatgatttcaccatgttgcccagcctggtcttgaactcctgagttaaagcgatctgcctgtctcagcctcccaaagtgctgggattacaggtgtgagccaccatgcctggcctattcctattatttaagttataaatattatttatgcttctttggctttttttttttttttttttttttgagacagggtcttggtttgttgcccaggctggagtacagtggcacaatcatagctcactgcagccttgaactcctgagctcaaatgatccttccacacctggctaatgtttaaaaatttttttgtagagatgaagtcttgctatgttgcctagcctggtcttgaactcctgggctcaaatgatccttccacacctggctaatgtttaaaaatttttctgtagagacgaagtcttgctatgttgcctagcctggtcttgaactcctgggctcaagtgatcctcctgcctcagcctcccaaaactctgggattataggcatgagccatcacacccatccctggcattttaatcacatgtattatgttacaatcagctctgggtttatcaagccaatgtgtagtcatttcagagttactgatttcactcattaaaatttttcttattcaaaatctatctgtaaaatgcttgtctgttttaggcattgcaattccatcggaagatattctttataccactctgggaacgctgattaaagaaaggaagatttatcacactggagaaggatacttcatagttactcctcagacttacttcattacaaatacaaccacccaggaaaataagagaatgctgccatcagatgaaagtcgcctgatgccagcttccatgacatatctggtgagcatggagagctgtgcagagtcagcccaagagaatgctgcccccatatcccactgtcagtcttgccagtgtttccgggacatgcacactcaggatgttcaggaagcaccagttgctgcagaagtgactaggaagagtcacagaggtcttggggaatccgtatcttgggtacagaatggggcagtttcagtgtctgcggagcaccacatttgtgagagcaccaaacctttaccatacacaagagataaagaaaaaggcaagaagtttggttttagtctcttatggcgcagcttatctagaaaggagaagcccaaaacagaacacagcagtttctctgctcagttcccacctgaagaatggcccgtccgagatgaagatgacttggacaatatccctcgagatgttgaacatgagataatcaaacgaattaaccccattttgactgttgacaatttaatcaaacacactgtcctaatgcaaaaatacgaagaacagaaaaaatataatagccagggcacttccactgacatgctgacaatcgggcataagtatccttcaaaagagggggttaagaaaaggcagggtctgtctgcaaaacctcaagggcagggccattctcgaagggatagacacaaagccaggaatcagggaagtgagtttcagccaggaagcattagactggagaaacaccccaagctccctgctacacagcccatccccagaattaaaagcccaaatgaaatggtaggtcagaaaccacttggtgagattacaacagtgctaggttcccatttgatttacaaaaagcgaatcagtaatcctttccagggtttgtctcaccgaggaagcacaatatccaaagggcacaaaattcagaagacgagtgatctgaaacccagccagactggaccaaaggaaaagcctttccaaaagcctaggtccttggattcctcaagaatctttgatggtaaagccaaagagccatatgctgaacaacctaatgataaaatggaagcagaatccatttacataaatgaccctactgtcaaacccatca

SEQ ID NO: 5216 - DNA, 2300 bp, Homo sapien
aatttttctgtagagacgaagtcttgctatgttgcctagcctggtcttgaactcctgggctcaagtgatcctcctgcctcagcctcccaaaactctgggattataggcatgagccatcacacccatccctggcattttaatcacatgtattatgttacaatcagctctgggtttatcaagccaatgtgtagtcatttcagagttactgatttcactcattaaaatttttcttattcaaaatctatctgtaaaatgcttgtctgttttaggcattgcaattccatcggaagatattctttataccactctgggaacgctgattaaagaaaggaagatttatcacactggagaaggatacttcatagttactcctcagacttacttcattacaaatacaaccacccaggaaaataagagaatgctgccatcagatgaaagtcgcctgatgccagcttccatgacatatctggtgagcatggagagctgtgcagagtcagcccaagagaatgctgcccccatatcccactgtcagtcttgccagtgtttccgggacatgcacactcaggatgttcaggaagcaccagttgctgcagaagtgactaggaagagtcacagaggtcttggggaatccgtatcttgggtacagaatggggcagtttcagtgtctgcggagcaccacatttgtgagagcaccaaacctttaccatacacaagagataaagaaaaaggcaagaagtttggttttagtctcttatggcgcagcttatctagaaaggagaagcccaaaacagaacacagcagtttctctgctcagttcccacctgaagaatggcccgtccgagatgaagatgacttggacaatatccctcgagatgttgaacatgagataatcaaacgaattaaccccattttgactgttgacaatttaatcaaacacactgtcctaatgcaaaaatacgaagaacagaaaaaatataatagccagggcacttccactgacatgctgacaatcgggcataagtatccttcaaaagagggggttaagaaaaggcagggtctgtctgcaaaacctcaagggcagggccattctcgaagggatagacacaaagccaggaatcagggaagtgagtttcagccaggaagcattagactggagaaacaccccaagctccctgctacacagcccatccccagaattaaaagcccaaatgaaatggtaggtcagaaaccacttggtgagattacaacagtgctaggttcccatttgatttacaaaaagcgaatcagtaatcctttccagggtttgtctcaccgaggaagcacaatatccaaagggcacaaaattcagaagacgagtgatctgaaacccagccagactggaccaaaggaaaagcctttccaaaagcctaggtccttggattcctcaagaatctttgatggtaaagccaaagagccatatgctgaacaacctaatgataaaatggaagcagaatccatttacataaatgaccctactgtcaaacccatcaatgatgacttcagaggtcacctcttcagtcaccctcaacagagcatgttgcaaaatgatggtaaatgctgtccctttatggaaagcatgttgagatatgaagtgtatggtggagaaaatgaggtaattcctgaagtcttgaggaaaagtcattcccactttgacaaattaggggagaccaaacagactccgcatagtctgccatcacgaggtgcctccttttcagaccgaacaccctctgcttgtagattagtggataacacaatacaccagtttcaaaatcttggccttttggattacccagttggcgtgaaccctttaagacaagctgcaagacaagacaaagactcagaagaattattgagaaaaggatttgtccaggatgcagagactacaagcctagaaaatgaacagctttctaacgatgaccaggccttgtatcagaatgaagtggaagatgatgatggtgcctgtagttcattatatctagaggaggatgacatttctgagaatgacgacttacgtcaaatgctgcctggccacagtcagtattccttcacaggtggaagccagggaaatcatttaggaaaacaaaaagtgattgagagatctctgaccgagtacaacagcacaatggagagggttgagtctcaggtgcttaaaagaaatgaatgctacaaacccactgggctgcatgctaccccaggtgaaagccaagaacctaacctctctgctgaaagttgtggcctaaattcaggggcccagtttggtt

SEQ ID NO: 5217 - DNA, 2300 bp, Homo sapien
atgcacagtatgcctccccctaaccccaaatctcatcagacacaatctcttgagatttacagacagagcaaatatgaagaaaacaaagttctccactcctgcatcccgttcccacgttttctagttgattgaggcaaaaatgatatccccggagaacacatgtgtaatgtggtacatatttttttcagctaagccactccttggtcaaattactgacacatcggtttatacttgccctttccatctgacacagacagcagccagagatttggttcagtgaatttagggcttagaaaggcagagtctgtagtgttgcaagtcacagaaggtcattctaaaacactcgtatacttgttaatcacttgaatagggagatttgaacagtctactcctttcttttttttcaggcccgctcttaggacctctgacatacaaatgaatgccaaagagtgctcaggagctcaacttttacttcagctgttattaaccttcaaccacaagacaataacatctgttccttttatcccaattttacgtgcggcattcttagccatatctacactgtgtttttatgcacatcatcataccctgttgtagggctataaagaccctactatggtagaattgggagtggactgagggattaggacaaaaggatgtggaaaaccgcagatctagagatgcatagctattctcataacctaggaagagaggtggatttctccgtcatcaatagctgaacactccttgtgtttctaagtattgaatccataaagttacatgcaaacatacagcccttgccttcaggccaagccgtagttatgcagaaggcttgaagcaatcacagatttaacatttgtggttccagctattcaggaccaattcccaaactccacgacatgtaacaatttgtaattttgctaggacacagtttgatgcttaggttttaaggctggtgtgctagacgttatcaagtggtttgtgagagtagccctgtgtctccattgggtagagtagctgggtcgcaaggatcatgaagagatgaagaaatggctgtgaaaagccaactagcctcggtgatagtaagcaaaggtatagaaacactaaggaagttaccctttgtattgtcaaaggtttcagttttgtgtaaggtggtgattcacgggcagttaatctccatcactaaaattaaatccttttttattcattgcaaatagataatctgtggaagacattttggcttttctcgctagcagaaaatgtgaggcttcttcaggtttttcctgttcattgtttcacgggagcatcttccccaaaacactgcaaaactcaaagttctcaggctgatgtggcagaaagagcattgatctcggcttcaggagctaaattctctagtcctgactgtgccactaacagactgtgggacttcagacaagtacattcctttctcgggtttcttatgtcaaatggacagcgtgagaaggatcacaatgaaccagggatcagcttcacgattaaaacctaagacttaagagacggacatctgtccgttcctggctacacctccggcccatctggcccaccccaaactgcgcgaagcccctctccaccgacgccaggcctgtggcctcgcgcgaagctgttggtcgttaacatctcccccgcaatgggcgggatggagggcttcagcttccggctgcaaatggcgaggcggcgcgcggcgttgcccactggcctcggcatgggcctgcccacgcacccgcccagcgcgcgccggaccctgtctaccgccgttgaagggcttcccagccctagcagtgcgtactgggaagcccccaaaaggctctgcgaggccgaggagacccgttcggagtgggggaggggaagataaaccgaactatttatgttaatcagtgcatgcttcctttatggagattggccagggttttactctagtaaccaatcacttcagaacaagggcgggcccgttgatatctctcacactcattggttgagaggttgcggcgcaatggaaggtcttaaaccgagagtatccgggattatttttccccgccgtgcggtgcgtgtcccggaagtgacgcatggccaaggccgggcggccgccttgcccccgcttcctttcacgctgtcgctgcccgtaggtggttgtggccactgtgcccggagggaggcggcggtggccagtaatgcctgggaaactcctctggggggacattatggagctggaagcacccttggaggagtccgagagccagaagaaggagaggcaaaaggtgcgc

SEQ ID NO: 5218 - DNA, 2300 bp, Homo sapien
aagttagcgctgtggcataaaacaaaaatatgttgtttttcacaaaaagaaatttcaagcaaagttaaagtgaagtagtttttgcatatgaatgtgatgtgtatggatccatagatgtctttgataatttcatgaattataaagccggtatatcttatttacagtttttatatttagttgacccttttcttctcttttcttcagtcctgacctttgcttttaaataaatgaattttctaaagaggtgttcatttatttgtcattcagtaaatgttcagcatcatttatttcagtgttacctttttttccctttagtatggaatacgtcatgaattttcatgtcatccttgtgcaggggtcatgctaatcttccctgtgtcattccaattttagcgtatgtgctgctgaagtgagcacacacagatggactttttaagaagagtattatagaaatgatactgctagtttatatattattggggtactagacatcttattttataaatgtaaaatcaaccaacagagaggactagtaaaatgtaagcctaaaatttgacctaaaaagctgtgtgcacttaaggtttgtaaaagtgaagaaaaaaatcagcatcataatatgaacaactgtatgactaaaagtaatttgttctttgtaagactcctgagtggtattataagagcaaattaacatacatacataaatataattaaatcataatagtcttggatcagctatcccaaatcaggttggctgtgttgacttacaggataaatatttttggagagttatgtttttcgggtgaaattaggaaaagactgaaataggacataggatataatctcaacactgctttttttttgttttgttttgttttttgttttttttaaagacagggtctctctctgttgcccaggatggagtacagtggggtgatcatggctcattgtagccatgaactcctgggctcaagcaattctctcttcctctcagtctctccagtaggtaggactgcaggcaggtgccaccacacttggctaattttttattttttgtagagttggggtctcattctgtagtccaggctggttttgaactcctggcctcaagtgatccttccaccttggcctcccaaggtgttgggattacaggtgtgagcctccacgcctggccccaaagctgccttaaaaagcttttgtattagaaagatgttactggagattccagctccgccatttctaggtgtttgattttgggcaagactttaattctctgagacacaagtctctcatttacgaaaatggtggcataatgccactcatgggtttttatgagaatcaaattagataattcctgtaaagcattagttcctagcacatggtgaacattcattcgtttaacatttttgagtttcctgtactgtaccaggcactgtttgaagtgtaaggaatacagtaacccaacctgacataaattcctgccttcatggagcttacattttattgggtgagatagacaatcagcaaataagtaaaatatcagtatcttaggtggtttaagtgctgaggagaaatgataaagaggggcagggggatatgaaaatgggcttgggaacctcactgaagagacctgaaggaagtaaggggggaatgtaataaatacatgctgctgttccttttgctatttgtgatgtgtctttaaatacttcgacattaatgttgagattcctggttttaaatgcacctaaaaaaagtcttcttggttttaatttagatatgtctttagaaaagtatctttttgttttttaaacctcttgctcaggtacttgttttggctccaacaagggaactggcaaaccaagtagccaaagacttcaaagatataactaggaaactcagcgtggcgtgtttttatggtggaacatcatatcaaagccaaagtgagtaaatatgtttgatagacgtgcaaaggcatatttgatactcatatttaaataaataatgtgaaagtttgaattttacatattggtggcatttctctcttctcacagttaatcatattcgaaatggtattgacatcttggttggaacacctggtcgtatcaaagaccatctgcagagtggccgattggatctttctaaactgcgacatgttgtgcttgatgaagtggatcagatgttagatttaggtttcgctgaacaagttgaagatattattcatgaatcctacaaaactggtatatcctaattcaaaataagcacattagcaattattgttcgatcttaaatgcaaacgagttttt

SEQ ID NO: 5219 - DNA, 2300 bp, Homo sapien
tatgaacaactgtatgactaaaagtaatttgttctttgtaagactcctgagtggtattataagagcaaattaacatacatacataaatataattaaatcataatagtcttggatcagctatcccaaatcaggttggctgtgttgacttacaggataaatatttttggagagttatgtttttcgggtgaaattaggaaaagactgaaataggacataggatataatctcaacactgctttttttttgttttgttttgttttttgttttttttaaagacagggtctctctctgttgcccaggatggagtacagtggggtgatcatggctcattgtagccatgaactcctgggctcaagcaattctctcttcctctcagtctctccagtaggtaggactgcaggcaggtgccaccacacttggctaattttttattttttgtagagttggggtctcattctgtagtccaggctggttttgaactcctggcctcaagtgatccttccaccttggcctcccaaggtgttgggattacaggtgtgagcctccacgcctggccccaaagctgccttaaaaagcttttgtattagaaagatgttactggagattccagctccgccatttctaggtgtttgattttgggcaagactttaattctctgagacacaagtctctcatttacgaaaatggtggcataatgccactcatgggtttttatgagaatcaaattagataattcctgtaaagcattagttcctagcacatggtgaacattcattcgtttaacatttttgagtttcctgtactgtaccaggcactgtttgaagtgtaaggaatacagtaacccaacctgacataaattcctgccttcatggagcttacattttattgggtgagatagacaatcagcaaataagtaaaatatcagtatcttaggtggtttaagtgctgaggagaaatgataaagaggggcagggggatatgaaaatgggcttgggaacctcactgaagagacctgaaggaagtaaggggggaatgtaataaatacatgctgctgttccttttgctatttgtgatgtgtctttaaatacttcgacattaatgttgagattcctggttttaaatgcacctaaaaaaagtcttcttggttttaatttagatatgtctttagaaaagtatctttttgttttttaaacctcttgctcaggtacttgttttggctccaacaagggaactggcaaaccaagtagccaaagacttcaaagatataactaggaaactcagcgtggcgtgtttttatggtggaacatcatatcaaagccaaagtgagtaaatatgtttgatagacgtgcaaaggcatatttgatactcatatttaaataaataatgtgaaagtttgaattttacatattggtggcatttctctcttctcacagttaatcatattcgaaatggtattgacatcttggttggaacacctggtcgtatcaaagaccatctgcagagtggccgattggatctttctaaactgcgacatgttgtgcttgatgaagtggatcagatgttagatttaggtttcgctgaacaagttgaagatattattcatgaatcctacaaaactggtatatcctaattcaaaataagcacattagcaattattgttcgatcttaaatgcaaacgagtttttatttaataatttttattgcagtgtcccctgcgttctaacaaaactaaaataatttggtatctgttctgtccttgaaaaagaaagtatgatagcatcattttaactattttcttagctttctgtgctttattctatttttttatagtcagtagttagatttactaactcattttattgatttctttgttcattgttcctgcttaaattctcactttccttttgggttcagttctcttcatattgtcccccagttttgcaagttgaaagttttaataattgcaatgaagtctgtgtgttaaaaattcaccccaagttttacatttttcattatttttttgaagcttgggaggatttttaagagcgggctacatcgtgggaaattaagaaaacatttgaattctttttgtttatttaagattctgaagacaatcctcagactttacttttttctgcaacttgcccacagtgggtatacaaagttgcaaaaaaatacatgaaatccagatatgaacaggttgaccttgttggaaaaatgactcaaaaggctgcaactactgtggaagtaagtagctttctagcatgatagattttagcttttagttggtatttactttt

SEQ ID NO: 5220 - DNA, 2300 bp, Homo sapien
aaaaaaaaaaaaaaaaaattgagaccacgaaacatcaaataatagtttaggtgaaacaaaatttttccttgaaactctcagattaaaaaatgtgcagtagaccaggcacagtggctcgagcctataatcccagcactttgggaggccgaggcgggaggatcgtgaggtcaggagatcgagaccatcctggctaacacggtgaaaccccgtctctactaaaaatacaaaaaattagccgggtgtggtggtgggcgcctgtagtcccagctacttgggaggctgaggcaggagaatggcgtgaacccgggaggcagagcttgcagtgagctgagatcacgccactgcactccagcctgggccacagagtgagactgtctccaaaaaaaaaaaaagtgcagtaatcagaaatacagaaatacttttccagcattttcctttatcataaaatgtaatattttaaattgtgttttcaaatccttgtgacacactaagttttaatagttttcattgattgtgctctgtgtgtcaggcactgccagaccattttctgccattatcttatttaattttctcaattgatgaagtaggttttgttatcctcatttcatacaagggaaacttgggttcagataaggtaatgtttccaaaaataacagagcagactgggtatggtggctcctgcctgtaatcccagtactttgggaggcggaggtgggaagatcacttgagctcaggagttcaaaaccagcctgggcaacatggcaaaactccgtctctacaaaaaaaaaaaaaattaaaaaattagccaggcagggtggcacatgcctgtagtcccagctactcgggagactgaggtgggaggatcgtttgactctgggaggtcgaggctgcaatgagccatgatcacgccattacactccactccagcctgggcaacagagggagaacctgtctcaaaaaaatgaaatagataaagactgggcgctgtggctcatgcctatagtcccagcactttggaacgctgaggcggatgggtggataacctgaagtcaggagttcgagaccagcctggtgaagatggtgaagccccatctctactaaaaatacaaaaattagctgggtgtcgtggtgcaggcctgtaatcccagctactcgggaggctgaaggatgagaatcgctggaggcagaggttgcaatgagctgagatagcgccacttcatccagcttgggcaacagagcgagactccgtctcaaaaaaacaaaaaggccgattttcaatgtcagatattattctatcccatttttgaaatttattttttcttttatatatatgaaatattttatttatatattatatatgtgtgtgtatatatagatatatagacataggggttttgctgtgtcgccagggctagtctttaagtcctggcttctttggaggctgaggcaggagattcgcttgagctcgggaggcagaggttgcagtgagcccaggtcacgccatggcactctccagtctggatgacagagcgagactctgtctcaaacccacaagacctctctctcccgctagtctataaagcttcttgacgataaggcttttgtgcttgttagtgaatactagtcctgtttctcctacctgacacagtgaacgctcataagatgtttgagtgctcgcatgaatgaacgaccagacccgactgaattattttttttcttcaggctcctgagtctggtcgacactttcagagtagacgtttccaagagatgattaaggacacacatccgcgcgtctgtacgtgcaaactcgagcaatacaacataaagcactgaagatggcgccactcaaaagcaactagaagccttcatttatcaggctggggctagggaaaatctggccagtgttgaagaatacaaagctaacctttgcaattccttgcggttctaccgttccgtaggtgccttctagaccaagggccgcaagtggtcaattcactaaatccaaccacagtcacaggccgctgctttgaatttaccacgcggaaagcagcttttcctgtgcttcctgcttcccccggaagtgccttgctacgggaagtgacgagagccgggtggacccagggtggggaactacctcttcctctccacgcggttgagaagaccggtcggcctgggcaacctgcgctgaagatgccgggaaaactccgtagtgacgctggtttggaatcagacaccgcaatgaaaaaaggggagacactgcgaaagcaaaccgaggaggtgaaacggagggacctggggcc

SEQ ID NO: 5221 - DNA, 2300 bp, Homo sapien
cgggaggcagagcttgcagtgagctgagatcacgccactgcactccagcctgggccacagagtgagactgtctccaaaaaaaaaaaaagtgcagtaatcagaaatacagaaatacttttccagcattttcctttatcataaaatgtaatattttaaattgtgttttcaaatccttgtgacacactaagttttaatagttttcattgattgtgctctgtgtgtcaggcactgccagaccattttctgccattatcttatttaattttctcaattgatgaagtaggttttgttatcctcatttcatacaagggaaacttgggttcagataaggtaatgtttccaaaaataacagagcagactgggtatggtggctcctgcctgtaatcccagtactttgggaggcggaggtgggaagatcacttgagctcaggagttcaaaaccagcctgggcaacatggcaaaactccgtctctacaaaaaaaaaaaaaattaaaaaattagccaggcagggtggcacatgcctgtagtcccagctactcgggagactgaggtgggaggatcgtttgactctgggaggtcgaggctgcaatgagccatgatcacgccattacactccactccagcctgggcaacagagggagaacctgtctcaaaaaaatgaaatagataaagactgggcgctgtggctcatgcctatagtcccagcactttggaacgctgaggcggatgggtggataacctgaagtcaggagttcgagaccagcctggtgaagatggtgaagccccatctctactaaaaatacaaaaattagctgggtgtcgtggtgcaggcctgtaatcccagctactcgggaggctgaaggatgagaatcgctggaggcagaggttgcaatgagctgagatagcgccacttcatccagcttgggcaacagagcgagactccgtctcaaaaaaacaaaaaggccgattttcaatgtcagatattattctatcccatttttgaaatttattttttcttttatatatatgaaatattttatttatatattatatatgtgtgtgtatatatagatatatagacataggggttttgctgtgtcgccagggctagtctttaagtcctggcttctttggaggctgaggcaggagattcgcttgagctcgggaggcagaggttgcagtgagcccaggtcacgccatggcactctccagtctggatgacagagcgagactctgtctcaaacccacaagacctctctctcccgctagtctataaagcttcttgacgataaggcttttgtgcttgttagtgaatactagtcctgtttctcctacctgacacagtgaacgctcataagatgtttgagtgctcgcatgaatgaacgaccagacccgactgaattattttttttcttcaggctcctgagtctggtcgacactttcagagtagacgtttccaagagatgattaaggacacacatccgcgcgtctgtacgtgcaaactcgagcaatacaacataaagcactgaagatggcgccactcaaaagcaactagaagccttcatttatcaggctggggctagggaaaatctggccagtgttgaagaatacaaagctaacctttgcaattccttgcggttctaccgttccgtaggtgccttctagaccaagggccgcaagtggtcaattcactaaatccaaccacagtcacaggccgctgctttgaatttaccacgcggaaagcagcttttcctgtgcttcctgcttcccccggaagtgccttgctacgggaagtgacgagagccgggtggacccagggtggggaactacctcttcctctccacgcggttgagaagaccggtcggcctgggcaacctgcgctgaagatgccgggaaaactccgtagtgacgctggtttggaatcagacaccgcaatgaaaaaaggggagacactgcgaaagcaaaccgaggaggtgaaacggagggacctggggccaggagggacgctgaatggagcggaaccccggggtgcgggagaagtgcccgggctgggatcgtgggagcgcgcggcggataacagcgcgtccagacaccgggcgtgggtcttggcgggcggtcgcccaggagtggtgcgctccccgggcagtggacgcgtcgtttgcccgaccgagccaggtccgccgtgcgctgacctcttcctctgagcttataggcatccacaggtcggaactctggtagagaggccctgttggagctcgggagagggccgggtgtcccacgtggtccccggcgacttgggc

SEQ ID NO: 5222 - DNA, 2300 bp, Homo sapien
taagcctcccgagtagctgggattacaggcacaagccaccacacccagctgaaaaatactaattctaatagattttctttttgctatagatcatggtcaacatttgtaacttttttcctgattataaaaaatatgtgatccagagaaaatagaaaatgcagacattttgcaaaaagaaagaaatgcttcctggaatttcaccattcatttagtaaatattaatacctgtacttttcaagtacagaagtcatcttgttaatttttggtgtttccttgtagtacttttagtatatgcatctattatttttaatcagattaggattgtactgtgcaatcttgtatcttttttgtttctagctaagcattttcctcgttaagtacgcttaatggttacataatccttcatataaatgtcttgaaatctacttactacttgtattgagcattcagatatcttactatcaaataatgccacagtgactgctacctcataaaatgtttgttcattttctatggatgtgtgtatacaagagatgctgctttggaagagggctaatgacatttccatcagtatattgttgattatggttatggagtagatcttagttgagatctagtcacacataatcttagttgagatcttagttgagatctagttacccagtatatatttgcctcagatttttcttttgttaaagttttatagatttatgacaatgtttccttttcagatctcgagttacctatcaaggtttttgtatctttttggttgatttttaaagtgatgtgtttagaagaattgctttaggatagcttgttttgtctctttctcagaaggttctctattaatttgtgtaggtgattattgatttctttctatggccctttacttgataggaaatacctgtggaacaaaaagaaggcgctttctctaattttcccatatctgaagaaactattaaacttctcaaaggtaatgttcttggaaatatcgtatgatgttagaacgtattattttaacagaagcactccactatttttgttaagatgaaccaggatgtattcttattgtaggctgatatatgcagtcatataatgaagtaggcctgtgtattcaatttagtactatagtagtgatggttcttcatgcttcttaaacaagtggttaaagctttttcaggccctctgtggtggctcacacctgtaattgattgaggccaggagtttgagatcttcctgggtaacatagtgagaacctgtcccgacaaaaagtttaaaaattagctgggcacgtggtaacacacatctatagtcctaactactccagaggctgaggaaggaagatcgcttgagcccaggagttcaaggcttcagtgaactgtggtcacaccactgcacgccagcctgggtgacagaatgaaaccctgtctcaaaaaaaattgtatttaatacagtgtgtattcagaagtgtattgactaatggtgctggtgaaattaagcaattaggtgatgccatattaatgttttatctctttcacttctgaggcatctctagattaatgagcctaatttataggcataaacccagaattcatttaataatctgcttctgaagtagctggagtcacagttactcaagtaggtgcttcctaaatcaggagcagcacagttggattgcaaagcaccagattttcaggcttatggatgagacttcaaatatttactataattggatgctttaaagtttgttgatatttttcagtcaagcagattctttactatcagaatatttctgagccaggtatgatggcttgcacctgtaatcccagctgtccatcaggctgaggcaggaggatcacttgagcccaggagttcaaggctgcaagtgagttatgatcacaccactgtactccagcatgggcgacaaagcaagaccttgtctcttaaaaaatatacgtatttgagcctaactttgtagatgttgaccagaaggtagaattccttaattctgcaggaccagaagcatgagtagtatacttcagtatgtcagtatggctaatgttttaagaattgcagtgtgagataacacagttaatttgttcataggccgaggagtgaccttcctatttcctatacaagcaaagacattccatcatgtttacagcgggaaggacttaattgcacaggcacggacaggaactgggaagacattctcctttgccatccctttgattgagaaacttcatggggaactgcaagacaggaagagaggccgtgcccctcaggtaactgtcttaaat

SEQ ID NO: 5223 - DNA, 2300 bp, Homo sapien
taatggagataaaaagatgtacacagagctctttaggaggtggactaagcagtactatctggttttaggtttaatgacagaagaggcctggtgcagtggctcacgcctgtaatcacagtactttgggaggccaaggcgggcacattacttcaggtcaggagttcgagaccagtatggccaacatggtgaaccgcccccccaaccccgtctctaccaaaaatacaaaaattagctaggtgtggtggtgcacacctgtaatcccaactactcaggaggttgaggttgcagtgagctgagaccacgccagtgcactccagcctgggcaacaaagcaagactccgtctcaaaaaaaaaaaaaaaaaaaaaaaagaatgacagaacaggctgggcttggtaatcccagcactttagggggctgaggtgggaggattgcttgataagcctgggcaacatggcaagactccatctctaccaaaaaaaaaaaaaaaagtgcaggaaatcagcctggtggatggtggtgccattcactgacatgtagaactgcaaatgtggcaaatttggtatgggaaggaaggggcatgtgaagaggaagatcatttagacttgaacatactgacacacagcagctattgaaacattcaggtgtgattgttgtagctggatgttggatattccagtctggagctctggagagccatctggcctggagacaaagtgggagtgagcagcgtgtttaatgatagacctggaaatggatgagatctcccagggataaggtttaggaaggactttttaggagcattaacacttaaaggatagacgtttaattttatttattcttcagaataattctgtcgaggtaagtagtatcattcagattttactgtgggaaacctgaagcttaaaaaagttaacttgtcaataagaaagctggttggtctgaggttcaaaccatatgtctatgagctcccaaaatcaatgctcctttgtatgtctcaaagcactgtacacagctggtgcttaatagttaaaatcttctatcacccctccccatttgacttgataacttaggaaggtaaaaggcatgaggcggctttcacagctgtgggacttagctcttgttaccttgggcagttgtacagattcctacaacctgtatttcagggtcgaagtgaaaatatttgtctatcactgagtgttttgtatatttatggctctcgatcaagagattatgtgtcaatgataataatcagctcttggctacatttcaattttttttcttttattttacttttaagttctgggatacatgtgcagaacatgcaggtttgttacataggtatacatgtgccatggtggtttgctgcacctatcaacctgtcagctaagttttatgccccgcatacattaggtatttgttctaatgctcgtgttttctttttttctgaggcagtctcgctcactgtaacctccacctcttgggctcaagccatccttccgcctcagcctccatggtagctgggactacagtcgcgcgccaccacgcccggctaattttttaaaaaaaattatgtagagatgggtcttgctatgttgcccactccagtgggcatcccaaaatgttactggcatcccaaaatgttaggattgcagatatgagccactgcgcctggccttttttaaaaaaagttttatccagtgacaggctgggctatacacttaatgtctaaaggtttttgcctttcagttcatatcaacgcgagtagagttagctagctatgtttgtaaacaatattccgatatgcttcgttaaagtaagccgatattaaacatttatataaatccatcctcacagggtcaatctggagataaactcaccgctgcagggggcggggaaggaggtgggaacacgctcattgacaacttcatttccatgagaatggttgctgtggtgattgctgcgtcttcccattggtcattgccgagcgtattgcggttctccgggagggttatattggttcccattccacagcggccgcaacgtgtcgagagccgtaagtaaagtgtcgcaaagcagaaggaaggcgggagtcccgactgcaaacattgaggaaagccaggcagtagaggccgctatggcgaacgttccgtgggcagaggtctgcgagaaattccaggcggcgctcgctctgtcgcgggtggaactgcataaaaatccggagaaggaaccatacaagtccaaatacagcgcccgggcgctactggaagaggtcaaggcgctgctcggccctgcgcctgag

SEQ ID NO: 5224 - DNA, 2300 bp, Homo sapien
aaaacacagccctaatcagctctggggatttgcaggaaactcatcgaagctattgataggaactattgttttggtgccagggttttcaattgggagttagatttaaaaggaccaaagatgacatctgatatttcaaacagaaaccgacatttctcagtggaaaactttccgggccagtgcattttggggttggttactgtgcttggagacgcccctgagttggaggacacacttctggctgatgtgaggggcttctgaggagggccaaaatgtacactctttgtgttcttgcaccacggctattagactgtgagactctgtccttagcaggaaatggtaaaggaatcagcaggaagcctaaaacaagggaagggaaactcctccctcctatcaaaggccaggcaagggcgaggatgagaatggaaagtggggcacgtgcattaagccgtctgggggagcggtagggatagacatgttgaaatggagagtggttgaatcttgaaaggaagtaaggaaaatgtatatgccacaagggcaaggatgtatgataggcttgtatttattgtataactttattttattttattttattatttttagttttttgaaatagagtctctctctgtcacccaggctggagtgcaatggcacgatcttggctcactgcaacctctgcctcccgggttcaagcgattctcctaccccagcctcccgagtagctgggactacaggcactcgccaccacgcccggctaattttttgtatttttagtggagacggggtttcacggtgttagccaggatggtctcgatctcctgaccttgtgatccacccacctcagcctcccaaagtgctgggattacaggtgtggaccacagcacctggcctttattgtataactttaatatggagccttagtcctccagaaatctgcaccatgcccagggaaaatgctgttcctttatttacatgaggcagaggtttgtgttgtttgctgaggtccagcagctcactgtgaggacaacctctccctcgttcctgatttctggcttattcaaggccagaggacccaaaactcgagttgaaaattttgactaggagaacagataaaaatagaaatggaatccatcttaagaaatgctcaatgtgaaggagaggggaatgcaaaatagtttttctgttttaccacagtctttgtaactgaaaatcctatgttcttgagatagagagagagccaatgatccaatgcaagaaactgagtttaagaagaaactgtttgctgggcacggtggctcacgcctgtaatcccagcactttgggaggctgaggcaggcggatggcctgaggttgggagtttgaggccagcctggccaacatggtgacacgtcgtctctactaaaaatacaaaattagtccagcgcagtggtgtacgcctgtaatcccagctactcaggaggctgaggcaggagaattgcttgaaccctggagatggaggttgcagtgagctgagatcgcgccactgctctccagcctgggtgacagagtgagactccatctcaaaaaaaaaaaaaaaaaaaaaaaaaagaagaaaaagaagaagaagaaactgttcatctgaaatccgacaactcattcttgaaggttagagctcagctttgaagtttcacttcacgagcttggctcagtgaggtatgttactccccggtgaaaaagaaaatgaagagaatgttttatgttgaaagtgcttggtgacgaaaaggcagcacctagatcccttatctcataaaaaatgcagcagattcttaatattagcaatctagtgtttagattgttacctgaagaaaggaaaaacaaactgtcccaaatgctgattctactgtttcggtgggaaaaaaaaatgtcttgcaggcaagtggcaaacaacaaaacttttgaaaaagcaggcctggggggagtccagtacagtttcataatgggtatgaatagttattttactgtgttccccccaccccctttctttctgggttttgatgtggatgtctttctatttgttcaggaaattgtgacgtgtgttctgggcagggtttgaggttttggaacattttctaaaagggacagagagcaccctgctacatttcctaatcaagaagttggcgtgcagctgggagagctagactaagttggtcatgatgcagaagctactcaaatgcagtcggcttgtcctggctcttgccctcatcctggttctggaatcctcagttcaaggtaagactcaggagtcttgttccccagccatcttc

SEQ ID NO: 5225 - DNA, 2300 bp, Homo sapien
tgctgaatagattgataggtaggcagacagacaaataactagctcaacaattctgttgcttcttgtatttattatgatagcacaattattgattgggttttgatcagtagaataaataattagtacaaattggtttctagtgtgactttctttgccacctcttatttatacctggcttcgctagtatttctttgcctgtgtggcattttcatctattctctttgttatgttgatatttaagtcccagaaaagagtgggtaggaaccagagtagctctcaaggtgacaggcaaatcttctaagtgaaaaaaaccatttttcacttttattaattaaagatttgcattgtttttgctgctttcttttcacagttcaaacagacaacaatatcagtgttactatagttatttattttttttgagatggagtctcgctctgtcaccaggctggagtgcagtggcgcaatcttggctcactgcaatctctgcctcctaggtttaagtgatcctcctgcctcagcctaccgagtagctaggattacagacgtgcaccaccatgccccgctgatttttgtatttttagtagagacggggtttcgccatgttggccaggctggtctcaaacttctgacctcaagtgatccgtccgcctcggcctctcaaagtgctggaattatagactgtgagccaccatgcctggcccaaatatgtgcatttaaagctacaaattttccttttacacagtgtcactgcattccacaaatttgatatgttgtattattatcttttatttcaaattattttatttttattattttttatttttgagacagagtcttgctctgtcgcccaggctggagtgcagtggctccatctcgggcactgcaacctccgcttcccggattcaagagatactcgtgtctgacctcaggtgatccacctgccttggcctcccaaagtgttgggattacaagtgtgagcctccgtgcccggcctcaacttatttttaaatttccattgatctcttctttgacctagagatttggaattatgttgcttaatttccaatatttccggaattttctggcttgtttgggttgatttctaattttaattctattgcggttagagatgatactctgatttcaatcctcttaaatttgaggctcacactgaggattaagtataaaaaaattttttttgatacctgtttcatggactcgcctcacaaacttctgttttaaggtggggtaattatagtgcgttcagggatggatttttcttctgctttggttatgcatagagtgcactgtggcccttcaacactatactctgaaatcccacacagtattttcctcatctggaggtcctataggcttacactagggaggaggatccagttcaggccagcgtagtcttcagctgcgccgtgggactttcgggggagcgcctttgccctctcagaacggctgggcggaacggtgggtttgtgagccctccaggctcagggtgggtcgctcaggggccatctggggactttgggaagcaatgaaagttgtaccctaggatttttttctactggtcttctcttcagaggcgagaaagccaagttaagaaaacccagactcagaaggaggtggagcgggactgcgttcaggcaaggtggcagaacgcctcgccgtggacgaagagagcacatctcttcttgcgaggcctaaggaagtagggctcccactcgcctcggcaacccaaggacccagccaaggagagagcctccagatgaatccttcctctcctccttccttcccagccgctcaaactttcacaaagaggaactgggtgcggtaaagaggccggacacggaaccgctcgtccggtgaccgaagagacggcgaggaggagcccgcgaacccgcctctgttcaggccccgcccactcgacgtaatttgcccgcccctctccaccctccgaagggtggagcctgaggccccgcctccaagcggcctctccccggagtgcctggcggccagcagggcggggcaggaggctgggagagggacgggtgcgggggtgggggagaggaagggagcggtcacgtgtgaggggcggcccgaggtcacgtgacggagcgccggagcggagggagccggggctgggagttctcctgagggaagaggagtggagtaggggggacgcggcggcggcgttgacaatggtgagtgcgcggcggccagcgcgctcgcctcccgccctcgtcccggagcgcgcggcgggccggccaaccgcgggccgggcgtcgccg

SEQ ID NO: 5226 - DNA, 2300 bp, Homo sapien
gaccagcctggccaacatggtgaaactaaagagaatacaaaaattagccaggtattgtggtgcaagcctgtagtcccagctactcgggaggctgaggcatgagaattgcttgagcctgggaggtggacgttgcagtgagttatgattgcaccactgcacttcagcctgggcaacagagtgagactgtctcaaaaaaaagaaaaaaaaaagatttagatttgtatctgactctaccacttactggggcaagttagttaacctggtgacaataatacctctaaattgttgtcaagcatattaaaagattaaaaggaacaacatagtgcttgcctcagttacgtattaaacgtttggtttatccttcattctcctagtttccaaatctgacgagacatcattgtttattaacattttctagcatatttagtcactcactacattatctaaggagtcttgtaaaacctctcattccacatacatggtctccatcataactcagacacaggaatctaccaccttcagctagaactgttgataaagttgtaattttcctccctgcatatttgtgtttatcctagtctatcctaggtacttcctaatgaatgatttctcttctcaaaaatataatcactatttgtaagccatagaattaggtctgcgttaactctgttacttaaatttttttcagtatgtcttttccttagttaagcctctgcttacatcgtttccactgactagaatttacttaccgcttctctatgttttacttttaagtctggcagaaatctccttaccactctcaaattgctcctttctttgaactgccattagtctattagagtaataagtgcattatttaacgtgtactgttcttaccaccaaaaccagatcagaacctttgaaagcaaaggactgtctccttgtatccctgatgtttaaaaattattttgtgaatcaaaggcacgtggcaaattgttactggaatcctattagacatacagtattgtatattacataacacgttccttcaagttgtaagatcttaatgatgtaagtataaagagatgtggatggagatgctaaacttgtgaattttttttttttttagacggagtctcactctgttgcccaggctggagagcagtggcccgatctcggctcactgcaacctctggcacccaggttcaaacgattctcctgcctccgcctccctagtaattgggattacaggtgtgcaccaccacgcccggctgattcttgtatttttagtagagaggggatttcaccatgtttgccaggctggtctcgaactcctgacctcagatgatccaccggcctcgccctccctaagtgctgcgattacaggcgtgaaccaccacgcccgggttaaacttgtgaatttaacatgttgcagcctcacatgagaacacggtattcaacaaatgcaatggaacgaaactatggctggggtacagagcacgtatttttgccatgtggtcacaactatgtggtcatagctgctaggatgatgtacgcaaactgctcacattaaagcaaaagtacttacgtaatacaaggggtttaatagtgcaacaatatttcttagcaacatttctgaggggcatatcaagttattatcgctaacgttatcatatcaggaaatgacggttaacaatgcaagaaacttttgggaaatgctatttagtgtttgagtccgcaagacatactcgtaccctgagcattcgcagttgctgctccaccacccattctctcactgctcacccacgtgcttctggacacttgcttaccaaagtactagtttgcatcacgtgacacgactagcaggccccctccgctcatgtatgacatcccaaagatgcctgattattttcccttctttagggaaaggtggtcccaatcaccaacaaaacagagaaagagaacgagaattatctctagtggttttgcctgctaatcttctttttccctgaaagaacaccctcacggcacggcgttttccttaacggtcaggcgttttcccgggcagcttacctgctcggcctgggtctttctggacagcaggcgctggaggtgcgcgtcactgtccgccgccgtgtccgcggctgcgccagacagtgtagaacctgcggcctcgatgtccttctcccgtgccctattgtgggctcggctcccggcggggcgccaggctggccaccgggcagccatctgctctgcccttcgtccccactttgggccctttcccggggttctggggcaagtttctgtccttgccaccgcct

SEQ ID NO: 5227 - DNA, 2300 bp, Homo sapien
gtttggggcactgaatggtttggggaactaaaggttcatctttgtttgcttgtgtaataaaggagcaagctaaaagtcatagtctgagggtaaattgactgaaaaggatggggatcctcaatctgggagacagttttaatatgcttatatcaatctgaataaagcatctggagtaattttaaccgagcgtcctctgcattgtgggcttaagtgagacctgatggctcgtccacacggcaatgggtagagagcactgaattccagctactcaggaggctgaggcaggagaattgctttaacccaggaggtggaggttgcagtgagttgagattgagccactgtactccagcctgggcaacagagtgagactctgtctcaaaaaaaagaaaaagaaaaacaaattcttaacatcccaacagaatgctgctactaatagttatcaattgcgtatctattgagtatctattgcgtggagaaagcagggctggagagccaatgccatgtattatagctgggccctggaatcaaacttccaggattgaccccttgctgtcctgtttatggctttgtgatcacgtaacctttctgggcctcaattttttcatctataaaataagagtgggccgggagcagtggctcatgcctgtaattccaacactttgggaggctgaggtgggtaaatcgcttgagcccaggaattcaagaccagccagggcaacatggcaaaaccctatctctacaaaaatacaaaaattagctgggcatggtgccacgtgcctgtagccccagctaccctggggattgagatgggaggatcacctgagcccagaaggctgatgttgcagcgagtcatgattccacgactgcattccagcctgggggatgaatgagaccctgtctaaaaaataataataacaagagtaataaaaacaaaatgggattggtaaatgctccatccatgttagccgctgttgttaacgctgttgttattggtttcattagccagccagtgactgtgggaagagtgcaaggttgattgtacccatgtattgggtgctttctgggtccttctcatgtcaagtatgatgagtgagaagtgagtgaataaaacatctcagtggcctgagacatttctcttttttttctttttttgagatggagttttgctcttgtcacccaggctggagtgcaatggcgcgatctcggctcactgcaacctctgcctcccaggttcaagtgattctcctgcctcagcctcccaagtagctgggattacaggcacctgccaccactcctggctaagttttttgtatttttagtagagatggggtttcaccatgttggccaggctggtctcgaactcctgacctcatgatctgcctgcctcggcctccccaagtgctgcgattgttacaggcgtgagtcactgcacccggctggactgagacatttcttatctgtgacttccttctctccagcagtgattcccagtgagcactggtgacttcagttcactctttctcaggaatattttttcctgggtcactacctgtgaactaaagattttctggcttaacactgtgaataggtaaacatttattgatcattttctgttaaccatgggctattagttaagagatctgatctgtcacaaatggaagaatctgccccaacattcttgaaatcccattgaccaggacaatgtttagttttagttagttcagtgcttctgaggagcagggggtcacagagttatgccactggcataaaaaactaaagagaaaagcctgggactggaaatttgcagagcagctccaccggttgaaagttggctttgtttagtgcccaacttcgcagaagattttcctcggctgagtgggcttggcagagccccggcttgagagggttgcttagcaatgagatttggtggcacccaattctcaagtagtcaagcaacccatcaataccctgcttccccctccactaaacctcagctaccatccagagcctcctattagacaatcaagtgtgtgccagagggagggaccaaaggggtggggtgggggggagtttaatcattgaaccaagcaggctggaggtatttagtccgcaacacctcgctccccaggaggtctgccagcctggactggaagcgtgcaacactccagagtcgtaggagtgaacactgcacaggaatctctgcccatctcaggagaaaccaaacttggggaaaatgtttgcggtccacttgatggcattttacttcagcaagctgaaggaggaccagatcaagaaggtaa

SEQ ID NO: 5228 - DNA, 2300 bp, Homo sapien
gatgttattatccctgctttacaaatgagaaaacaaggtgggacacaatggcccatgcctgtaatcccaacgctttgggaggcagaggcaggcagattacttaaacccaggagtttgagaccagcttgggcaatatagtgagacctcatctctacaaagaaaaaaataaaaataaataaaattttctcaaagagaaaacaagaggctcatgaaattaaggaactggtccaaggggacacaatttgtcctgaaccatgattcaaagccatgtgtgtggaacatgaaagctcattccctttcactattccacaccaataagtgactcaagccaacaatatcaagcacatcccaaggaggtccatgtgactgtcaactgggcatcataaccaggagggccaggaggaggagattgatcagggtccccaacccagacaggagtggcccggggagactagactcttgacagtaactcccccaacctggccccagaacgtccccttatttgctgtctttattcacataagattgggttagcttcctcctgcttacagattgaaaactgagacacacagagatgagttaccaggaaccccggcctagctggtgacacagttcagactgtgtatcccaggctctgtgtctgctccaggacattctcactcctccagtgcccccattcctttttttttttttgagacggagtcttgctctgtcacccaggctggagtgcagtggcacaatctcggctcactgcaagctccgcctcccgggttcacgccattctcctgcctcagcctcccaagtggctgggactacaggcgcccggcaccacacccagctaattttttgcatttttagtagagacggggtttcaccatgttagccaggatggtctcgatctcctgacctcatgatccgcccgcctcggcctcccaaagtgctgggattataggcgtgagccaccgcgcctggtcctccagtgcccccattctaatcctcctcctgagggctcactacagggagagactccccagccttcccatgtttcttctagttggctatgtcagtggtcctaagtgcaggcctcaggcagcatcacatctgccaggaacctgtcagggaggcgaatttagggcctccttgcagaaccactgattccagtaggcccagcaatctgtgcttaaaacaagccctccaaggaattcctcacaccaaggtttgagagctagtgaaaagcattctactcccccgagctgtgcccacgttaatcataaaatcaaggccattgcgttaacaagttctctgcctcacgctgccacctcatcatgaacaaaaagaaaagaaaaagacaaacaagaaagctcctgctgttctctcctgcgtgcagcctgactcccacccgtgcccacattccccaagccccaattcctgcactgctgcttccctccgcgccttacctcttccagtttagtctgtcgacaggggaaagaaaaagttaggccaaggggcaatttcttatgctttaaatctttggtcttcatgaaatctgccagacagtcagctacatattcaaacagctgcagagaagagaaagcaaagtacatgggctaaggtgtggtttccccacacacggatgccaccgccttccctgcggtcacaggagccacctgccaggtacctctgtgccgttcccgcggatgatttcattgggcgttgggtagaactgactctccatctgcacgtgtcgcttcccctcttcagcgacttgcaccttcagcactcggaacttggaccctccgagatccagggaaaggaactccccattttctattaagaaacaaattcagtttccatttattgagggtctactacagatatggcaagctctgcattagaggttggacatataatcaacgtcttcaaatcacagccactaggtatcattatgctcatttgccaaggctgaggactctggccatttctcagagccctcgaggtaaggcgcagagctgagatgtgaactaagtcagcctgactctgcagcctgagcccaacccactggctcatgctgtaggaatgtgcatgtcaactggagagggcaaatgtgagcacagcccttgcggtggtatgagaggtggcctcgacggtggagcccatcctgggatgccatcactgggaagagagagctggtgctcccagcctggggaaactcggataaaggtatgagggggaagacaggatgtgcggcgaggagcagccagcctcctgcagccgatgatcctatgggcagagggaaaaca

SEQ ID NO: 5229 - DNA, 2300 bp, Homo sapien
gtatttttagtagagacggggtttcaccttgttagccaggatggtctcgatctcctgacctcatgatccacccgcctcggcctcccaaagtgctgggattacaggcgtgagccaccgcgcccggcctacaccaggtattttcattagagcattcctttgagagaggtagggaggtgacatttccactttgcagaggagtagactgaggctcagagaggttaaacgacttgtctaatgtctcatgaatccaagagctctaacttttcaataattactccttctgctaccatatatttcaaaccactcagatgagagtaatagtcctttaaattattagaaaaggctgcagaagcaatgttttaaaaaaattggggtgattcagcttagagaagagaaggccatgggggatgcacgtaggcatgaagtttctgcggctcagttgcacatctcagcacgtctttcattcaaactggacctgaaatcttctcccagggtgtcctactttcgtggacaaaaaagtttaaggcacgaggagttcaggacacggatgtggtgagccgtctgaccaaagccatgagaagacacaaggtgaggaattcacctcggtgtgggaggctctcccagccctagctcctttctcttgggttggtggggctgggggtgaggtgagggggtcacatatggtgcctgcatggagggagaatcagagaaggaattgatcttagaaaaggtcccactgtagtacagatgtggccaacttggatgaacccacagagccttggtaggcggggcttgcaccaatccctattgaaaggtggccagctcatccctgggcctccccagcagccacagccctctccggaggtcttggttagatctgatgctgtgtgtaggccccacacgccctcctctctgaggctgaaaagatcatatactttccgggctggttccatattctttctgggctggttctctatttcactgtccactccctgtccattaaatatccctatttgttgaacgtattttacaataatttaaactactgcgaaagcaagactcgctccttgctgagctggaaagtacacaaacccaaattgcttgttgccctgacagcaagaggcatgtttgctgcatagccttccagcctttttttctttaaagctgggatcttattgttttatagcctgcattttcccttattgttttcattttacttttttttttttttttttagagatgaggtcctgctgtgttgcccaggctggcagtgcctggcactccatcctcgaattcctaggctcaaatgatcctcccacctcagcctcctgcatagctgggactataggcataagccacatgcctggctctcattttactttaaaatgttcttccaaactttgggggatgttggtgcaataacccaagctgacttggcagaacaggaaatccagacaggaagtcaccatgccatacatggggaagacttggccgagtctgtgcctgctggctgagttgtccccgtgggtgaggactttggtgttttctcctggaaatgccactggataaacatgctttcctcaatgtcttcccaggatctcacaaacaaaggctgaaacctgggtgtgatgtgtgcctgtagtctcagctactcaggaggctgaggcaggaggatcacgtgagcccaggagtttgaggctgtggtgtgctatgtttgtacctgtgaacagccatcacactctagcctgggcaacatagtgagaccctatctgcagattaaaaaataaaattttttaaattaaaaaaaacatcgacaacaaaaaacaagggctggagtcccggtggcctgtccctcatatttccattgcagaggccttcacccacaaagcaagaggatgggctcccctcttcagctcctgtcggctctttctctcccctagaccctgaaccttgatgaggccttgctccttcagacaggcccagcaggcaggatctagggatgtctcagcagccaccttcactacctgctgcctctgtggggaaggagggagggaaacacctccttcccacccgctgattccctctggccttgtgttcggcaggacatggacgtggacatcctggccctggtcaatgacaccgtggggaccatgatgacctgtgcctatgacgacccctactgcgaagttggtgtcatcatcggtaactcaattggactggttttttgagggtaggggagaagggactgtttgggagtttcatttcagcgagctctgagtgaattcggcgggaagggcact

SEQ ID NO: 5230 - DNA, 2300 bp, Homo sapien
gagtgggatgaggcgtcagggaagcctctctgaggggtggcatttgagccgggacctcagtgatgcaaaccagggagcaaggtggaggcccgagggtagggagtccctgccaaaggaaagaggacacctacaggcttggagatgggaaggggtccagggagggggcactgggggaaccctatagccgagtggtgtccggatgaggtgagtgaaggctgagagtcggaggccattcaagtgagaggcagaggacagactgggcagattgcacaggatgtgcacacagtcactgtaaggtcaccggcttatcccctgagggagactggaaggcactgggggactctgggtgggggatggataaatggatgcgcattttattttatttttttatttgagacggagtcttgctctgtcgtccaggctggagtgcagtggcacagtcttggcttactgcaacctctgcctcccaggctcaagcaattctcctgcctcagcctcctgagtagctgggattacaggtgcccaccaccacggctggccaattttttgtatttttagtacagatggggtttcacagtgtttgccaggctgctctcaagctcctgacctcaagtgattcacccgccttggtctcccaaagtgctgggattacagccatgagccaccacgcccggccggatgtgcattttttaaaagcccattttggctgctgtgtggataatagattactggggacaagagtggaagcagggtgaccatccaagagaccactggactgtcaggcaaggtgcactgcagctgtggaccagagaggtcgtggtgcagtgggggtttccagtgggtggtctccacaccagagcgagggggtcagctggaggaatgtgtgggaaggcagtttggggtacagtaaagctgaatggctctgacttataggttgttcttgaatatccccttctccttttcccattcctttaccactcctggggaaagttcttctgaattgctttttcttaatgtccctcaagaccctcctcagcctggctttcccaaagggcaggtttttaaacctgaggggctccctccacccttctgtttccaggagcctcagaatggttcaggcccttgccagtcatggcacccgcctgtcactgtggctgcgtctggtaaccacagattgggggggccacgcctaaacagtgtccgtgcatttctgagaaaagctttttccaaatattacattctgcttttctacatttctcattttccatgttggcatttaaaatactcataccagagtatcagccaagggaagatactgaagaaaaaaaaaaaaaaaaaaaaacccgaaaattcaaacagctttattgaggcataaaagtcctccgattttaggtatacgattcaatgatttgtagtaaacgtatagttttgtaaccatcaccacaatccgattttagaacatttctgtcctcccaaaagagtccaaaaagatggtgcccacttgcagtcattccccagtgctcaagtgtttgaggcatttccttggagcgattttgtgtttgcataacggaatgttgctttcttaggtggtagctaatcacagtctaagataaggatgcagcttatgctagaaacaatttgtggcaggccataagtaaagaatatttttagtatcaaatagagaggaagctaagtagcttaaggaaagaattttcaaaattaccctgggttggtgattttttgaaaaaaatatttacaagattatcttcatttgtcctcttgtaagagcgcttcgtcagctttcatccatattcatcagcggacttcttcacaattgactccattcagaacagcaaaccctgagcaccctgagaagtgcagacttgacatgtcagctgttttccccatgtgcttggggcttgcccaagctgcttccctcagcgagagccagcccccagggaatgaaaagcactttgtggtacattgaggaggactccccagcagtcaagagttctctgtctgtgcccagctgggagtcctctctctgcatattctctctgatccctggttcaggaactggcaccaatgcgtgttacatggaggacatgagcaacattgacctggtggagggcgacgagggcaggatgtgcatcaacacagagtggggggccttcggggacgacggggccctggaggacattcgcactgagttcgacagggagctggacctcggctctctcaacccaggaaagcaactgtgagttcccttctggtgttatctgggcatcggcaccaggcag

SEQ ID NO: 5231 - DNA, 2300 bp, Homo sapien
agcctaggcaacataattagatcctgtctctacgaaaataaaaaaattagccaggtgtgatgatgcacccctatgggaggctgaggcaggaggatcacttgaggccaggagttcgaggctgcagtgagctatgattgcaccactgcactttagcctgggtgacagaacgagatcctgtctccaataataataataataataataataataataataataatgttcaatagtctgcctgggaaacaattaggaattgttggtgtgcagacttggagtaaagctgtaggtagccatggcaatgttaaatccacattgttgtagagcctgtctggggctgtccaagcccatctcacaagcacagcatctttctctcttggacagaagcttgatgtaggagtgggaagcatctgagtgtgaaatttgacttgtcgcatcatgtttgagtgattttgggaaaatacccaaagtctgtgaaattgagagtccctatgctcgatgtgagaatggtacccatggccagggtgatttgagacaaaagttcttgccatccagcactttgcgagaaggagggaatcttagctcagccctctcccatgtgctccttcctgtgggcagtggctcctggtcttcgggaaatgatgcagcttaatcaaaggggctgcgtccacagatctgttcaccaacctgcaggttcgagaagatgatcagtggcctgtacctgggggagcttgtcaggcttatcttgctgaagatggccaaggctggcctcctgtttggtggtgagaaatcttctgctctccacactaagggcaagatcgaaacacggcacgtggctgccatggagaagtaagcaagtccctctgccttggctctgtggagggctgggatgggaggcccaggtgtggggtgctccatgtggtaggacagcaggagggactagatcctcctccttcaccaggaagatttcagacctgggcatggcttcagatgggttagcaatttctgccatgactcagatgagaggttcttgttggtttcatcagtgagggactctgctgtcagagggccaccctcttcccatgttctgttgccttcttgttaaagtggtaacttgtagcatttttaggatcacagatccttttgagaactttattcaggttctagacccttagccccgaaaatgtacattcacacacaagtttgcttacaatatcagggcatccttggacactaagctcattgtggaatccaagtccagaactcctgtgatagcagagccttctccacctgctcccatcaggaactggctttgaatgtggtgatgtgaggccttacacacaggtccctcgcatggagctggctggtgaaggctgcaggtgacggcggctggccccggtgtgactgcattgccgtccagcacatctgagggtcctgctcctcaggcttagaaatcttggcatcgccttgactttgtgatcagtttagattctgagctcagccacgtggcgctgacctgcagcatctatgtctatgcagaacttggcagggacagaatttccgtgaaagtcagcatagcacagggtgattaaaagtgtgggtgctagaatctaactgctaagttcaaatctcggctctagcccttactagctgtgtagccaaggacaagttactcaacctttctgcactcacatctctcatctgtacgacagggtaatgacggtgcctcccgcaggatttttgtgggcgttgaaggagttactatgtgtaaaatccttagacaagtacctggctcatggtgactgctcagttagtggcagctgctactatcaatgttgatattgttatttttattctataccatggacctgcctattaattttcacaatcctgagaggtggagaagcttgttcccccaggaggataccagtgggatggagaagtgtcgttcactcattcctgtcccctggccaggtataaagaaggccttgctaatacaagagagatcctggtggacctgggtctggaaccgtctgaggctgactgcattgccgtccagcatgtctgtaccatcgtctccttccgctcggccaatctctgtgcagcagctctggcggccatcctgacacgcctccgggagaacaagaaggtggaacggctccggaccacagtgggcatggacggcaccctctacaagatacaccctcagtgagtgctgcctgccatccacgcccccacaaatgagtctccctggagcagggccccagtgtcttctggactatcctgcctatctggggtctgga

SEQ ID NO: 5232 - DNA, 2300 bp, Homo sapien
ccctgaccatttctccagtggacttcctctctctctcctctcttccccactttacctgaactgcctgtgcctttctgttctgccacatagttatctgtatgagtttcacatctggccagatagattgtaaactctttgtcaaacacattcttgtattgctctagtgaacctagcactgtgccattcctatcaaatacttacttgtgggaggcatgattgaagaaatagaacttttcaagaaattttcttcagataaagtatagactgggtatggtggctcacacctgtaatctcagcactttgggaggccaagtctggaagattgcttgaggccaggagttcaagatcagcttgggcaacatatcaagacccccatctgtacagaaaaatttttaaaattagttgaatgtggtggtgcacacctgcagtcccagccactcaggaggctgaggtgcggggtatctctcgagtctaggtttgaggttacaatgagctatgactgcaccactgcactgcagcctgggcaacggaaagagaccctgcttcttaaaaaaaaaaagagagagagaaagagaaagaaatgaaagaaagaaagaaagaaaaagaaagaaagagaaagaaagaaaaggaaggaaggaaggaaagagacaactattgtcatgggaaacaaactgaaaagaataatccacagtgattttatttgtatttatgtgcttaattacatacttaagtatgacaactccacagagtgctcttgctgtctcttcaaaagattatggctttggtcaggcgtggtggctcatgcctgtaatcctagcactttgggtggctgaagcaggcagatcacttgagttcaggagtttgagaccagcctggccagcatggtgaaaccccgtctctactaaacatacaaaaaaaaaaaaaaatagccgggcgtggtggtgtatccttgtgatcccagctacttgggaggctgagtcaggagaatcacttgaacctggggggtggaggttgcagtgagccgagattgagcaactgcactccagtctgggtgacagagcgagactctgtctcaaaaaaaaaaaaagtttttggattccagctctaagcgtcaccatttgctgaagcgggatgtccagatggagtgaagggggctgagtctaaagacggagagagagagaggccagctagggctggggataatgagggagctgagggttccccaggacatattttttacactttcttttttgttgttttttgagacaaggtctcattctgtcactcaggttggagcatggtggcgcaatcacgaatcactgcaaccttgacctcccgggctcaaggcattctcccatctcagcctcccgagcagctgggactgcaggcgcatgccaccatgccagctgatttttaaattttttgtagagacaggggtctcactatgttgccctgacttgtctcaaactcctggcctcaagtgatcctcccgccttggccttccaaagtgctgagatttatagtcgtgagccactgtgcctggtccatactttcaatacaaatgtatggtgatactactgtgaacaggtcctagatttaccaaaattatctttttgtgtgtttgtgtattttaaggttatatctctttagagaaatgtcgtatgaatttattaaatgtatctttttatattttgaagttatgcctctttggagaaaggtttcaccttatcaggtttcatcttaatcagttgaaaaccttgctgtccttattctctttccccaggtctcccatttcatggtaagtcatcctcagctcccagtccctctttcccctggttctgctaggggtctttctctttgctgtctttcctggacaaatgatctgacccatagattcaggttgttgtgccactaagttctcccatgacctggtctctcagcacatgtttggcaggttagggaggtcacccagtcccttctcacccagccgtggtctcttacaagaaaaaggagacacaaggtatctaggcaagcttgcacattctgactaattgattgcatcatagaatccttgaacaagaaccagaactccagagagggaaaacatctatcttgctgtgtttggacaggccagcccctgaaacatcttgggcaatggagggttaacttctcaaagtttaataggcaagaccagcaaccatgcaacaaggtaaattgtcctcacgagaactccaaagactatttttctctctctttttttgaggcagggtctcgctatgttacccaggctgctctcgaac

SEQ ID NO: 5233 - DNA, 2300 bp, Homo sapien
ctcgaactcccgaccagatgatccgtctgcctcagcctcccaaagtgctgggattacaggcgtgaggcaccggcctgaaatctagattttaaagtgaaatttcttaatttttttttaagggcaggcacaaatttataaaacatcaggtgggccaaataaaatgttacaggccacagttttagcttggtggttgctgatttactgaccctgttataatattggaggtcaggactttgggcaaatgaaagagaaaaggaggcagactgagaatgtgattttacaactccagcctctccaggggctgggtggccagtgtctcctcagcagccttctcccgcaggaagcagaactgtctgcaacgctgatggagtcacagtaaccttcaccccactgagctcaggatctgcagagccactaagaccctggagcaactgccttcagcatccaacagaagctgctaaaaggattatgggtcaattcattttagacatttcttccagatgttcccatggaaagctagggtctaaatcagtggtcctcattcctggcagcacctgagtttcacctggggaactgttagaaagtgaaacttggacggcattcacattagtccagtctctgggtggggcttggacatcagcatttgtagaagctccctaggtggctttggtgcagccaggttggaaaccactgatccaactaatagaaatgctaggttgggatctcttccgaggcatctctttaggacaggctgtgcatgacagtcccatagtgtcagggttctaagatgctccaatggtttaggcactggtcttaattttcgttttttcgctctctttgagaccttaacaaactctatagggctgggcacaatggctcacgtctataatcccagcatttttttctttttttctttttcttctttccttttcttttctcttctcttctctcttttcttttctttctttttttctgagactgtctcactctgtcgcccaggctggagtgcagtggcacaatcttggctcaccacaacctccacctcccaggttcaagcgattctcttgcctaagcctcccaagtagctgggactacaggctcttgccactatgcccagctaatttttgtatttttagtagagacagggtttcactatgttggccaggctggtctcgaactcctgaccacgtgatcctcccacctcagcctcccaaagtgctgggattacaggcgtgagccactgcgcctggccaattccagcagttttagaggtcaaggcaagaggatcccttgagtccaggagttcgagaccagcctgggcaacatggcaagacctcatttcaatttaagaaaaaaaccaaaacacccaagctctataaccttcacatcctcattgactgattaagtgcagataatgatatttgcccttctaacctcaccaggctgttatcaggagaaatgaagcaataaatgagaaattgctctgcaaactgtcaacgttatgtaaacattgctattcagagtgtgctcccaggtgcgggaggtacagctgttatctgttggagatcactcctgaagtaacattcctagtgccatgggtcagatgggaattggtacagacattccaacttagaaggcagcctttattgtcttataagcaggtgcgtttcctggggtggcagcctggcactggtcactccaaccccaacttgtgtaggaggtaccacagtaaatgagtagagagagttcaggggacttgaagggaagtggagggccatctggagagggagggaactaaggactccctgtgggttggggtcttcctgaggatccagggagtaactgtcaaggagccttagcagggatctaagagctatgcaagagcaaaaagaggcaaattattaaggaaattagtgaagtcagcactggaacaacagagaggggacacagcagtgcagcatgggccctggcctcaggaagctgtctgattggggcagataggaccagccccctagaagacagtcacccatatcagttaggcagtcatgactcagtgttacttatctgaggcccaggttgcatgaggggttgggggtgggatggacagagcactggctgggcatcaggactaggctggagtcctggctcaaaactctaccacaacctgacactgggcaagatggcccacctgtggcatcccaggttcctgccctgtaaagaggagtctgggtgtatatccagatggactgtgagcacagcctgagtttgccctgtcgaggtgctgaggcctgggagattgg

SEQ ID NO: 5234 - DNA, 2300 bp, Homo sapien
ttgattatgcattaggcttattcagcctgccaagtgccaggccctgcgcttgtgtaggagacagagcaattagcaaaacatagtcctccatcctcaaggagtttccagccctgtgagcttggcagatctgcagaactcaaatgaaatggcagttgagaacaaccatcttgttctcattcactccattttgcttaacggccatgtaggtagttccaaatgtttgatgtgtaccagaaaatctctctcttcctggtttataattatgatccagggcaaatccaggttttgttgggcttgaaaattaaataaattggcactctctatggaaaataattcaaatataaatatacaaatatcacactgctaggccctcccagggcctagaagggtaggaatgaaagtgagagtccctgaagctttaaccgcattaacttttcagtcagttctatgatacctgccattccttaagtgtgtattatgtgcacgtattttgcgtacagtattacacaacaatcaaggggaggtgaggtgggcattagtgtcttcatcttatggatgaagacacagtctcagaggtgattcaagatgcccctctgcataggccctaaggcagggggtggggactgtgacctggacaggaagctggggcctcaggactgcatctaagctcctccttttctgtgggtgatggtggctgtcaggcccctgaacctacgtcatccctccctctgatttgactgtacctttgctaggcctggtcaagggctagggactcctaaagtcaagagctagggtagaggttgggggttggatctcagggcaccatatggtgcagacttggttgcaggaaagtgacctatttaggcagaggggctctatacaactgggaccacagcaaaccctagaggtgagcacctgcttcaaagactcacagatccaagctgtgatcctagatctacaacttcctggctgtataaagtccagcaagactgaggcctcactgagcttcaatttccttacctgtctaaccagaatagcaacaacttgtttgtatatttgagctcattacatgtcattttgtaaggcactaaagctcctggaggcttccggaacacagaaataattaatctaagaatcctaaagtggctgtcctggtagcacctctagggagtcctcccatcctacgtaacttcctctgggaaagtagaaaacacggcacctgggaaggggcgctgaaccgtgccccaagtcccagtgggcctggatgcccaagagcaagaggaggcccagaggatggggacaggccacgacctgtggcccaagtcccgcccagagggagtgcgccctgagggagagccaccggagctggtgactcgggggcgggtgctctggggtgtcgctttgggttcagcaatacaaatctgccagctggagattaggcggggcacgccggggagaggtgatgcactgccgctgaagacccaggtaggccggtgcgttcggcctgggtgaggaaggcgcgggacccgggtgcgaggactgcgtagcgtccccggctcccgcttccgcccgctttccacgcccacttctgcaagtcccctccggcacctcggcgtccaccggactcctaggggcgagccctcatttccgaggaatgggaccgccttcgtgcccccggggctgccagtccctagactagccctaggggcttctcgtcccggcggagccgggcggtgcctcctgcctgcgcctcgcacctccccgcctggcacggcccacccgggcacggcgccgccacgcgtgaaggcccgcatcggctccctacgtgggggacgtgcaggatgatgcggggtcgggggggatttcgctgcgtcgcccgccccctttccggcgcaggagggagcggccgccgcgtccccgctccccggccgggacgccaccgccgggcgttgcagaggcgcgccgcaaccaatgggcgtggaggaggtgggtcggctggcggctgtcaccctccaggggacgggagcgcggagaccgggagcgcgcgagctgtcgccgcgccccgggccgagggggaggagccgggggaggaggaggaggaggagccgccgagcagccgccggaggaccacggctcgccagggctgcggaggaccgaccgtccccacgcctgccgccccgcgaccccgaccgccagcatgatcgccgcgcagctcctggcctattacttcacggagctgaaggatgaccaggtcaaaaaggtgagcccccgcccgcgccgccgctggtcctggccgcagc

SEQ ID NO: 5235 - DNA, 2300 bp, Homo sapien
ggaaataggaagcgggaagtaggtttttaaagaaaaaagtgtttatgatataattccatttttgtaaaacaaaaagaaccatccatctctttatgtatgagtgtttgtttagggaggaagatagtcctagtacatagagctctaaagtccttgtacataaagcagggatatctctggggagactgggggaagaattaataatttttacttttatgcatttttatgatgttggaatatattttacaataagtatatattactgttattgcttcttttttgttgtttttttgagatggagtttcgctcttgttgcccaggctggagtgcaatggcgtgatctcggctcactgcaacctccgcctcctgggttcaagtgattcttctgcctcaccctcccaagtagctgggattacaggcatgtgccaccaggcctggctcattttgtatttttggtagagacagggtttctccatgttggtcaggctggtcttgaactcccgatctcaggtgatccaccagcctcggcctcccaaagtgctgggattataggcacgagccaccgcgcctggcctattattgcatctttaaaaaaaaaaatgaaacagtgtaaatgtttcaagtagttttgttagaatctttcatttgccatttttttcaggcatattgcctcccagctttagttttctaccaatgggtcaatagcattttggtagatgccttttttttttttttttttttgagatggattctcgccttgttgcccaggctggagtgcagtggtgcaatctcagctcactgcaacctctgcctcctgggttcaagtgattctcctgcctcagcttcccaagtagctgggattacaggcatctgccaccacacccggctaattttttttgtatttttagtagagttggggtttcaccatgttggccaggctggtcttgaactcctgacctctcaagtgatccacccgcctcggcctcccatagtgctgggattacaagcgtgagccaccgtgcctggccggtagatgtatttttcaggcattgagatgaaaggagttaggggtacatgattatgtcacttagggatgggagggagggaaatgacacttgatgcttactttgtttctgcacattaaaatcctccccataaccctctgaagtggaggatttattatctccatcttaaaagtgagactcagagagattaagtaacttgtccaaagtcacacagctaataaatcggatttgaacccagctctctgtccacagccctgtgtactttccaccatgtgaggaaaatggaaatgcttaaggtgaagccccaaatgggaggttacgagccctggaatctagacccagctgccatttctaaactccccaacttagcttgaatcatgggtctgtttcctctcctagataatggagataatgatgtctttcctgcctacttcactgggctgcagtgacaggagaaagggaactagcattaaagcacctgcttcctgcgtggcacttggcatccacaagctcatttcacttctttctacacagttcaaatgggataatgtatgtgaaggtcctgtatctgaagggccagtgcacatgtgagccattgctaattgtgatgttaataagcacccaggacccgttctctctgagtcagtgtccttagcaaagggaagtgaattctgatgttgaaatctctgtcctcccctaagctaacatctttcttaacccttcagggtgcacgccacaatttccttttgtaagtggagcgccttgcttggaaagttcattttaaaggcctgcgtcagcagcttcagtcacgcctgctgttctgcagcattctcgatcctcacgggagggtggatgagagagggagtgaaattttccatggctgtgcacccttccacggggtggggtgaaaatggctgggatggttaccagtggttactggtgcctcctgctgcgaccggcctgttcacttgggcatgtccaatcttgcgtttgttttttgtgcatgttctgttgggagcaggaggtggggctggggtcgggcacagaaatgtttgtgagttgattgcagtgctaggccattgagttctttccttggttggagggctctgagccagggaagcttggcgaggctgtgtgttctctgctgatgacatgtcctcctgctctgcgggggtccaactttgggagccgctgagagcttcaaggcccccttggtccacaagaaggagaatccaggacaagtgtctggaaagtgtttgagcaagagcgcccgccctg

SEQ ID NO: 5236 - DNA, 2300 bp, Homo sapien
tgaattccttcccaaagatagctcggcctacacccaggcatgaacaaggacagcttaaggattagaagcaagatagagttggttaggtctgatttctttcactgtcgtaatttcctcgttatttttgcaaaggtggtttcaccatgggtccccttcccttggggtagcagcacctctagaaaggggcgcagcaagcctagcatgtggcaggtagaagcaggaggtttgggaacacctcagtcctcccagtaagaaagaaaaagtcaaatgacgggaccaggggtctcaggcccattggtggaatgctctaaggactctgttccatgaaagggacccccaaatgccaaaggagcccagacccaaagaaggaggcagaacaaatccagtttgtcaatattgggtgatttattgagggaatttacagaccgaagtgggatcttgggtggccacaagacaggtggagctctgcattctcacaccccagatgcaaggcttagataccatagggaaagggtattcgtgctccagcaagacaaccaaaggcagccctccagaacaggcaagaacgctacgtgagtcacagcctacgatttgtggagtaacatcaaggttgacatgttcttacactaggggcagtaaataaagtagaaatcagaaggcattcacaagactggggcgaatcggaagtcaacacaggggagtggcatccaagatggagtcacttttgtctccacaggttcccactgcagacctgccgaggagtcagtccccagcctgcagctcatcagagagaggctgcagcgtcactcataaaccagagatctgagaactggggacactgtcgtttttttgttttttttttttgacagggtctcactctatcgcccaggctagggtgcagtggcccaatcatagctcattacagcctcgatctcctgggctcaagtgaacctcttgcctcagcctcctgagtagctggaattacaggtgtgccccattacgcctggctaatttttttaattttttttaatagagatagggtctcactatcttgcccaggttggtctcaaattcctgggctcaagcagtcctcccatcctggtctcccaaagtttagggattacaggcatgagccaccacgcctggcctacactgtttccaaaaggaaatgaaaagcctcaacacaacccagtgtcctccctggggacggggtaggaagccacgcaatggtactctgcatcacttcctcaaaggtggtatgaaagagcatttgctgacacaaacgaggttcccagccaaatgctgataaaccataagcagatgacacagcagcatgtgatatatggcgcttttccactgtcccatgcctccatagcgatgttggtgcagatggagccttattaacaccagtcattctatccatccagacagatacagattatatatatatatatatatatatatatatatatatatatgtatatatatatatgtatatatgtatatatatatatatacatatacatatacatatacgtatacgtatacatatatggctatactgtaggatacactccaagacacccggtggatgcttgaaacttcagatagcactgaattctctctatatagatatatactgtttttttcctcaacatacctatgataaagtttaatttataaattaggcacagtaagagattaacagtaactagtaataaaacagaacaagtataacaatatactgtaattaaacttctgtgaatgaggtctctccctctcaaaatatcttgttgtactctcctcccctattttggatccgcagttgggaggggttactgaaacccgggaaagtgaaactcccatcaggggtgactactattcatacatatgattctggaaaaaatatgccagatattaatagttaatgttaatagtggtgggagtgggataattttactgcctcctttgtgcttaatggcattttaaattgcaaacaaattatttcttaatttgtttcattcacttttcctttttttgacacgtgtctatcacgtggaaggatgtgatatggaaggacgcagggctactgctggcgtcccttttgcagggaagccgtctcctggcacacaggctacccaatgccacctttatttttgtttaaatcaaaccaagtccctgggaggcgcccagggtgggcccgcaggggcggctccacagtgcccgcggggtcccaggaccaggcgctggcagacttcggagtcgcccccgggccctccgctgcccaggcctcggctctc

SEQ ID NO: 5237 - DNA, 2300 bp, Homo sapien
ctgtcttgggcttccattcttatttctacacattctgctctttaggaccctggccagatgggcatgagacagaagcaaaccctaaagtactgctactgttgccgccaccaacagagatcaaaggcagagacccttctgctagggtccaaagtccaaacaggccactccagagaggaaacaggcacacaggcacacacccacgggaggagtaggggcccaggaagcactccctccccaagggcaaggatggggttcccattcgacccagcacatgctcctcacatctgcacagcagggagaccaaacaatagatacaatttcagtgttgattgtcgatgaacttacccagaagttcataatcagaaaaatccataaagaagctctttcaatttcagcatgtttaagtttcatgacttatggtttagtgttgtttttatattggattccatgggtggcataatcttttcagcactagagacctttaaaggtctttctcagctcaccccgggagacaagggctgggtgtcaggaaagtgacacacagggagaagcagaaaatggactgggagtgtgggggccgaggcccagccacgagaaacccaggcggtgcaaggcagagccctgggagcacagaggctgctgtgccgtgggttgctggtgaatgagaagcctcctctgctttaatgaagaacatgcccccccgactcccgctaatcctgccctgccttcatggtccacacaccacaggtgtgcacaggttcatgcgtgtgtgtgagcttaacacgtcagccgcacatacagttgctcagaaacatcttcactgcttcacacacgtgcacacagtcaatgaccaggagcagggatcttggggcaaacctagagcagcttctcaggagttaaaactccagctttgctgtggttcccggaagagccctgactttgtcctaagacagtggttctcaaagtgaagtgctggctccagcagcatcagtatcacctgggaactcgctggaaacgctccgggttctggcttctcctcctagagcgcccagagctgtggggtcctcccttcgggccagaaactccaatcatagtttttatgtaccaacccctgtgctaagtagactttgtgcacattatctccatttaaaattcacaaatgtactgtaagatgcacaccatttttctatatttttcagatggggtagacagagctcagaaaggttaagagacttgcctggagtcaccaaaccaggctcgaactccttctgtattcagaatcactcttcagacgtagctcctgtcctgggctgaaagtcaacatccgccgagagctgggccctctgtaccagccccatctcccccaagtctctccctgcctctgcagccagtcctaaatctttcaagagacaaggccaagcagggggtgggaccaggggcgggagccaaagccccccctcgtgagcaggcagcacctctgccaaggcccccactggccctgccccagagaacggcagggaagctgcagcgagggctggcagctggcagagccctgagcacccagcacccagcccggcttgcagcccaaagcctggagagaggctgctgcgccattgacctgtggactccagagactcccgctgtgcattcctctgatctggaaggtttcctgaattacgtgacgagaaacctgggttcgagtcctaacttgtcaccaacttcctgagtgacctgggctggtcccgtcccctcttggaatctctgtcttccatctcttcagcgaaggggttgatttataagggtgttttctgctctgacactgtgatttgaattctgtgtttccacatgatattcgagaagtctggccggaaggatggaatctgaaatgacaatggttctggactgggctttgtgctcagcccagctcatctttgcctgagacctaggagtggccccaggctctcctgatgtgccaccacgcttggcatctgctcctctccctgcccccatattcccatgctctgaaggggagttctctttcatagcaaatccgagaggagccgaggagccaggtcctttgttccagacccagaagcagccatggggacctgtgacattgtgactgaagccaatatctcatctggccctgagagcaacaccacgggcatcacagccttctccatgcccagctggcaactggcactgtgggccacagcctacctggccctggtgctggtggccgtgacgggtaatgccatcgtcatctggatcatcctggcccatcggaggatgcgcacagt

SEQ ID NO: 5238 - DNA, 2300 bp, Homo sapien
atcccagctacttaggaggctgaggcaggagaatcgcttgaacccaggaggcggaggttgcagtgagccaagatcgtgccattgcactccagcctgggcgacactgtgagactccatctaaaataataaaataaaataaggactggccttcgggatcgctgtctagctatggactcagaaggccagtgccaagcagcaaagctgatcaggaaccccttcatcctgggtggcccgcatcttcccctttcacgaggcttcaaaccatagcacatagttggaaggctgcaagagcagataatttaaggggaaaataaaaactcagatgtacaagctccaaaacataatcccctttacataaacagtggaggtggcgggatgttgtggggaggaaggaacttgaactctgctgggcttctgtgactggtgacaggcgctcaggcatcccagccctgcactgggtttgcacctgaagctcaacaaattcccactgcctgggagcaggaggacagcaaaaagagcaggctgtcttgggcttccattcttatttctacacattctgctctttaggaccctggccagatgggcatgagacagaagcaaaccctaaagtactgctactgttgccgccaccaacagagatcaaaggcagagacccttctgctagggtccaaagtccaaacaggccactccagagaggaaacaggcacacaggcacacacccacgggaggagtaggggcccaggaagcactccctccccaagggcaaggatggggttcccattcgacccagcacatgctcctcacatctgcacagcagggagaccaaacaatagatacaatttcagtgttgattgtcgatgaacttacccagaagttcataatcagaaaaatccataaagaagctctttcaatttcagcatgtttaagtttcatgacttatggtttagtgttgtttttatattggattccatgggtggcataatcttttcagcactagagacctttaaaggtctttctcagctcaccccgggagacaagggctgggtgtcaggaaagtgacacacagggagaagcagaaaatggactgggagtgtgggggccgaggcccagccacgagaaacccaggcggtgcaaggcagagccctgggagcacagaggctgctgtgccgtgggttgctggtgaatgagaagcctcctctgctttaatgaagaacatgcccccccgactcccgctaatcctgccctgccttcatggtccacacaccacaggtgtgcacaggttcatgcgtgtgtgtgagcttaacacgtcagccgcacatacagttgctcagaaacatcttcactgcttcacacacgtgcacacagtcaatgaccaggagcagggatcttggggcaaacctagagcagcttctcaggagttaaaactccagctttgctgtggttcccggaagagccctgactttgtcctaagacagtggttctcaaagtgaagtgctggctccagcagcatcagtatcacctgggaactcgctggaaacgctccgggttctggcttctcctcctagagcgcccagagctgtggggtcctcccttcgggccagaaactccaatcatagtttttatgtaccaacccctgtgctaagtagactttgtgcacattatctccatttaaaattcacaaatgtactgtaagatgcacaccatttttctatatttttcagatggggtagacagagctcagaaaggttaagagacttgcctggagtcaccaaaccaggctcgaactccttctgtattcagaatcactcttcagacgtagctcctgtcctgggctgaaagtcaacatccgccgagagctgggccctctgtaccagccccatctcccccaagtctctccctgcctctgcagccagtcctaaatctttcaagagacaaggccaagcagggggtgggaccaggggcgggagccaaagccccccctcgtgagcaggcagcacctctgccaaggcccccactggccctgccccagagaacggcagggaagctgcagcgagggctggcagctggcagagccctgagcacccagcacccagcccggcttgcagcccaaagcctggagagaggctgctgcgccattgacctgtggactccagagactcccgctgtgcattcctctgatctggaaggtttcctgaattacgtgacgagaaacctgggttcgagtcctaacttgtcaccaacttcctgagtgacctgggctggtcccgtcccctcttggaatctctgtcttccatctcttc

SEQ ID NO: 5239 - DNA, 2300 bp, Homo sapien
cattactctctggttctctttccaccttttcttttccctgttgttttttttttgagacagggtcttgctttgttgtccaggctggagtgccgtagcacaatcatagctcactgcagccttgatcttttgggctcgagaagtgatacccccacctcaccctcccaagtagctgggactacaggcacgagacaccatgcttggctaatttttttgattttcagtggagatgaggtcttgctacgttgcccagactggtctgaaactcctggactcaagcaaacctctcaccttggcctcccaaagtgcagggattacaggcatgagccactgtgcctggctctggttctatttctctaccccacacaaacatcctcccaaggtttgtttgttttgtaccaggaaattggtttccttttacccttccaggcatggcactgcctccctccccaccccccaatcttgctttcttcctcctagggcagagctctgggggctaaagccagcctggactaagtctctgagtctgtccttctctgttgagtttgtgtatgcaggagccctgggaacccaggactggggacttgtataagagtgtcgttcctgaaatcaccaccagggaccccacccagcactgctagagcttatgacctctgccatggatttaattactgaaggccacagcagggattgtctggctcccaagtcccaggctgagctaggcttgggagacaggaaacaacagtgagtaaagctgggaccatctagcatgagagacaggctcacagccacctctggtcccaggctgagaaaaggccaggtgggaggaggctgggttagtggctggctatgtgcaagagagggagctgcctccctcacctatagtttctgtttgtttgttttttgtttttttgagatggagtctccctttgtcacccaggctggagtgcagtggcgggatctcggttcactgtaacttccgcctcccgggttcaagcgattctcctgcttcagcctccccagtagctgggactacaggcatgcaccaccctgcccggctaattttttttgtatttcttagtagagacagggtttcaccacgttgtccaggctagtctcgaactcctgacctcaagtgatccgcacgccttggcctcccaaagtgttggtattacaggcgtgagccaccgtgcccggccttgtttttgtttttgttttggagagagggtctcactctgtctcccaggctggagtgcactggcacaatcacggctcactgcagccttgacttccctgactcaagcgattctcccgcctgtctcccaagtagctgggacaacaggcgcgccaccgtgcctggctttttattttttttaattatagagtcggcgttttgccatgttgcccaggctggtcttgaactcctggggctcaagccattcgccctcctcagcctcccaaagtgctgggattacaggcgtgagtcaccgcgccaggccttcaacctagtttgaagatggggtttcccgggaggaacccttcccaaggctgggttatcacctggcaaaagaaggggacttccgaggtcgtttggtgaaggccttcagcagatctgtttcacgagcaaacttcagactccagctccatgggggcctattagccccaccctggtctgcctccctgagccttcctgagccgagcaactccacttccttattccattcacgtttagcacactcatttgcactttcaacacctgggcgattaattcttgcccttttcccaaagttttccctcttgacaagaggaaagcttgcatttctatgtaccccgattaggcacgctcgctctctccttagagcacctctggttcacctctcccacgccccctgcattagcacaggcgtttccagagttgcacgcgagctcatttgcaagaccgtctccccctcccatcccttcttggtcccctctagggcccagggcagcagccccgcccctggcccgccccctcccagacgctaggcagccgcggcctcccattggccgccagggctggcaggcttcccggctggggctgtgattgccgcgctccagtgtcagtcccggagagaacgccggtggcggggctggtagcccggcagccgcaggtggggccacgagcgctggctgagggaccgagccggagagccccggagcccccgtaacccgcgcggggagcgcccaggatgccgcgcggggactcggagcaggtgcgctactgcgcgcgcttctcctacctctggctcaagttttcacttatc

SEQ ID NO: 5240 - DNA, 2300 bp, Homo sapien
ttcttatgagaagaagacaagctcctagtgagtggtgacctaagggagcagctgcagcaaaatgctaacctgacagtcccagatggtccctttattggttctgaccctggtctcaggcttcatttccccacagcaagggaaggagcctgctcacagagcaccagctaagatcagcaggaccgcgccacacccccgcccagtcctagagcccccctctcgctggttcctgagcataccaccctcttccttggaggaaaatttgcccccaagcagcctaggcggtaagaggctatcactagggcagactcacagacctacctcatcccctcaccccaccctacagtctcgaagtcgggtcctgtcccctcctgcagtttccgggagactcaggatatctggacctgctagaaagagaagccttcctcgcctaaggagacttaaaccgggatacttaaacctcccgcctcggcgtcttcctccaggcacgaccgggtcaagagagagaagcggaagctgcaacccctcactctgagtgaccggaagcagaagaccacgggatgtcccaggcggggacaagaggaggggctggggaagaaaggagggatgatgagttcagagtccctttggaaaggtttccagagagcgctaccagggacaacccaaggggctggggaagtccctgccttgtgctctctgtgcgatgcccgagtgatgcagaggcagggggctggagcaggtgactgctggcagctgctgtctgtctgtgattggaccggaggactaaggggagaaaaagtttatcagcttctcccagtgcctgcacgctgtggtagttcaaaagacacgagggggaggggcacagcagctctgcttcccagcgccttgggagactgaagtgaaaggaacgcttgagcccaggagttcgagaccatcctgggcaacaaagcaagaccgcccctcaccccatacaaaataaaaatacaaataaattagccgggcacagtggcgcatgcctgtagtctcagctactgggaaggctgaagtgggaggatagcttgagcccaggagatcaaggctgcagtgagctgtgattgcaccactgcagtccagcctgggcgacagaaggagaccgttttttggttttgtttgttcgtttaaaaaaaaaaagaagcaagagctcactgtgaactcctggttccttcctcccctcctcacacttcccagaactcttcctgtcacggttcctggccagaacgctgggatactatctacaagctgtagtaggcttgtagtaatggaatgtccgcttgaggggtccccgcacagccaacccctgcctctggagtgggatctatgggggtggggttctaagcgcctctggggagtgtgaggtagcatctcagggtgtggcagaggctcggacacccccaaaaggtctgcgaatggaagggacataggcaggatctctctcagtgatgtcccctgtcttccaggatgaagagaggcagtgaaacaccaggagagcagggcgtcctttagaattcctggacccttctccaggctgctagtcaggacaatgagctcgtggttgtctttgccactatcttcctgtgcgatttcagacaagccacctccctcactaagcctaaatttccccatgtgtaacgtgcaggcattgtaccctagaggcatcaaagtcccctccaggacagatgctaaggaaagataggctaggagcaaagccgtctgaggtggcctgaccagagccacacgaggctcttctcactgggcgaggctctttgaggaaccgagagttgctgggacccagcccgccctcgagagagcaaacagagcggcgctcccctcccccgaccccggccctttgtccggaatccagctgtgccctgcgggggaggagcgggctcgcgtggcgcggccccagggccccggcgctgattggccggtggcgcgggcagcagccgggcaggcacgctcctggcccgggcgaagcagataaagcgtgccaaggggcacacgacttgctgctcaggaaatccctgcggtctcaccgccgcgcctcgagagagagcgtgacagaggcctcggaccccattctctcttcttttctcctttggggctggggcaactcccaggcgggggcgcctgcagctcagctgaacttggcgaccagaagcccgctgagctccccacggccctcgctgctcatcgctctctattcttttgcgccggtagaaaggtaatatttggaggcctccgagggacgggcaggggaaagaggg

SEQ ID NO: 5241 - DNA, 2300 bp, Homo sapien
caggcctttgggtgatctacttcagggaaagcaaagaggccaggtgggcagagctgagggaaggagttgctgacagtgtgctggggctagagttggagggttgtcaaagccttgccaatgagttggggcttgttggagcagacagtagggaccattgcaggttcttgagcaggagagacacctgaagaaggtggagagatagcaaaagtggtatgttgcctccttaggctattttagttggtaataataggctatttctaagtccagtcaagcactatcacttcccaccccaaagctgttcttgacttttctgtagggacttgcttcttcctctcgactcttacggttctctccagctggagtgtatctctctggcagcagttataccagctcaaatcttcctgaaaacatccatgattttctgcctgtatcccctggtttcccagcccacagaggttacctccctcttggggctcctgagttccgtgacctacttatggggttctgttcatggaaggcagtgtttctcggccctagctgctcattagaagactggtttttaaaatgtctccatgcacagattgtaacccagatcaacgacattgtgatctctggggtggaacctaggtattgggatggtttctaaacattccaggtaattccaatgtgcacattgcgatttgggatcacaggccacctctgacaatcgggcatcctgccttgtgattactgctttcatgcgtgcacttggcatacctggaacacactggggtgtggggagaaagcactaggattttggtttatatttactttacatcctatgcttttaaaatgtgcatgctttacaatcgacttgatagtagaagaggtaatgatcataacagtcagcagccgttgagcatgtactgcagccaggctctcatccaagcacttgacacgaaagtgccagaaagcagtcacaccaacattcaaacacaggatggctccagcagccaccttttatccatcatgccaatctgttctcacagtacacatgtgtaatttagaaacaaacaaaaatagtaacatataaataagatacagataccagagcgacccgtgaaacattttttgctgataaggtttcatgatcaaataatcagactatggtggccgactatgagtcctccaggccaggtctaaatctctctcttagttttgttccttctgcccagcagctagcagaatctgggttctaataaatgctcaacaaatatctgccactcccacaaacatttattaaatgataatcatagctaacgtttatcaacattgccaatgtgccagagacatcatacttaatcttcacagaagtcctgtaaggctatgattacacctgctttgtgacactgagcagctaagtaacttgctagagtccagaacctgaacccagactgtgggactgcacagctcattctcccccactggtgagcaggtccacagggagcagcttatgaaggtggtgggggagaagtggattttaaaacatcaggaaggaggcagaggtggatcattcactccctgcaggtggttccttctgccaagagtgaccttctctatccttacctaccctcctgccccagctcaaacgcatcttctcctggaagcctacagagggttctgccccgttcctgcctcatcttccccactgaacttggaactcctagagggcagggttgggtcctactcaaggggcatccacggagctgggtcagcaaacataacactggtcatctgagcctgcgcccgcccttcctcccaggccagggcgcccccaccccctgggtttttcctccgtggacgccgcttccttttccttcttttctccctcctccttcttctccttcttttccacgtgtcttctcctcccatcctcttttctctccatccccacctcccactccttcccacgccccatctccccgacccccagcaccccgcgccgcccccaaccctgggccgggcaggtgcaattcctcaggcggcctacagagggcgatgtgcgccgccactgggccgcgcccctccggcgcgcgcttcctgtgaggtcaggtgggaggaaaccgcctggagccgccgggagtggacgccgccgaggcccggagtcgcgcctgcaggtgagtcgccgcgccggggagggagcgcatccctcgctgcagcccgggccgggacttggagccggtgtcgggctccagaggctggggctggcggccggggcagcgtccctcccgcccccggcccggaatgtcaggtgcgccgcg

SEQ ID NO: 5242 - DNA, 2300 bp, Homo sapien
cgatgccctttattgagtgcctgccctgtgccagcactgtgttcactgctttacatacattacctcattcagtccttccagacgggtagatacttttattatcagcccatcttacaaatgagaaaactgagcctccgagatgttcagcagcttccacattgacaaaagggagatttacacccaggtttctctgactccagagtccccctggaagctccagggtttgcaatgctggggccaggtcaggctagcgcaacaccctcctctttcagttcccaatcacaaggatgctccagctccaaactgtttagatttcactgcctgagcattcctgagggcctccaaagtcctgaaagggaaaagatcagtttgcagaataaggagggaatgaaactaactccccacctcagttcctccattcagactagcctgggaggggagtgggggaagtccaaagtccctgaatttcctggcctgtacctcccagtgcagaaactctccaacgccccctggtgttcttcaataccatccaagtctcccaaggattcattcctctgtagagtggactgggacatcccatcacagggatggagaaaacagagtgcccttgccactgaagccatcaggagaatcctagaactggaactggaacccagagctcctggccacgggctctttcagcagcatcgccttctattcctgttgtcctccatagtggctgactggcccagcagtcaatgttacctttattacatatgatctcagtacttactatgttacaagtccaatatgcactattaagtgtgccacactttattagaagtgcagtgacactgtattatatatcaagttccatcaggtcaatatagaaaatgggaagtttgtactggcatgccttgttattttgaaatggaatcccagcaccactgctgcccccacctccactgcatatttgaaaacccagtctactctcctctgcccgctgttccaggaagacaggctttctcccaaaaactcagtcccaccacctcattcacaggaatgtcaacaggcacaaggagataaagtctcttgggatacaaatgctacttaatgtggggggtggaggaggtgacaagagaagagagaaaactaccaaatgcccttcaggccaccagtttttctctagtggaatataggaaatgacaacaggagagagcctggttagccctaagcctcccgcagggatggaacctgagtttgtgtaggaattgctcacctttgatgactgggatgattgaggcaggctggtctcaccacacagggatagatggcatgggtctcagattaatggcaggcaagaaggggagatgtcaggactggcaggcggccccaatgagccacctctcagatacctggaataagatctcctccgttttcagtgtctcatactacctcaggtcttggtcctgagaggaagggctgccagctctgctgccccctggagggctgacttttcaccccagagtaaagatgtggttggccgcccggcactggaggagctgcagatctcaggaggtacagagcccccggggagtcggttgtcgggggagaaggaaggggaaagaggttgggggcttgggagtagaggagcggtggctgaagggatcaggtagtcctgatcaggacgtggagatccacccacaagccctgacaataactcagtcgagttcctggagggtctcaagggctgggaaaggtggagtggtgcctgccccaacgcgtccatggaaggtggtgcccgcctcaccgcctccgtggaaggccaaacgagccctcggtgtgaatccggagaaagagagggaagtgcagcgccagctccactccacacccccttcctgcctataaataaccccaagtgtcacttcaaagaggacggggagcgcggcagaggggctcccgggccggcgggctggggccgccggacctgctcaccacgccccccaccctgggcgagtttgcataaataaacaaatccaagccgtcggccccgcgggaggtggaggaggagtgacgaggaggaggaggaggagggaggggggagggagagattagtttgggaagtagcacggattgctcatccgatccgtgccgccgcagggagtgtgtcaagttacagaggcgccggaatcggcccctgcgctcctcgccagccgccacgacccacctctgcccatggggccctccgtgtgcgccccttcgcccggggactgaaactgactggcccgggagacacgaggcgcccagaaggactgacagcg

SEQ ID NO: 5243 - DNA, 2300 bp, Homo sapien
tctttttctgtcttcaaccttaacacatgaatgatcttaaagttttgatgtttttttctcggactaaaccattatttacagggggagagggggaagaaaggctctagagggcctaaaggggataagggagaccaaggagcgcctggattagatgccccctgcccattggtatgtttttgtttatcacttgcattgttctggtttttgttcttgaggtttgtaagttggaaacaaagaaggcaaataaactaagatgagaaccaaatgtctacacggatgctaccaaaatctctctgttcatttgactggtgaaattctgcccgctgttggatttgctttgtaaccacagctgcaagtaattctggctaaatcccttgcctttgaatccttttcctttgaagatacagagcaatcgatgtgtggaagtgaggaaaccactaggaaagggattttcagggaaggcctcagctcttagctccaggatggctttggaagccagtgtagcatttgtgagccacggatttgccttcttcgtttcatggccacctctgtgggccagtagttcaagctgtctgaatcctcacttgatcaggatgcaggacaccagagttagcgtctcctcagggccactgatgctcaaaactgggcagaacaaggccagatgaggggcttctaatgcacagcctcccaacactcaccagccatccagctgaaacctttaaagctgcagaccagaactggtagtcagacagacaccccatgggaagccttctcaaaagagccagcaattaatgatgaggcacttctgctgggtttctcaagtgcctttgaatccatttgaaggttctaaaaattatgatgcactaaagttgaagtttgtctgtgtttacactaagtgagtctgtagagagaggaggatcaacggagagggggcaggttgtatgtgtgcaaagctgaactctccagagcacaaagagagcacaaaagctggatttgggagatgggggatcacctgggatttagcccctgtttgtagatgcctcaagggtcctgcatcctggccagggtaggactgggcctctctattccatggttggagctggccagccttgacctgaataatcatcgtggttggttttgtgaacagggacaccgaggttttaaaggagagaaaggggagccggggttaccagggctggacggactggatgccccatgcccattggtatggcattgcccttgcttgcctgcatggccgatttgggcttccccatgtgtgtgattcatactgggtttctccccagccaccctccacactcctcctccatcccccccaggctccacttcccacttcttcattctgtaaatgccaagggtcaccccgcctaggctagtactctgggggctcccagtcatgccaccctcttgcatgcaaagtttactgggatgtttcctggcttcctgctgcagctacctctaaagcacagccacttgatgccagccagctctcccaccctgaagttggttttggctgcctctgatactcatctccaagctgattctagacaaagctgccaccagataccagctaggaaagtggattctctggactggttttcagaaccatgactcacttcttttccttcaggcagtgaagttagttcagaatcactggctgagcacctagcgaaacatgtgaatgagatgcctgatcagccctgtatcccctgctcctccatcacatgatttgggggacagaagggcatgattacagagtagactgagaagctctagaagtgagctggaggaggggccacctgcctattcttccaggttggatcgtgggtcgctgcccaggtgacaccatcagaactaggggatggtccaggattaggttttcggatcctaaagggtttgtccttcttgcttaaatctccaaagacattaccagacccttcctcgtccctttctttcatgatcagatggcttcttactgaagagtctgggagagacggaaaggtcaagaatgtagttaaggaggaggcagggagacagctaaggacctctcttccaagcacgtcccaggcgaagtggtagcagtttattcccgcctgcccagtccctctctaggcatggacagtctaggcctccacgctgatcctcttactgcaaaagaagctgaagggaacacttcactccaaggctcaaggggttacagctctccccaaatttccccaataggtttggagttcaagagctattttatcataccagtaataagagaatttggggtctcacat

SEQ ID NO: 5244 - DNA, 2300 bp, Homo sapien
aagtaatataaagaggaatagctagaaagttaatagataaattaaaatagaagtccaaacagttttaatacaatccaaaagaaagcaagagaaatggaagaacacagaggaggcaaacagaagtaaatgtaacctgcctatgaaaaagaactctaactccttactgaagccatgaaagaagacttaaataaatagagagacattacatttctgaatgaattgaatcaatactgtaaagctgtcaatactgtaaagctcccacaaattaagttataaattaaatgtaattcaaagcaaaatttctacagaacttgttatgaaatttgacagagtgattggaaataattttctggcacagaaaataatatgtgagaagagcaatgaaatgtttttaaaagaataatgcaagggagacttgccctgcaaggtataaaagcatcatatgttgatacagagatatttaaaatagtgtgttataccagagaaaactgaacgtaggtaggaacttcaataacattaaggagttgctcttaatttttcagaggtgataatggtattacagttatataggaaaatgccgtaattttttatttcagagctgtatatggaagtattcaggggtcaaatggtatgatgtctgagatgtgctttaaaacagtgcagcaactagagagagagaaaagggatagagtaagcatttgtaaggaaatattgataattgctgaaactgcgatagtgatatgttgtatttatgatactattttctctattttatgtatgcttgaaatttttcataagtaacaatatctaagtaacagactattgatggctcaacctaagataaataagtaatggactagaagagatatccagaaacagatccatgtgtaaatgtgagtgcttactatacaaaatgttggcatttcgaatcagtgaaggatgaactattcagtatctagtgctacactaaatatccatttgtaaaagtaaaataaaattagcccttatttcatcttttccaaaatgaactccaaagggattaagacaattttttgaaaaaaaaatctactaggggaaagaaaaagattataattctagagtagaatagttttttctaagaacatataaaatgtagatgtcataagatttagagagttggcttcattaaaatttaaaatttcactttccacagacctccaagggcatttttaaactatgaatgcatagtaaaaaatgcatagtaaaacatacattcatgttgttggaacatgtcatgaaaatcaaacagtcattgtggttgaccaataacttgcaggttcggtaagttaattacactaagtattatagttaagaagcaccagtttttcttctaatactatatttggaaaaatggggaggcaaaaatagtacaagatagagatgctcaatctgtagctcatgaggaaaagattcacgaatatacagtaactaatcagagatggaggtaacctatcaaccagaatgtgacaatgtaaggaactttggaataggcagaaaagaggacttgttgtctctaataaaaagctatgcatttttagtgcacactcttacaggtaatctaaatctaactctatcattgcctttgagctactttacaactctgtaagttgtagataactgatattaatgcaaaataattcttgtataaacatgaaaattaattatattcagtgaaagttccattgattttcctcttccattgtgcaggaagccagttatttttccatttgcactttcatttcaatatttctgatatataaatatgtctgttggattatcctttcaactgcttataatatcttaccatttccttcatttaaaaaattaatcaactataagatttaacacatgcttatttttaaaaaaaaattttaactgttctctctggaaagacaccataaagttgaagacaaacagaaaaaaaaaagtataactttttttgtttgtttgtttgttttttttaatttatttatttttttttattgatcattcttgggtgtttctcgcagagggggatttggcagggtcataggacaatagtggagggaaggtcagcagataaacaagtgaacaaaggtctctggttttcctaggcagaggaccctgcggccttggccttccgcagtgtttgtgtccctgggtacttaagattagggagtggtgatgactcttaacgagcatgctgccttcaagcatctgtttaacaaagcacatcttgcaccgcccttaatccatttaaacctgagtggacacagcacatg

SEQ ID NO: 5245 - DNA, 2300 bp, Homo sapien
aaaaaaaaaaaaaaattaaacttctttgcaggagtagtttttgaggccaatctctgaggtttgctttgatctcaggaggactcttagcggtctccattcatgacactttctggtaaattagctggactgtagtttagtttgctgctctcatggagctgccaacctttccttaattgcttgccaccaaaacttccactgtttttgagagagcccttaggttgaacttccctatattcttttccaaaaagtcagtacctttggaaggtgctttggagctctctattcttgtaatctgccttgtctgctgggcagaatctctgagccactattctggagctggaagcagtgatagtagcccaattctcttgcagtgacagtttggttgaagagtagggcactgaaccgggcagtggtagcctctggtcttcttggcttccctttcctggcatggaccctctgaatgatgcctttcctggcatggaccctttgaatgatctggagcctggtgttctcagcctgctgtttctgatgtcgaacctctgctttacatttagggtctggatgaaggaagggagcctccagcttgtcggctgtacttgcccagaatttagcctttgcaacatggagctgcggggatgggaaatgttgtccactagccttccgtaggtatatactgtggcccttgagtgggagctgagggaagggggagcctgtcttctaggccacacccactcatagtggagcttccattaccctgacctgtgggggaagggtggatagagggtgggtcatggctgaagtgccacagacttgctatttctgctatgatttagtagaatttcttgaataaagatctctacttgatatatttccattaagaacatttccagataatttaaatgattggtttttttcttataattttcaccattttataaaaaattctgtggtggtttcactgtggggcaggtctgtgaagctcctcacaataccattttcatttagaagtggaatcactagtttgagttaaagtttgtgtctaataactaaaatatttgaatttcctgtttgtttctgttgtttttgcttttgtcttgatttttagtcagtatttatacttttatctgcttggttatctttggtgaaatgccaaagatcacacacaaaaattttagagataaattgtgtctctagatgattaaatttccttccaaagagaatttacttttgcttctggcaagcagatcagtggcagataaccttagttcaattagaaattgaaggccaggcatggtggctcacacctgtaatcctagcattttgggaggctgaggtgggcggatcatttgaggtcaggtgttcaagaccatcttggccaacatggtgaaactctgtctctacttaaaatacgaaaactagccaggtgtggtggtaggtacctgtaatcccacctactggggaggctgaggcaggagaatcacttgaacctgggagacagaagttgtagtgagtggagatcgtaccacagcactccagcctgggcaacagagtaagactctgcctcaaaataaataaataaataaataaataaataaataaataaataaatttttaaaaaattaaaaaaaattagagattgatatgatataaaggtagttgtgatgattaatggcatgtgttaacttgactgggctacgtgatgaccacgtagctggcaaaacattatttctaggtatgtttgtgagggtgtttccagactcaaattgcaacttgcaccattgacctgcccgtttctcaggcctttggacttgtcctgaattacaccattagatctcctagttctttgtcttgcggatgacagattatgggaattttcagcctctataattgtgtgagtcaattcctataataaatctccatctatctgtctgtctgtctatctatctcctattagttctgtggttattttattttattttgtttttttgagacagggtcttgatcttatactcaggctggagtatagtggtgtaaacacagctcactgcagccttgacttcttgggctcaagtgatctgcctgcctcagcctccctagtagctgggaccacagatacacatcctcaagcctcgctaatttaaaaagtttttttttgtagagacagggtctcatcatgttgcccaggctcgtcttaaactcctggcctcaagtaaccctcccaccttggcctcgcaaagtgctaagattatagctgtaagccaccatgcccagccttagttatgcttctctggagaacacta

SEQ ID NO: 5246 - DNA, 2300 bp, Homo sapien
tcctgaaaagtttggaattggcggaaactgcattgactgggtatctggacatgcattggaggatctcccactaatgtcctgcgaggccatggctgagtcatttcacccttccaaataccagatttcttcctatagcaaaggtttccactaggtgaactctaagaacccttttatcctaagaatcagagtattttgaagctgacctcttccttgattttctgagttgtgacagcatcatctgtctgaagaaaccaaccagtatgaaatgggagaatcctaaccagtaaatttactagatccagcctctctcaggatagcacataacaaaatgctagaatgaactgttatataaaattcacataaaaatgaccacatatgccacttttattgggaaattacaaggagaatgtgaatctaatatctactgatgaattattcaactatatttcagtcagcctggctgactggatgacagagtatgagtatttttcaagcactcatagaaaactcctgaactctcttgaatgttggcttgatggttatttctggtgaagaatggacacctgaaggtataagaagagagaccctttctttaggaatgggaaaggacatcattatgggatgccccaggggatcatttgaaaccctttaaatatacatcttggggaaagaagactttatcctgactggatatctgacctggaaaataccttccaagacaaagaacagtgaggtcatacacagagggcgtgaaaggcttaggaaaagagtaaaggaagccccaagaaacagagactgttgagtccaggggagtttgagaagccataggagactgaaatagaggcttatgcatatgttgatgatatatgcgtgatttggaggaagtcagagagaaacatggctgatttctcagcaaatacactttaaaatgcacatgttctaaacctaacccgctatctataaacgccagcaatagccatgattaactaactagtagagacgcagagggtggtaggcatgagttcttcccactcaggcactgggaggctttcagtcactccaaagtccccactgcctaaatagttacaagtttgtagtagcaaatatacacaatattaccaaatgtaacagctttaaaaatcagccatttggccaaggctggagaattctgtttgcaccggtttctctttttggaagggatcaaaatgttgcctctcacagtcctttgactgtaggagaaatcagaggaaacctggatggtccacagcaagttagtatttcccactgaaataaacacattcttttgactcccctccagccatggagccctggccaacaactcacaatacaaagccgagactggcttccactaggaacacagcaactgctaatccccattatcacacccgacagtgtccaccacacccccataaagatgcattttctagtaactaataaaaactggtcctgaagacaatagcctcgcgctcatctaaatacccgttgggatattgcaaattaacaccttgtaaagcaacccaattaaaaattatgcccatacacacagtctcacccaccaaaacatacatctgcctctccaaatattatgcaacgctggattctaaatcggtcttaatttctaaaaagcctacaggcacggatataaattctcagctctcgtggctgtggccgccctatgcactcttcccagtggtggacacaaacgttaatgtacttgttattatttaaggacacaaaaatatagaaggtggcatttttcgctttccccttcgaagactctccccagagctgccagatgaacgcccacgccaccttctcccaccaaaggtggatccagctaacaggagactggatcgcgaccatagcgcgtttgtgcccagttctggggaaagcctcatgttagcgagtggccctcggctcgtctcgcagatcggccaagtacgcggaggccgcgcggtttcaccattaatactcctgaaggacaatagctcatcaagccccaccgaaagccccggacccgtcgcggagcctgggctggcgggggatgaggctgagcaactcctcctagaggtggttatgtggagaaggagcaatcccttctccctcctcctcctccccccgctactatccgcggcccagagaactgccgcttgccgccattgacacgcacagatagaacccaaagaaaggcaaagagtcctgcccggcaccggcgccgcgtgggccaaacctgcgcccgtggaggggcgcgcagagggcaccgggcgccgggagcaggc

SEQ ID NO: 5247 - DNA, 2300 bp, Homo sapien
tcacctctcagggtctcagctgcagtcaagagtgcccctcaatgggctgtgcggctcctcccacaccagcagccctctgcctgcctgaggcccacactgcaagcatcctaatttggggttctgctgggctggaggcaaggcctctggtgcagccccaggccagcccctgggccctcctctgtctggggcagactctgggatgcacaggtaaccctgtttaccagccttccaggctggcttggggagcccaggcaactttgctgctgtagggcccaaggctgttgagttggataaaaggcaactttatacaaatataaaaatataaatttatttaatgtgtgtatacacaggagccttcagaaggaagacccgacccccaaaagaggtacagaagcttatataccatcttgaggtcatacaaagaaatggggactgggtgcagtggttcatgcctgtaatcccagcactttgggaggttgaggtgggaggatcacttgagcccaggagtttgagaccagcctgggcaacaaaaggagacccccatctctaccaatatttattatttttattgttttatttttttgagatggggtctcactctgtggcccaggctggtgtgcagtggcatagttacggctcactgcagccttgacctccctggctcaagtgatcctcccacctcggcctcccaattagcggggcctataggtgcccatcaccacgcctggcttttttttttttttttttttttttttttttttttgtagagacagagtctctctatgttacccaggctggtctggaactcctgggctcaaaagatcctccttcctcagcctcccaaagtgctgggattacaggcgtgagctgctacacccagccccatctctacaagtaattaaaaaattagccaggcattgtagcatatggttgtggcccctccttcctactccatgatcacagtcttagttcacaccacatttgtcttagtctgttttctgctgctacagcagaatactacagactaggtaattataatgaacagaaatgtattggctcatggttctggaggctgggaagtccaagatcaagggcccagtgtctggtgagggccttcatgctgagtcatcccatggtggaaggcaaaagagagagcgagagagaggaagagcttgaacttgcagcctcaaagcccttttataattggtattaatccattcatgagggtggagaccgtatgacccaaacacctccgattaggccccacctcttaacactgttcctttttgggagacatattcaaaccctagaagcagaattttgcaggattcttgtcgtaacctgctaattgacctccttagacctggaccttaagttggtgacctgtgagctgggctgaatctggttgcggtgtttgtttagtgcagtgcttaaagaatgttttttgttgttcctttagatgtggcctatgcttgctggttccccacaggtgtgcccactgtttcttgttattgcaccttttcccagcttctcacatcattgacattgcccacctggttctttgactttgtaaggtctgcccttataagggcagggaccatatctgcctgtctgaccacaggatacacaacacagagcatgtcaaaaagcaggagttcaattcatatatgttgttgagtgaacattattcccctcttcaaaagtcttttttttcctcctgccccactgcaatctctcccaaaagtctttgatggaatatatcaagtaaaaaacaaatgtgcagaacactttgtttaatgggtgcaaaaaataatcgtgattatagttgcataaactatctctggaaggagtcatccaaacttgttacgtaacagtggatgcctctggagaagggaacttggtgtttggggaatgggctggaagtgggatacccccttgttccttctgaatttaattcaaattttataaaattggagtttcattaatcaaagatttacctcatctaaaaaggtcaattcatgatcgaggcctctctcactgtgggtcctcccagccctcccagcctccctgactctgatatgctctcctctttcttcccagcagtgcctgatttgagatggggtcccaggtctcggtggaatcgggagctctgcacgtggtgattgtgggtgggggctttggcgggatcgcagcagccagccagctgcaggccctgaacgtccccttcatgctggtggacatgaaggactccttccaccacaatgtggctgctctccgagcctccgtggagacaggtaatg

SEQ ID NO: 5248 - DNA, 2300 bp, Homo sapien
aagaacattagtagctacccagggctagggtaggtggggtacaggatttattttgggggtgatggaagtgttctggaattagatagttgtgatggttgcacaacctggtgaatacactaaaacccactgaacttacatctttttttgaaatttaaattaaaaaaaatttttttttgagacagagtcttgctctggcgcccaggctagagtgcagtggcatgatcatgcctcactgcaacctcgacctcctaggctcaagcgatcctcccacctcagcctcctgatatcagggaccacaggcatgtgccaccatgcctggctaatttttgtattttttgtagagatggggtttcaccatattgcccaggctggtctggaactccggagctcaagcaatctgcctgcattggcctcccaaagtgttgggattagaggtgtgagtcagcctacatctcattttttttttttaaaagatggggtctcatctaggctggagtgcagtggtgcaatcatagctcactgtgaacttacatcttaagtggtaaattgtatatgtgaattctattttgattaaaaaattagatggtaagcggtctgtcctattattaaagacattatttctgcaaaaatgacatatgcttgtttgaaaaaaattcaaacaatacaaaagcttaaggaagaaaatgaaaacattatctatgaccactattagcactttggttcagacagcaggtttgatgtgttgagaattgaacttgggcaagttgttgaacttttttccaaaataaggagaaaaaactcataccttaaatcgaagatatgggcaaaagtgcaacagatgctaactgctgtaatcattacctgtatatgtgtatacataccgaggtggatgtgtcttattggccataaatgggattagatctttcatgtggttctgtggcctgactttttgggactgggcaaactaatctgcaacatatattttatatatatatatataaaacgtggctgctgtgtattcattgctactctgtgccaggcaccatgctaaaatgctttacgtaaatgatctcattgaatcttttctacagctcgaaatcacagtggcttacccctgtaattccagtgcttcgggaggctaaggcaggaggatcccttgaggggctaggagttcaagatcagcctaggcaacatagtgagaccctcatctctacaaaaaaaaaaaaaaaaattagccagctcaggagttcaaggttataatgagttatgatcatgccactgcattctggcctgggtgatagagcaagaccctgtccctaagaaaattaaaaataagtaaataaataaataaatattgcctgactttttcttttcttttttttacttttgagacagggtctcacattgttgcccaggccgaagtgcagtggtatgaagcactgatccatgctacaacttggatgaaccttgaaaacatgttttgtgtaaatcagattgtgtatgtgtgtctttgtgtgtgtgtgttgtgggagggagcaaaggtaaagttactcactgcagcctcaaactcctgggctcaagcagtcctcctgcctttgcctcctgaagtgctaggattataggcaggagccaccacacccagcccttgcctgactttttcatggacagactttttgtataaaaacgtcattcacaggctgggcacagtggctcgcacctataatcccagcactttgggaggtcgaggcaggccgatcacttgaggtcaggagttcgagaccagcctggccgacacggcgaaaccctgactctactaaaaatacaaaaaacaattagccgggcatgatggcacatgcctgtagttccagctacctgggaggctgaggcaggagaattgcttgaactcaggaggcagatgttgcagtcagtgagctgaaattgagccactgtactccagcctgtgcaatagagtgagactccatctcaaaaacaaaacaaaacatcactcaccctttaaaaacaactggctacacagtactgcattgtatgggtttataatattttatcctgtagcctctcattggtggcagtttccattgattgatggagtgtcacacaggtggaggtttgcacagcactactgctatgttagaacatacaactgggcatccactaattccatacgtgcattttcatctcctacagggtgtgtggctggaaatgcagctccatggcttaagcccttgctttaggtgtctggccaagtagatcatggccaagcagaggggagttcactgttt

SEQ ID NO: 5249 - DNA, 2300 bp, Homo sapien
gctcacacctgtaatcccagcactttgggaggccgaggtgggcagatcacttgaggccaggagtttgagactagcctggccaacatggtgaaaccccgtttctactatagccgggtgtggtggcaggtgcctgtaattccagctgcttgggaggctgaggcatgagaatcgcttgagcctggaaggtggaggcttcagtgagccgagagcatgccactgcactccagcctaagcgacagagccagattcgtccccctaccccccaaaaaggggtcatggttcagacctccattgtaggcccacccccttgctttactagctgagggaccttgcctaaattctttagcctctaggagcctaaatttccttatctgcaaaatggagattaataaaacttaccttgcaggacctttgtgaaaaaaacaaaaacaaacaaaaaaacttgagaagtcattcaaagcacttagttcgtgatcaataaatattagcttattgtttttctaagacgatgagtaggatttttcatcaaaaataaatcattctggttgccttgggcaaaataatctgcaatataaaatatctataataaatggctgctgtgtattcattgctactgtgtgccaggcaccatgttaaaacactttataaaaatgatctcattgaggcctttccacaactctttttttctttttttagagatggagtttcgctcttgttgcccaggctggagtgcaatggcatgacctccgctcactgcaacctctgccttcctggttcaagtgaatctcctgcctcagcctcctgagtagttgggactacaggcatgtgccaccatgccaggctaattttttgtagagacagtgttttaccatgtttgccaggctggtctcgaactcctgacctcaggtgatccacccacctcggcctcccaaagtgctcggattacagacgtgagccaccgtgcctggcccttatccacaactcttaaagtaggtgctaatatttgcagtaagtagatggagatggcttatctttcgctgagttagcttggtctgatttgagctggcaatacactgccttccaggtcattgtcctgcctgtgggtctttgcacatccagaccacacttccttcctctttacctaaatctacctctttctcatccttggagagaagtatttgcacccttcctttgccctcagtctttcttttttattttttcatttcatttcatttattattattattattattattttttttttgagacagaatctcacagtcacctaggctggagtgcagtggaatgatcatggttcactgtagcctcaaactcctgggctcaagcaatcctcccacctcagcttcccgagaagctgggactacaggtgtgcaccaacaagcccggctaatttttgtaggtctcgctatgttgcccaggctggtctccaactcctgggctcaaacgatcctcccgccttggcctccctaagtgctgggactgtaggcatgagccaccgtgcctggccatgcccaatctttcttactgcagttggtgatacatggtttttgttttctctatacatgtattttttggtggtgtgtttaatatctgtcttttcccagactgtcgcctccgtgaaagcaggaaccttgtcagttttctctccaagttatccctccaacgcctagcacagtgcctggcaaatgtaggagctcaacagggtttgcggaattattatgtgtatgtctgaaggaaggatgttggcagtgcgcccaacgtgtgaggggaaccccactctccaaggttccagtggctttaaaggtgtcctcgagaaaatcagaggaacagggggatgcttgttttccttccttccttctctctctctctctctctctctctctctctctctctctctctctctctctctctctcttttttgctttaaagtatgctgaaaggacactttaaaccaagtctgaatggctcggcaggactggggcgcgggtgctggcaggagccggagaggcgacatctggccatgggagcatttgtttcaaagttcaaggccgttcgctcagggtcaaggttagtccggcgggccgttcggagaccagccccagcgtgccaggaccgtttccggggcctggccggggcgttgccgcggggtcggggaccagcacgagtgctgagtcacgccccgcccgggagcgcctcgggtcagtaactcgggaagacgaccaagcgggagcgggagcgggagcgggagccggagcgagagcgcgcgggcgcggccgaca

SEQ ID NO: 5250 - DNA, 2300 bp, Homo sapien
ctctcctctgattcctcgtgacgccgcactcctcttactctccccggggctcatccgggggaatggggcagattatgtcccaccggttggacaaactaacgagggcggggaaaggaaaaaaaaaatcagaataggaagccaatcagagctcggtacaagcccagccaatcgggtcgggtcaattggggcttagccaatcgggctcgatgaggaagacgtgagtcagagcttgcgcctctcgcttccagctgtgggtggcgctaggcagcttcagccggaccgggtaggggtcctcgctcgctagcttgctgtttctcggagaagctcccgagtgtccggcctagaggccatgagaaggcagtgggggtctgccatgagggcggccgagcaggcgggctgcatggtgagcgcctcccgggccggacagcccgaggcgggcccgtggagctgcagcggggtaatcctgagccgtagcccgggcctggtgctttgccacgggggcatcttcgtccccttcctgcgagctggcagcgaagtcctgaccgcggccggcgccgtcttcctgcctggcgacagttgcagggacgacctgcgcctgcacgtgcagtgggccccaacggccgcgggtcccgggggcggcgcggagcggggccgcccagggctgtgcacgccccagtgcgcgagcctcgagcccggcccacctgccccgtcccgcgggcgtcccctgcagccccggcttcctgctgagctgctgctgctgctgagctgcccggccttctgggcccacttcgcgcgcctcttcggggacgaggcagcggaacagtggcgcttctcgagcgcggcgcgggatgacgaagtgtcggaggacgaggaggcggatcaactgagagcgctgggctggtttgcgctgctgggcgtgcggctaggccaggaggaggtggaggaggagcgcgggccagccatggcggtgtcgcctctcggggccgtgcccaagggtgcgccattgctggtctgcggctcccctttcggcgccttctgccccgacatctttctcaacacgctgagctgcggggtgctcagcaacgtggccggcccactgctgcttaccgacgcacgctgcctgcccggcaccgagggcggcggcgtgttcaccgcgcggcccgcgggggcgctggtggcgctggtggtggcgccgctctgttggaaggccggcgaatgggtgggcttcacgctgctctgcgccgccgccccccttttccgcgccgcccgcgacgcgcttcaccgcctgccgcacagcaccgctgccctggccgcccttctgccgccagaggtgggcgtcccgtggggtctgcccctccgagactccgggcccctgtgggcagccgcggcagtgttggtggagtgcggcaccgtatggggctccggagtggctgtggcaccccgccttgtagtgacctgtcggcacgtgtcccctcgggaagcagccagggtcctggtgcgctccaccacccccaagtaagcccgcagggctgacgccacttcatccctttccaggtctcagatctgggtccagccctaatactcttgagtattgtgcaggcctttcttgtgtcacgcggatgctttgggcgtgtagtgggtagagacctggaaccctcccctcatcctttatacccagaacccctgtggggagaatctggggcaaggtgtcaagctcgaagcagctctggatttgggtactgtgggacaccctgaatccggaacagggcatctttgagctcccctcaaaggctgagtttcttctgggcagcttcactgtctgatagccctgcacgccatacccctcggttctctggccctttgaacagagattccctaaccctgctgcttctcctctgaaagtgataaggtcccagaggcccaggatggtgctctcctggggtaaggagatgggtatgttaattttatccatcttttagtgcttagccagagcttcccgtctgagtgaaacgtgagtttctacgtaatcagaaggtaggggggtggcccacgcagctgtacatggttcagcccagccttgcagcccaggcttttccaaatctcttcctgaatccccaagcttagccaggtgtgggtaacactgcccagttttgccataggtgtccccactgtggcctataggacagccatgactttatagggaagactgatgatgaaggtttgcctatggtgtgtggcccccaccagattccttccactccccccacatgccccttgctcctaaggagactgccaggtct

SEQ ID NO: 5251 - DNA, 2300 bp, Homo sapien
tggggttataccaagcagtgttaactttatttaaagaattcaggcagaaagattagagaatttaagtagcaattgtatatggtaagcaatacagtaaccttaataaaaattaatgatggccgggtacggtggctcacgcctgtaatcccagcactttgggaggccgaggcgggcggatcacaaggtcaggagatcgagaccatcctggctaacacggtgaaaccccgtctctactaaaaatacaaaaaattagctgggcgtggtggcaggcgcctgtagtcccagcgactggggaggctgaggcaggagaatagcgtgaacccaggaggcggagtttgcagtgagcggagatcgcaccattgcactccagcctgggcgacagagcgagactccgtctcaaaaaaataaataaataaataaaaaataatgtgtattttatcaattcagtgataaagcagacctttgtaaactgtctagcttgtggtgactgattgagggtatcatgaagctccgcgcccccccactccccgacatactcgttcatcctcctctgtcctaaagcgtacttctttggaaaagtagagcagtttatgttagtgtacactagagatggtaaactatgccttgtgggtcaaatcgggcctgctgcctgtgtttgtatggcctgtgagcaaagaaaggtttttacatatttaaatggttggaaaaaatatttaaagaatgctatttttggacacaaaaaattgtatgaaattaaaatttcaatgtctgtatctttttattgggacacagccaccgccattcctttagcttttgtatgcaacagctgcagagttgactatttgagacaagttgtatggtccccccaaactggaactgtttccattctggccttctacagaaagtatttggaccctggcctagataaatcctggctggtggttatgttatgtgaaatgtgcacactgtaaaatataggcctgtatgattaaaatttttgatttcagctactgttcatagtcgatttaaagggcaatttaatttacagcaaatccagtttctcggagatttgtgttggggctttggcagcaaaaaaaaatcctaggagtaatcttgagagttccatgccccctagtggattgctatagggtttacttttaaattttcaaaacactgaattggccaaggatttccttggtccatattatcccaagggtcagaggctgaaggtcgcctagacctgggcagatgctcacaggtactgtcgtggcctgggcaaatctaggcacgtcagcgctcatttctattccctttcccacattccagcaaacgagactaggcttgaagggacccaccctcctctcctctgattcctcgtgacgccgcactcctcttactctccccggggctcatccgggggaatggggcagattatgtcccaccggttggacaaactaacgagggcggggaaaggaaaaaaaaaatcagaataggaagccaatcagagctcggtacaagcccagccaatcgggtcgggtcaattggggcttagccaatcgggctcgatgaggaagacgtgagtcagagcttgcgcctctcgcttccagctgtgggtggcgctaggcagcttcagccggaccgggtaggggtcctcgctcgctagcttgctgtttctcggagaagctcccgagtgtccggcctagaggccatgagaaggcagtgggggtctgccatgagggcggccgagcaggcgggctgcatggtgagcgcctcccgggccggacagcccgaggcgggcccgtggagctgcagcggggtaatcctgagccgtagcccgggcctggtgctttgccacgggggcatcttcgtccccttcctgcgagctggcagcgaagtcctgaccgcggccggcgccgtcttcctgcctggcgacagttgcagggacgacctgcgcctgcacgtgcagtgggccccaacggccgcgggtcccgggggcggcgcggagcggggccgcccagggctgtgcacgccccagtgcgcgagcctcgagcccggcccacctgccccgtcccgcgggcgtcccctgcagccccggcttcctgctgagctgctgctgctgctgagctgcccggccttctgggcccacttcgcgcgcctcttcggggacgaggcagcggaacagtggcgcttctcgagcgcggcgcgggatgacgaagtgtcggaggacgaggaggcggatcaactgagagcgctgggctggtttgcgctgctgggcgtgcggctaggccaggaggaggtgg

SEQ ID NO: 5252 - DNA, 2300 bp, Homo sapien
atcactggactcgagagagaaagtttgtttgtttgtttgtttgtttgttttttgagttggtctcactctgtcgcccaggctggagtgcagtggtatgaacataggtcactgcagccttgacctcctgggcttaagtgatcctcccatctcagcctcccaagtagcttgggaccacagggttgcaccaccgtgctcagctagttttcaaaatttttgtagagttaaggtctcatcatgttgcccaggctggtctcaaactcctgggctcaggaaattctcctacctcagcctcccaacgtgctgggattccaagtgtgagcccctgtgctccaccaagagaaaaactctttgattgctaggaagttgggataaagaaattgtgctgtgatcaagccaccttctgtgtcatagaaccaaaagaagaccgcctgctatggcaagatggcctaattttattcctgcctcatactatcatggataatcgttttcctttctctagcaggtttgtgtcactgggagtactgggagcattatcctgtgttgtgctggggttataccaagcagtgttaactttatttaaagaattcaggcagaaagattagagaatttaagtagcaattgtatatggtaagcaatacagtaaccttaataaaaattaatgatggccgggtacggtggctcacgcctgtaatcccagcactttgggaggccgaggcgggcggatcacaaggtcaggagatcgagaccatcctggctaacacggtgaaaccccgtctctactaaaaatacaaaaaattagctgggcgtggtggcaggcgcctgtagtcccagcgactggggaggctgaggcaggagaatagcgtgaacccaggaggcggagtttgcagtgagcggagatcgcaccattgcactccagcctgggcgacagagcgagactccgtctcaaaaaaataaataaataaataaaaaataatgtgtattttatcaattcagtgataaagcagacctttgtaaactgtctagcttgtggtgactgattgagggtatcatgaagctccgcgcccccccactccccgacatactcgttcatcctcctctgtcctaaagcgtacttctttggaaaagtagagcagtttatgttagtgtacactagagatggtaaactatgccttgtgggtcaaatcgggcctgctgcctgtgtttgtatggcctgtgagcaaagaaaggtttttacatatttaaatggttggaaaaaatatttaaagaatgctatttttggacacaaaaaattgtatgaaattaaaatttcaatgtctgtatctttttattgggacacagccaccgccattcctttagcttttgtatgcaacagctgcagagttgactatttgagacaagttgtatggtccccccaaactggaactgtttccattctggccttctacagaaagtatttggaccctggcctagataaatcctggctggtggttatgttatgtgaaatgtgcacactgtaaaatataggcctgtatgattaaaatttttgatttcagctactgttcatagtcgatttaaagggcaatttaatttacagcaaatccagtttctcggagatttgtgttggggctttggcagcaaaaaaaaatcctaggagtaatcttgagagttccatgccccctagtggattgctatagggtttacttttaaattttcaaaacactgaattggccaaggatttccttggtccatattatcccaagggtcagaggctgaaggtcgcctagacctgggcagatgctcacaggtactgtcgtggcctgggcaaatctaggcacgtcagcgctcatttctattccctttcccacattccagcaaacgagactaggcttgaagggacccaccctcctctcctctgattcctcgtgacgccgcactcctcttactctccccggggctcatccgggggaatggggcagattatgtcccaccggttggacaaactaacgagggcggggaaaggaaaaaaaaaatcagaataggaagccaatcagagctcggtacaagcccagccaatcgggtcgggtcaattggggcttagccaatcgggctcgatgaggaagacgtgagtcagagcttgcgcctctcgcttccagctgtgggtggcgctaggcagcttcagccggaccgggtaggggtcctcgctcgctagcttgctgtttctcggagaagctcccgagtgtccggcctagaggccatgagaaggcagtgggggtctgccatgagggcggccgagcaggcgg

SEQ ID NO: 5253 - DNA, 2300 bp, Homo sapien
ttttctagtacctttatagtgtcatttcaaaatacacacatcttttcatcacttgaaacttgtttagagtaataaacttttggagattcaacctgtaggtttttttgactacccaattgtctcaaccccttttattatttattaatttatttaacaacacataacagaatcatttattgaaaacagtactctggaaaaactatgtgcacaacaatgcctgtttcacccattttacagtgggtacatggtggtctggggcattcgtcaacttgctcaagcctttaggtaagtagagtttgcggcttttctgagaatctgcctgcatgttccctccttccccagcctcccaagccatcctgtggttcagacacctccacctcgtgcagccaggctctcaacaaagccagtaatccaatgtgttggcttgcactgggcttgcatctgtgtctccaggatgcacaaggggttccaagccccatggacacattgtccctggtttagctaaagctggtgagaagcctcagaagtggcctgacacctttctgtgacaggacagggttcaaattcaacatctaagaccccaggatgagcggagggtagagggtggtgagcttgcccactcagctccctgagtattgctggagtcccaggtgctactttagttttatttctgcatgtactttagtcatttctgtactttgctctgttccattgtgttttttgtgtgtgtgtgtttgtgcatgtgcacgcacaccagttttaataacttaggctctataatatgttttaatatccaacagggttagttcccacctccttgttcttcattttgaaagcctgtttctggactagttttgtttggttttctatacgaattttaggaacaaatagggtaattaaaaaaaaagaacgaaaccacacacgacctattaatcctattagtacttttattgggattatgttaaatttaaattttactaaaggagaattgagatcttcatgaacccacagacgtcattcatctttccattagactgttttatttgtaaaatgagagtaataatagtaccaatctcgtgggactgtcctgagaattaaatgagaaaatgcatgcgaaatatactggggtgaacacgttgctttgccacttagctgtgtgaacttgggcatggtaggttattctgaacattgctctctcatttgtcaataaggataatactagcatctggagtcacaggactccaatgacggtgaaattagacaaagcgtgcaaagtacccagtgctctgcctggaacataagtgcacaataaatattagctgtttttctgtttttctaaaacataggccaccccagggcaaggaagtgcgactcaaagcaaaagcagctgggcgcggtggctcacgcctctcatcccagcattttggaaggccgaggccagcggatcacttgaggtcagaagttcgagaccagcctggccaacacggtgaaacctgtctctgtaaaaatacaaaaaaattagccaggtgtggtgacatgcgcctgtagttccagctactcgggaggccgaggtatgagaatcgcttgaatccgggaggtggaggttgcagtgagccgagatcgcgccactgcactccagcctgggcgacaaagtgagactccgcctcaaaaaaaaaaaaaaaaaaaaaaaaagcaaggaagaaaaaaagcaaaagcttggagggatccacctcaagtggagggccccaaggtcaactcatctttcccaggacctatgtcaccgtcggtacccacttctgactttcctggtgcgtctggaatgggaagccgcgatcccgagtgtaccaggccgctcagggactccaggacccagccccggacccagggttccggcgctgccacgtctcgcgcggtcagctagccagacgggagcaggcggggccgaggcggggccagaccccgagcgcgctttgtcacgccttatgcccgcccctccgcggcccgagtcgctggtgggacggcaccggggcagagaggcgtaacgctgtgagggggcggggcccattacgcgcccggaagtcccggggaggggtgtgacgtacatccggcgagtagctggcggtcccgggtgctgctggttagtgtgctctgagggagggtccgagccagccgctgttttgccggaggagcccctcaggccgtgagtctgagggtcgcgtcggggaggggagttggggctcgaggggctgggacggaaggcggggaggtcggagcggaggctggccctggcggggttgggt

SEQ ID NO: 5254 - DNA, 2300 bp, Homo sapien
gggtacatacataggagttgccaaagctagaacactttgagcaagaaaataaagtagtattgtaatataacctggaacataaaataaatctccatgagtctatactgacaaataaatgattgaataaatagacaaatgaggaagaatagacaaatctcaaagcagaagaattccaaataatttatgcagatactccattctcaaggaggtccttaattgtgagttgtgcctggtgacttccttccaaagagtacagtgtgggtaagggagaggagaggatgactttagagcagagaaacttgacaaacactgcctcagccaggtgatggaggtcaatgtcagcagtgataagagtcaccttgagagcatgttccctcaaaatgatgtgatgtatatttgcatctgtgttaattcattgaagaaggactggaagaatgccaatcctttaatgtttcgtttcaattttgaaaggtgagagtgcattcacaccatctgttcactacttggtagtacggctctgttctgttggtccgtgtgtgcatttccaacgtgcttcttatgcaagagaacttggcatgctgtggccacaattagtgaagccaagcccatcactctgtcagcactcatttactaaggctttattttcctgcagttcaggttattagaaccctgaaaactttctcggggtggctggtcccatggcgcaagtagtatgcagctttccctaatgtcaacctaaggcagtgtctattgtccatcctatagcttgcccctgtgcatctcttccatttgctgtccctgagttgtatttatataacgaaatttaaacttcagtgttttcctgagttctgtgaaccattttagcaaattaggggacctggggagaggattgtagaaacccctaatttatagctgatagtcaaaagtacaggaggcatctgaagtggggcagtcttgtgagactgagcccctaacctttgagatctgatgctaactccaggtagatagtatcagaatcacagtgaattactgagcactcagttggtgtctgaataattggagaattagtttctgttattggaaaacatcaacatttgcatgttggatttctggatttccaaattatttctatatcaggtgacacatttcatgtaaattataagttctttgaaatttactagtgcttaaacatttcccagtgcattctgtaaagtttccatacttttagtgatattatgataatagaatgcatgctattctttatgcagattataaattggattgaagcggccgggcgcggtggctcacgcctgtaatcccagcactttgggaggccgaggcaggcgaatcatgaggtcaggagatcgagaccgtcctagctaacacgaaaccccatctctactaaaaatacaaaaaaattagccaggcatggtggtgggcacctgtagtcccagttactcaggaggctgaggcaggagaatggcgtgaacccgggaggcagagcttgcagtgagccgagattgcgccactgcactccagcctgggagacagagcgagactccttctcaaaaaaaaaaaataaattggagtgaagcaatgttatcttatacaaatataaataagcttttgttattgttgaatgtatttctcttcctcataatacttttcctaactgactttttaggatgtgtatctctgtttgcttgcattgagcaggagtttgttatttgaagtgcagtttgataacattgaggctagccattgttgatggctatacagaaacttaaaatttttaaagcagtgcacttttctgtcagccagaactaaagtattgttatgtacagtgcctgtactatccagcaaagtctagtcacatttaatacgtaacccatcaatggatatcaatctaatctatttttcttatcttttagtatgtaatagtgttgtgatcctctgacatagcctctgcctctggaccagggatagtacctcaagcctgtaatcccagtgctttgggaagccaaggcaggaggattgcttgagcccaggagtttgagaccagcctgggcaacatgacgagaccccatttctacaaaaaatttaaaaattagctgggcgtgtgcatgcttatagtcccagctactcaggaggctgaggtgagaggatcgctgaactgtggaggtcaaggctgcagtgagccttgttcgggccactgcattccagcgtgggtgacagagcgagaccttgtctctgaaaaaaaaaaaaagataacctctgtctttttcagtatcttgtacact

SEQ ID NO: 5255 - DNA, 2300 bp, Homo sapien
acattaattcctctacctatccgtccagcaaagattcactaaacatctactctaggctgtgtactgtgctaggccctagggagacatggtagaccaaggtccttttgggcctatgggctcactacacttgcctgcaaaggaaagttacaattcaccagggctgggtgttttaccagacctgataatgactggctctctgaatacattcgatgaaacaagagccagtgtgcaagtctggaggtcagtgagactttattatcttgctctgagctggcaggaggcaaagggaaagtgtatgtagaacattattattgcatcactgctgtcttcttaagtcagtcacagatgagagtctgggtttttccaagaaaattggttccatctgctcaaaggcagaaaagtgatagagcagttcaatcaaaagagcatccccttaaaatattctttgaacttgatcctacttttttttctgaaacagagtctcgctctgtcacccaggctggaatgcactggcgtgatctcaactcaccgcaacctccgcctctcgggatcaagtgttctcctgcctcagtctcccgagtagctgggattacaggcgcgtgcaaccacgcccagctaatttttgtatttttactagggacagggtttcactgtgttggccaggctggtttccaactcctgacgtcgggtaatccgcccacctcggcctcccaaagtgctgggattgaaggcgtaagtcaccgcgcctggccttgaccctaattattgactaaactattgcttcgctaattttttttcctgcccttctgttttaacagcagtaaaacagtgtggtgaaatgttcaaaaaatcagtgaatcacagccttctgaaaattaatgggtgtcagtgaggtttgggagttggatggagacaaagggagcgacaccataactaactggagatcttactaggttttcatttaatattcattttttacaatagacattgtttggaaaaaagggtttaattcaaaatgtcattaaggcacattatctttaatgttctagaaaaagttatttaaagaaatcctggccatgaaattaaaataaataaataaataaaaccaggcattctttgaaatgtgaataataatttgctaatttatatttaggattgtggatatactttttttcttttacatgtattcctggggaggtaagtgatgcaaatattttcccactgcctcaatcagactttagtttttggggtctggcctgatatgatggaatataaacaggaaatcaagatcagaagagcctgtccctgagaacactccttcacgggactctagctcacgcctggaccttcccagtgcttccatctgaagcccctggagacccaggtgggttaagtagggtggcaggggggatggagggggcggggggcgcgggggcgtaaatcctcccccactggggagggtgacagtaacaacttccagattgtttacaaagatacaggctctgcttcaggcatttgacgtgtattaactcgggtaatcatcccagtaactcatgaaatagttatattattatcttcacttcccagataagcaacggagtgagagagattatagaaagtggagaagcgagtaccttactagtagccactaggggtgtcagtaatatggctcaactttgttacgacggatcagaaaaatgctcacctttaagaccgcaagcagagcctgtctggggaagcaggtgacttatcaacgccttttgagataaggaataggactgcggggaggagtgtgtgagaatcaaaggtgagttccctgtgtgcgtggtcggcggtcaactcctagctagtccaagcttagagcctgcgcatttgccctcccgggtcagagcccaaagccgaaggaacagaaccagcgccggcggcagccacgtggcccagcctctgagccctagctgccatcgcggaggctgggcccgaggggcggggctggggagtgcggacacccgggcctggcggagtgcgcctgcgcacggggttggcccggcgggggtgggaacactagcagagccgcgttaaaggcgctccccgccccgcccgccggtccagtgctcgcagtgcgcaggcgtggggctctctccttgtcagtcggcgccgcgtgcgggctggtggctctgtggcagcggcggcggcaggactccggcactatgagcggcttcagcaccgaggagcgcgccgcgcccttctccctggagtaccgagtcttcctcagtgagtgtctgcggcccgtggcccctccg

SEQ ID NO: 5256 - DNA, 2300 bp, Homo sapien
ctcgggctcccgtgattctcctgcctcggcctgccgagtgcctgggattgcaggcacacaccgccaggcctaactggtttttgtatttttggtggagacggggtttcaccgtgttggccgggctggtctccagctcctgacctccagctcctgttctgcctgcctcggccttctgaggtgctgggattgcagacggagtctcgctcactcaatgctcaatgttgcccaggctggagtgcagtggcgtgatctcggctcgctacaacctccacctcccagccgcctgccttggcctcccaaagtgctaagattacagcctctgcccggccgccaccccgtctaggaagtgtctctgcccggccgccctgtctgggatgtgaggagcgcctctgcccagccaccaccccatctgggaaatggggagcgcctctgcccagccgcccatcgtctggaatgtgaggagcacctctgcctgggtgccccatctgggaagtgaggagcgcctctgctcggcagctgccccatctgggaagtgaggagcgcctctgcccagcagccgccccgtctgggaagtgaggagcgtctctgcacagccaccccgtctgggaagtggggagcgtctctgcccggcagccaccctgtctgggaagtggggagcgcctctgccgggccgccccgtctgggaagtgaggagcgcctctgcccggccgccccgtctgggatgtgaggagtgcctctgcccggccaccaccccatctgggaaatggggagcgcctctgcccggccgcccatcgtctggaatgtgaggagcacctctgcctggcctccctgtctgggaagtgaggagtgcctctgcctggcggccgccccgtctgggaggtgaggagcatctctgcccggctgccccgtctgggaagtggggagcgtctctgcccggctgccccgtctgggatgtgaggagtgcctctgcccggccgccaccccatctgggaaatggggaacgcctctgcccggccgccccaatctgtgatgtgaagagcgcctctgcccggccgccccatctgggaggtgaggagcacctctgcctggccgccccgtctgagaagtgaggcgcgcctctgcccagcagccaccccgtctgggaagtggggagcgcctctgtccggccgccccgtctgagaagtgaggagcgcctctgcccggcagctgccccgtctgggaagtggggagtgcctctgcccggccgccccgtctgggaagtgaggagtgcctctgcccggccgcccatcatctgggatgtgaggagcgcctctgcccagccgccaccccatctgggaaatggggagcgcctctgcccggccaccccgtctgggaggtgaggagcgcctctgattggccgccccatctgggaagtgaggagtgtctctgcccagctgccccatctgggaagtggggagcgtctctgcccggctgccccgtctgggatgtgaggagcgcctctgcccagctgccaccccatctgggaaatggggagtgcctctgcccggctgccccatctgggaggtgaggggcgcctctgcctggccgccccgtctgggaactgaggagcgcctctgcccggctgcccatcgtctggaatgtgaggagcacctctgcctggccgccctgtctgggaagtgaggagtgcctctgcccggcagccgccccatctgggaagtgaggagtgtctctgcccggctgccccgtctgggaagtggggagcgtctctgcccggccgccccgtctgggatgtgaggagtgcctctgcccggccgccaccccatctgggaaatggggaacgcctctgcccggccgccccgtctgggaggtgaggagcgcctctgcccggccgcccttcatctgggaggtgaggagcgcctctgcccggctgccccgtctgggaggtgaggagcacctctgcccggccgccccgtctgggaggtgaggagcgcctctgcatggccgctgtgcaatcttccaagtgtgaagtgacagcctttctgcaggtgtacccaacagctccgaagagacagcgaccatcgagaacaggccatgatgatgatggcggttttgtcgaaaagcaaagggggaaatgtggggaaaagaaagagagatcagattgttactgtgtctgtgtagaaagaagtagacataggagactccattttgttctgtactaagaaaaattcttctgccttgggatgctgttaatctataaccttacccccaaccctgtgctctctgaaacgtgtgctgtgtca

SEQ ID NO: 5257 - DNA, 2300 bp, Homo sapien
gccacagtgctgtaccattaaattttggggtggttcacaacataataataggtaatagaaacagaaatcttgctccgatccacactcaaacaaaccaactatttaaaaaattatgaaacaatcaggaaattttgctggatgctggctatttaatgatataattacataattgttaattttgttaggtttgataatgatggaaaccacattttttcatgttgtttttttgagtccttattttttaaaggtacaaactgaaacatttatggatgaaaggaagtaatgtctggtatttacttcaaaataatccaaagagaagtggggatatggatgaaacaactccaggcctcgagttgataactgttgaaagcagatgatgtatacatgggggttctttatatgatccctctaataacagctcattaaactttatactcttgtatatgtttattacaatattctctcttctacatgtttgacatttaccatattaaaataaagatgtttgagtacagttggaagtccttggaaggcctaaacctgggagtatcatctctcatcgggcacaggaagtttgcaggttgtccgcctcccgccgcagtccctctgccccatcccaacactcaccgcagtgccccctgctggtccctgcagccctgatgatgccagctcgctggccctgctcctctgagggtctctaacctccaggcccccagcctccattgagcctccaggccagtggctgagttctcggtgtgacagaaagattccacagggactcttcatcccctggaataggcctcaggaggaaagtttatgacacaacatcatgagtcaccccaactaatgacttcccagaagagctgtggttggacactgagccttcccttcgaagcaagcctggggaaacacacaccaaagcctggtcctaattcacagacacacagagcagggccagctgtgctgcagcatcattggaggaccttgagcaagtcatggaacctttctgacctccatttcaaatgaagctaacaccttagggtaattcaatgagggtttaaaaaaaatacaaaagaaaacaaatgaggctaatacctaatgacttacatcatgggatggctcggagagctaaataaaataatagatgtggaagtgttatgttaaatgctatgcaggcagaacagctgatcatgggatgggaggaggcaaaggttgagcaggagcccctgctttggatgttctgctgaatgtgatgtgcctcttctccttagccctggttcacagttccccttcattctccctttctctactgccttcttgcctttctcaactaaagttccatggaggagatgaaggggaacgacatcaaagagtttgagggtataataattgggtcccagcagaaaacaaatggtgcactcagaaagggtttaactgaacagagtttaatggaagaagagagggttaagagaaccagccagaaacggtgaagcacccagggactcacaaccacaggaagctgttaccattgagtgcaaggagagggaagagtgttactgtagtcaggtgagggctagagccatgaaaggggactcacccaataggagcaggctgtggctatagggaaaaacagctgctgaaagaattgggccaggcaggaagggaatcagaagacaaacaccctgacctctctctctgctcctgccctcccatctccttcagggcctggcattggctgaacccagctagaagccagaagacaagggaaccagggcaatgcagaacttagaggttagcctctggggcacacaggagggccaagaaagttggaacctaaatgggatgggggagttaataaagaaaaaccaacattggagaatgagttatgggcaagacagggcatgaagtacaagaccagggtttgagtggttgtaggctgaaagtcttggatcagtgcatcaagttgcaactggagctggggacatgcttgggggaccagggcatggttaaggtttggcacacagagggtctcattagtggtgagaaatcggtaatctcttctttgcctaaggtcctgaccaatatattcctttggtcctaggggagccctcccagcctcccaacagcagttggcccctaagtcagaatgggactaacactgaggccaccccggctacaaacctcaccttctcctcctactatcagcacacctcccctgtggcggccatgttcattgtggcctatgcgctcatcttcctgctctgcatggtgggcaacaccctggtctgtttcatcgtgct

SEQ ID NO: 5258 - DNA, 2300 bp, Homo sapien
ccctgcccgttcctagcttctggtccctgctggcagtgcttggcactcctggccttggaaatgcatcagctgatccctgccgccatcaccacaggtggttctccctgtgcgtctcttctgtgtctcttctcttacaacgacaccagtctcagtggattaggggcccgccctactccagcatgaccttaactcattacatctgcaacggccctacttccaaataagatcacattctgatgaactttaacatattgttgggggtggagagggcataagtaacccttaacatccatcgaggcccaagggaatgtgtgttctttgactgcctagaccccctagaggcggaattaaatattcttttttttttctttgagacagagtctcactctgtccactcaggttggagtgcccatctcggctcactgcaacctccgcctcccgggttcaagcgattctcctgcctcagcatcccgagtagctgcggctacaggcgcctgccaccacgcccggctaatttttgtatttttagtagagacgggggttttgccatgttggccaggctggtctcgaactcccgacctcaggtgatccgtctacctcggcctcccaaagtgctgggattacaggcgtgagtcgccgcgccccgccctcaagtcatattttatagatgagaacattaggattggagacgcagggccgagacacagggccttgcatatactaaaaacctcaatgggcacccgaagtcatcataggaaaatttccctatgctccatgttcacgtgtttcaaagtatccctgatctggctaattcaactccattccctcgagaaaacccaatctggagccccggtcctagagatcctgggatgtactgcgcgtcccactctgtatctccgccccctcaggcgttctccctctagaagcagcacacaaagcggttactccctgcggccgggagcgcgcgggctgcccttccgcgcgccacccccgcgcgcgccgctcccccactgattggctgagcgcatcccgagcccagcctgctcccgccgcggcgccggtcctggcgccgggattggcggagtggccgcgcgcgcagatcccgcagccccgcgcgccccgccccgccggctcggaactcgcctggggcgccgccggcggcggagggagcgtgactgcgctgcgcagggcgctaggaggcattgtcgccgtaagtggagccaaaagcggcccggagcgggaccacacgcttcttgccccgcaaagtaaatgtagtccgaggtcaagcgttgcaggggctgggggagagagggcgagaagtgttccgatttttgcagcgtcccctcccctcccccaggtcacccggtggaaaagagcagcggtgcaccagcggaggctctggcggtgccaaggggctcggcatgcgcgggctcttgcttgctcactgcacctggaccccgatggttcaggggagtgggtgcagaggtgccagggaatagggagctcggagaaccgctcccaggcgggcctccattcctcgcgggaggcgcccttgcttggagaggctgctgtgcatttcgtccccgaagcgacactttcggggtttgcttccgctctggggagctgcagacgcctgctccagagcgtgcctctcggcctccgggcagcgtgggagccccggggcctctgcgatcactaccattcttccctctgccagctttattctcccagtccccgcctgccgggccagcggacgaggtgccattggctgcaggcaccgggggtgaggcggatcctggcacgcggggctgggggacccttgcctggctaccgcgcgtagtgctggaggctcagtccgaggatgcctagatgttagcgagggagcacgcgctgagcttcccgaaccccatgccacaaaaacaaggcgccagcaggtcccgctcacgtcccagcgggcttctttccctggggtggggaagtgggtcaacttcgttctgatctgaaggggggtttgggactatttgggtcgctcctcacctccccacccgctccccggcttggcatggtccagagcccgggctggagccagcggtagggccagcttgcacacatggctccggaggctccggttgcccatccgagcccctgccaggctctaacgttcccaactgacaacaccagtaactaaatataggagcagatggtggggacgggctgtcgcagcggctcctttgcagaggtctccggactgcagataaggtagagttattgatggtaagggctggagtcagggggccagg

SEQ ID NO: 5259 - DNA, 2300 bp, Homo sapien
ttgttttaagccacaactaagttttggggtgttttattatgcaggaaacactgatggatacaagcactgaacatgcgtcaagctctggtatttgcaatcaggcagactctcgggagtaaagacttgtgcagagatgatagaataatgggtataatgcactaagtgctctggagaagcaaaaacagtaggaatagaagaggtggatttgagctagggagggatcttgtctctgtggagttagagggtccaggatgaactgcctgggacaggggactgtctgagggaaagtatgaatgttggaaaccccaggctggggccatcagccagcagtatatactgagcccttaccatgggtacagaaacactgtactggctgtctcaagtctgcgtatggactagcagaggagagaagacatccacgtgtaaaagttgggtagaagtgtcatgctggttttcagtgaaaacagaagtagctatgcctgctttgtccacagtggcaagcagcatctcggcttgggcagaatgggactctacccattagttatttatatctggtacttgctatatatctggcagggatgtggtgttgatgggttgagagagatctccatagttttccctgggaaggcacaaggggtcagaaaacatggctgcttaagtatccacttgactggtaaccccttgagggcagggtctgtgtctgattcatgtcagtataccccaagacacaaggctttgcatatactaagcaatcagtttcaaaagacttactttggagatatttatcatcctcttctctttattcctactaacctattgtagttttttcctagggctgctataacaaatggacataaactgggtggcaacagaaatttattcacttacagctctggaagctattaagtccaaaatcaaggtgtctggagggttagttcctttttggaggctctgaaggaggaattattccctgcccgttcctagcttctggtccctgctggcagtgcttggcactcctggccttggaaatgcatcagctgatccctgccgccatcaccacaggtggttctccctgtgcgtctcttctgtgtctcttctcttacaacgacaccagtctcagtggattaggggcccgccctactccagcatgaccttaactcattacatctgcaacggccctacttccaaataagatcacattctgatgaactttaacatattgttgggggtggagagggcataagtaacccttaacatccatcgaggcccaagggaatgtgtgttctttgactgcctagaccccctagaggcggaattaaatattcttttttttttctttgagacagagtctcactctgtccactcaggttggagtgcccatctcggctcactgcaacctccgcctcccgggttcaagcgattctcctgcctcagcatcccgagtagctgcggctacaggcgcctgccaccacgcccggctaatttttgtatttttagtagagacgggggttttgccatgttggccaggctggtctcgaactcccgacctcaggtgatccgtctacctcggcctcccaaagtgctgggattacaggcgtgagtcgccgcgccccgccctcaagtcatattttatagatgagaacattaggattggagacgcagggccgagacacagggccttgcatatactaaaaacctcaatgggcacccgaagtcatcataggaaaatttccctatgctccatgttcacgtgtttcaaagtatccctgatctggctaattcaactccattccctcgagaaaacccaatctggagccccggtcctagagatcctgggatgtactgcgcgtcccactctgtatctccgccccctcaggcgttctccctctagaagcagcacacaaagcggttactccctgcggccgggagcgcgcgggctgcccttccgcgcgccacccccgcgcgcgccgctcccccactgattggctgagcgcatcccgagcccagcctgctcccgccgcggcgccggtcctggcgccgggattggcggagtggccgcgcgcgcagatcccgcagccccgcgcgccccgccccgccggctcggaactcgcctggggcgccgccggcggcggagggagcgtgactgcgctgcgcagggcgctaggaggcattgtcgccgtaagtggagccaaaagcggcccggagcgggaccacacgcttcttgccccgcaaagtaaatgtagtccgaggtcaagcgttgcaggggctgggggagagagggcgagaagtgttccgatttt

SEQ ID NO: 5260 - DNA, 2300 bp, Homo sapien
atctttaccctttgctctggccagaagggacccacctcactgtccccagaacacccccaaaatttgtaaataaagacagttcaaagagtgatgcactttattttttaattaattaactaacttttttagagacagggtctttttaggctggagtgcagtggcacaatcgtagctcactatagccttgaactcctgggctaaagagatcctcctgccttagcctcctgagtaggttgggactataggtgcacaccaccatgtctggataattttttatttatttttatttttgtagaaatgtgagaggagggtctcgcttttttatccaggctggtcttgaactcctggcttcatgccatcctcttacctgagcttcccaaattgctgagattataggtgtgagttactgtgcccctactggactgatgcactttatcaaccacacactgtaagctctacacaaatgtaaactagtatcttcccctttccttccactagaagtgtctctgttggcatgtccaaagtctcagagtctttcaaggttaaactcagccctctgcaactctggcagcttccagatggcaggacaggcaggggacttttttttctggattcttggggcactcaccacaaaatcagtaccatgtaatgccctggcctgccctgggctgttgtaagttcttttgtctatgttcttgccaagcacctgtttgaccctctgagcagtgaagcaatagctgttttcccctcaacctctcttacccttatttctctcatttgcaaaatgggaatgatggtagctatgttggccttacccatgagtgtcttcccagtcccaccttgggcatgttgtgggcagaagtagtgctgccctagtgcagcggttctcaaagtgtgatctggagagcccctcggggatctgagacaaccttcttttctaactacatacctgtgtgaggctgggttttcttcatatagttgaatcaacacattacaacagcttgaacacagaaacagatatgagaatacagctgttttctattaagccagatattaaagcgtttgcaaaaatataaaataatgccactgttctcactatttgttttagataattaaaaaatataatgtcaacatgtaataggttattattttatgaattaataaacatttaaaacattctcagttttaatttgttttttgttgttgttgttgttgttgttttttagagacagggcctcactctgttgcccaggccggaatgcagtggctattcacaggtacaatcccactagtgatcagcagcggctcagttttaatttctaatacaataattatcaatacatataatccacacaaacaaaagctcttggaaatcctcaataattttcaagaatgtagaggtactgagacccaaagtttgagaacccctcgaggaaagaatagagttccagatctagatttttcaggtacctcatggtctaagccctctcctgtgcctcattttaactctaatacaataatactcattcttgttgccatgagtggctcttggtttcttccttttcctaatgtttagatcttgctttatgtgtgtatatagtgatggtctttggaaggatacacaattaactggtacagcggttgaggggagttcggaaactgggagaaagtggcaccataaacctttctgctctgtttgatttttaaaatacagtacatcgtgcatgtagtgcctgaattaataatgaacaattaaaagtaaaattacatttttaatgcataggaatgcatgagaaactcaagtctgctcaagtaaagtggtgttaaccgacaatgacaaacaataagaagaaagttttccttgtccgccttcaccaggctcacaaacacttagctcgcgctccctctggctcttctcccgctcgctggggttaagccactctcttcctcagccctgcccctcgtccccgcccccttcaacaacttcagccacgcccctcactgcctcgccccgccccgcggcgacgtcacctccggccgaccagcttccccaactccctctggctcccgccttcgcccgcttccggtcgtcgtcgtcgccgctgctgccgctgctgttgctcctgaggctgctggctgaggccggaggatcgagcggcggcggcggcggcggctgagagggcggcggcgggagcggagcgggacgagggaacgggaggaagcgagcgaggagcgcgcagagcgcgcttttccgtccgcctgaggagccgaagcagccccggccccgccgccgccgcctg

SEQ ID NO: 5261 - DNA, 2300 bp, Homo sapien
tcctgggttcaagcgatgctcctgcctcagcctcccgagtagctgggattacaggcatgtgccaccacgcccagctaattttgtatttttggtagagacagggtttctccatgttggtcaagctggtctcaaacccccgacctcaggtgatcttcccacctcagcctcccaaagtgctaggattacaggcgtgagccactgcgtctggcctcactgaattatttacttgtttttattttttttttttaaagagggtcttgctatgttgaccagactggtctcaaactcctggcctcaagctatcctccagccttggcctcccatgtgttgggattacaggcatgaaccaccacacctggcctgaattatttacttaacacagattttttgggttccaacgatgatgatggtatatactgtgtgacagcaggatgaacaagacatttccagctttaggaaactaacagactgtccagggctcatgtggtggacagcccaggtctcctgaatcttagatgaggcctccagctatgtgggacagcctcctcccctaagacagaggacaaaggcttggagctcctagttgagcctgctgggcctttctccattttctaacaacctgctcaggtcgcagcctatggttcttttgttgttgttgttgttgttgttgttttgttttttgagacagggactcactcggttgcccagactggagtgcagtggcccgatcttggcttattgcaacctttgcctcccaggctcaagcaatcctcccacttcagcctccagaggagctgggactacaggcgcacaccacaaaaatgcctggctcatttttgtatttttgggtagagacagggtttcaccatgttgaccaggctggtcttgaactcctgagctcaggtatctgccagcctcatcctccctaagtgctgaaattacaggtgtgagccaccgtgcctggccagcagcctatggttcttttgagctagaggcatcctgtgaaagaagtcaggtgtatagagcacttagcactatgcctggcgcttagtaagtgttcagtaagtgttggccagcagctaagtgcttgtcaaggctaggtaggtggggggagctaagaagagaaagagccctcaggtgtaaaggaaaacggatggggccagacactggggcagggatttacatttctttaaaagtcattccagccctgatttgactttgcacctggaagggaggaggccagacaagatcactcttgtgcaaataaggaaagctgagcccagagatcaaagtgagtggccctgagccgacacccaggtcttctgtggccctgccacaccaggcagggattgggggatgtgggcaacaagggtaacacctttcctcctgaaatcactggggtgatgtctgcctgtcggggaagagcctgatgaaccaggatcaccccgttggctccatctggctccagcttctgctgaacactcccttttcaggtggagaagtcatcgtcctggtccctcctgccttctgtcttccccaggaaagcacttcagtatttggtagggccaggggtgctccccgaggccatctagacagtggccagggaggctgcgccggccagattgtgtcaaagtctgcctgagagccacgaggatccctcggcattctcttcctgcttcttgaggagcctgcggtccatttgcagcctgagtggagaggatggggcagggatcccaggtgaggtcgagtaaggaagtcgcagttctgacctgggaatctgccgggacaagcctgctctgtctcagcatcaaggcgtttggtacctagaggagcagggtgccagggtgtccagaccgggcaaaccaggagccctagatcccgtccctggaactaggtcctccgccagctttgcgggcctcctccgcaccaggctcaggtctcgcccatccccagcaggaggtctctctgccccccaccctccggaggggggttatatgatcttaaagcttccccagagggaggaaaggtgggggcggggcggctgctgaggcccaggatataagggctggaggtgctgctttcaggcctggccagcccaccatgcacgcccactgcctgcccttccttctgcacgcctggtgggccctactccaggcgggtgctgcgacggtggccactgcgctcctgcgtacgcgggggcagccctcgtcgccatcccctctggcgtacatgctgagcctctaccgcgacccgctgccgagggcagacatcatccgcagcctacaggcagaaggtaggca

SEQ ID NO: 5262 - DNA, 2300 bp, Homo sapien
ggggaagctgggaaagacctctctgtgcaaggaaagtaataataagtgactctgctgggacaagggagcatccagtgtggcttctcaagtcacaacgacttagggcccctcacattaccacctgctagatgctccacctgggtaagctgcttaacctctctgagcctcagtttcctcacctgtaaaatgggagtaaccatccaatccacttcataggattgataggagagtgcaaacacattatagtaagcctttatagaataatagattatgtctatctcatccagcctgggccagctacccacaatgcatgaattagtccctttgaagaaggacaatgagatgggcccaacccaaacactcctaactgactccagagtgactttctctcatctaaaatataacaagtggggctgggagcagtggctcacacctgtaatcccactgctttggtaggctgagagggacggatcacctgagatcaggagttcaagaccagcccggcaacatagtgaaacctcgtctctactaaaaatacaaaaattagccgggcatactggtgcatgcctgtaatcccagctactcgggaggctgaggcatgagaatcacttgaactgggaggcagaggttgcagtgagacgagatcagtccactgcactccagcctgggtgacagagtgagactccatctcaaaaaactaataataattttaaaataaaataaaatataacaaggttctccagggccaggcaaattgggtgtaataagttaaggattgactctagcacttaagagaatagaccctgcctaaaggaaatagtgacaatttggctttagggaaacttttccatgttgaaatgagggtccaggcctttctttccatttctcaaatgaagaaaaaaaaacaaaaacgtattttatgaacaatctcaaaaatgtacactgttggcatcttaaaaacttttctttctttttgttttttgttttgttgtgtttgagacagggtctcagtctgtggcccaggctggagtacagtagcacagtcatggctcactgcagcctcaacctcctgtacccaagccatcttccctcctttagcctcctgcatagctgaaactacaggtgtaggccacaatgcccagatacctttttctttcttttttattttattttattttttgaggtggagtctcactctgtcgcccaggctggagtgcagaggcacatctcagctcactgcaacctccgactccgtggttcaagcgattctcccgtctcagcctcccgaatagctaggattacatgcatgcaccaccacacctggctaatttttgtatttttagtagagacggagtttcaccatgtaggccgggatgtacttttctgttgttttagagatgaagtcatgctatgttgcccaggctggtcttaaactcctgggctcaagtgatcctcctgtctcagcctctgaaagtgctgggattacaggtgcaagccatggcagtcagcccaaaacttttaaaaacatagttggcgggcagacaaaacactgcatcagccagggccagctgcaggcatggtttgcaacctccacttactgcataccaggccctttgcccagcgctttgaagaatacagtgcaaaccagcaccaggcttgctggtgggaaactcccaggggctcaaagatcatgtcccataaacaaagaatggctgggatcagagcctggataaggaaggggtctcaggggagagtgcctgaggggagggaggtcatacaaggaaagcttcatggaagaaaagactcttgggctggattctgtgggagaaataggaatgttttgttgaatgaagaggaggcaaaatcattttgggcagagaaagaacagctctgaactttggggaagggcaggtgtttgcatgtggctggagtgcttttgggctcgaaggggtttgcaggggagggctctggacaacagggctggagatggaggctcatttctagcttgagatcacagagagccacgagatcacagagagccacatatgccagcagagtcactggatggcacctctcagcctgggcatcagcctccaagaccaacagttggggatacagactaaaggtagaagcgagagacttgtcttagacctgcctttatgagattgaattcattcacgtaggttgcagattccagcaaacagtgggcagttataaaccaggggctggggcctcagagagaaaggagtcaggggtcacccctgctcctaggcagctcacaatctggtaggctggtggcc

SEQ ID NO: 5263 - DNA, 2300 bp, Homo sapien
gtggtgagtacaaatgaatgtatggagacgtgccaggcactgtgctgtgggccaaaagacaggtcaggcacaggtaggacatagcttttgttctctgggagctagagaggcacaccgccgtggatcccagcatctgctgggcagggagggtgaggggaagcaaagtgtgtgtatttgtatgtgtgtattatgtgcatatgtgtatgtgctatgtttctgtatgtatatatgtgtgcatgcatccctataggtatgcatgtttatgtatatatttgtatacatatatgtgcatgtatgtgtatacatgtgtgcatacacatgcacatgtatgtaaatgtatattttgcacctgctcacacacatgttgctcctaccttagtcctggcctagaagaggacattatcctggaatgcatcctcaggatggcaggcttcagctggggagtctgacagctggtgggatgggatatggggctgtggcaagaggaagaaggaaggaaactgtggcccaggatggagtcctaaagtgtgccacacacgatgcctggacattacttgcccagctcactggcttctcaaatacctctttgaaggaggatgaagccatcttatggatgtagaagttgggaatctgagaacttacgtcacttttcccagaccacacagccagtaaattgtgagccactttgagcctagctctgctgaactctgaaggtcaggtctgtttcccaaggccactatgggattttctctgctgctgtccttttcacacaccttgggtggcgcaggagcaggtatggagctgaggacaagtcttccctgggcctgtttcctcatttgttaaaatagggatcagaaaagtaccgaccttataacttcgcgaggcacttaagagctaggtgctagggacatggtgagaccaccacaatgagtgatttctcttgtcttcagttattcttaggggtcatggggaatgtgttcccctctcccagcccagcgctctccagcctgacagaggtggggcctacactgcctgcatcctggggcaaccccagctcgccgaaatccagctccagtcctgaatgggggtgaggcaggtggtaacaggtgagaaaaaaggatttcccgagtgtggagcagcgagagggaggaagtgactcaccaaccacaacaaagcctatctctccgcgaggaagcacagcgaagagtgaacgcacgcacgtgggtgcgttcacccacgtgctcgcgggggcgtgcggggccgtcggagtgggccgggctggctgccgcctagtgctagtccgcgcgtgtggggtgaggagtggtggggggggcaggcctatggtgcgggtcactgcctggagccgcatgatgggtgggggcggagggacccctctccatccaaagctctgctctgctgttcccctctcacctctgggggccgaggggcgcgtttccttaggaccccggggcgtgggagaagcccctgcttggggggaccgtctgctgtttaggggctccccttcgacacgtgggaggcaaaagtgcagagcgcaccatcatccagctccggccgcactgcacagcgaggccggcccggagcccggatgctgggctcggtcccgccgaggctcggcctggctgtaaagcagaggggggcgagggaagccgggccagcgggtgtcgcgggtagccggcgtccgggacggggtgtggcgcccagagcgctgctgcctctcgcagccaggaggctggatgtcgggtttgggtgtcttccagaaggagccgcactagcgacgagggaagaggaactggcttcccgggcagtctcccccgccccaaacttttcctcctcgcggagggtgggcgggcggagggaggaagcgcagccggggaacgtggcgcccgcgttcctcccgcccgggggctgcggctgggctgagtgtgtctttaaatctgagccccccgcccctcgcggtggggccgggactcgcggtccgggcgggggcgggcgcggtgattggcggccgggtcgggtccgcccctcggcgttgggtagcggggcgctggggagcagcgcggcgcgcacgggccggggcgcgcaggtcccgtcgccggtgagcacgggctccctctcgcgtggcctcgccgggtccgcctggcctgcccacctccggagccacctctgcccccgcatgggctggcgaagttgggaggagcgagctggagccagagcgcgcgccgggcgcgccccgtcgctgcctgactcggcgcccgcagttcgggcgcagcacgccggcc

SEQ ID NO: 5264 - DNA, 2300 bp, Homo sapien
gcccttgctttgttctgtgaccttgcacaagttcctttccctctctgggcctcagtttccttatcaacataagcagagatgacattcagaatatttaaccaagtgatgtgtctcagaacagttgctgaccagccgtaaaaatcctgtacacagggctgtgcttagggcctggagccagccatgagcacagcactttttgggggtgtagaatgtttgaagtggaagggacctctagagatcatccaatagaggggtcagcaaactacatcctgcaggcccaatgtggcctgttttcttcaaataaagttttattggaatgttgacacttcctttcacttacatagtatctgtggatgcttagggcctcaatggcagaattgagtagttgcaacaggcgctgtatggcccacaaagcaagtatttactgtgtggccctttccagaaaaggaatggcaacccgtgatctaatgcattttagttcagatgtgaaaactgggtttcagggaggtagagagatttgctccccatgggtcacgtggtaacaaggaggcagagctggagtgggaacccaggcctcttctagtgctcctctgccatacccattccaccccctgcctttccaaaaggcactttttttaaaatttaagttctagggtacatgtgcacaacgtgcatgtccatcacatatgcacacatgtgccatgttggtgtgccgcacccaccaacccaccatccacgtcaggcatatctcccaatgccatccctcccccgtccccccaccccacaacaggccctggtatgtgatgcttcccttcccgtgtccaagtgttctcattgttcagttcccacctatgagtgagaacatgcggtgtttggttttttgtccttgcgatggtttgctgagaatgatggtttccaccttcatccatgtccctacaaaggacgtgaattcatcattttttatggctacatagtattccatggtgtatatgaaggcacttcttttgtcaagaggacctaacatcagatcattaactctgggaggctctgtcatattcattgttatcatcagcactggagctgttgtgtcttgagggcacagtaaatcttgtttgagtgtttggacttttacctggtttagcatctacagaaatcttgatttttatctgtgggttttgtttgaaatagccctgtgtggaggtagaactacaattatattaataaatgcttactgtgccccaggcactgggctaagcacttacaatcattagcacatttaattctcaggacagtcttgggggtaggaattcctggaaatgagctccttgtccaaagctatagagttaccaagcggtgggtggagttgggcttcatgccccaagcctgcgttctaaaccacctcactgtgtgtggagttagcagtgtagggactgtccctccaatacaatctgatggagggaccatccagtgatgttgtcttcttcagggtacaggctaggccgctgtcataaagtaacccagataagatgccttcctcaggacgaagctcatctcttacatgcaagtccacgaggacatccaggctgggatggctgctccgtgatcatccaggccccttctccctcattgctccaacatcatcaacatgtggcttccgtcttatgatctaagatgttctacctctgccatcacttctggattttagccaggcagaaggggagaagacaaaatagaaggcacctcttctctttgggaatggcctggaatttgcacgcacatcacttttcctcacatcattggccagaacttaaatcatgtgaccacaatgagttgcaagggaggctgggaaatgtagtcttcagctgggtggctcagtcctcagtcacagccctggggctgtcgtgttgaggaagaagggaagagtggatattgagggacaatgggcagtctctgccacaaatcgtagccacaggggttttcctgcggtgggctctgtgagggtggagctggccttgaccaaggaggttgcttgactcagtttccattctgccccccccccccccccccaggtacaactgcaaggaggagttccagatccatgatgagctgctcaaggctcattacacgttgggccggctctcggacaacacccctgagcactacctggtgcaagtgagctcaggccttaccctgccagcccgcctgctgcctcccacccctatctctcatgaattccctccctcacctccctctggccctccccaactttccccgtctctctgcccattttcagaacgggc

SEQ ID NO: 5265 - DNA, 2300 bp, Homo sapien
ccccccaggtacaactgcaaggaggagttccagatccatgatgagctgctcaaggctcattacacgttgggccggctctcggacaacacccctgagcactacctggtgcaagtgagctcaggccttaccctgccagcccgcctgctgcctcccacccctatctctcatgaattccctccctcacctccctctggccctccccaactttccccgtctctctgcccattttcagaacgggcagggccctaggatggagctagcaccgtgatcctctggttgattcctggtgccccagctctgccttcctacaaaagccccttccaggggagctcctaccctagagccagctttgcctctggagagcctctccctgctctttcctccaggcctggctcagacgtcacctcccacatgaagccctctctgatgtcccctctggaggagttgtctttccttttcctacactttatgatacccttccccagatcacagagagttatatattttgtctgttttttccatgaactgcaggcaacttgagggcaggatcatgttctttttgcccctatttcccccctccctgtcccctggagcccaggacagagctccatctgcagaaaatacccctgagccatctgagtgaccttcctgtggctctcccctgccagggccgctacttcctggtgcgggatgtcactgagaagatggatgtgctgggcaccgtgggaagctgtggggcccccaacttccggcaggtgcagggtgggctcactgtgttcggcatgggacagcccagcctctcagggttcaggcgggtcctccagaaactccagaaggacggacatagggtaagtatgccacttcccaggcagaagccaggtccccaaagccagggagaggggcaccttggaggggcagctttagaggcgctggaggggcctgctgcatgctggagaggtggggtagtggcctggaccaggccctgcctgccaggatggtcactgctgttggtctggttgggaaattctggtgaatgttgattgcatgtcctgagtggatggcggggcacaaggtcagaagccttcatagaccctacttgggagcctcagaggaagcagggggcgtgaccgggtgacaggaggagccagctcataatttgacagcttgctgaatggtgatcacagctaacacttaagtcctgatgttagccctgtgatggagtggcagtttgtctcccattttgcagaggaggaaacaggcccagagaagctaagtgacttgctcaaggtcacacagctcatgagtggtaccccaagacccaaacccaggcagctgaattcccaagtgcctgctttcaaggactgttcttacctgtcggatgttgaggcagggttttgcgtgtccctaggacacaggctgagggtctgctgcgattgtaggcttcttgagtgcagctgcatctgaattgaccccggagttaaggtggaaaggctttgagtgagacagaatggggtgggggtgtgggctgtgtgcaggtcccatcttcccatcttgatgataagttcctcaaggggaccatctgcccacacatttccctctgcctgtatggtgctcagtgaatgaatgattgcgtggtcatggggcattcatttcttcagctgatgttcatcaaacacctgatttatccaggacaccatgctaggacaccatgctaggaattatgggtacatgaaaatgaccaggacatgattttgcctacgaggaacctgtggtccattaagggggaaaagatgcattcattgatagtacaaagcaggaattaacgccaagagattcatatgaaggactcttgaccctgacaggaggcaggggtcactgctgactgggagggtcacagggaggtagcatttggactgagctttgtttcttgggtaggattcaggttgcagggatggtgtggggtgcaggaggaaggaacagcttgggcagaggccctgaggtggggcagtggtgcaggtgtctgtgcgggatcatgatgatggcttccttccccctcgggctcctggcaggagtgtgtcatcttctgtgtgcgggaggaacctgtgcttttcctgcgtgcagatgaggactttgtgtcctacacacctcgagacaagcagaaccttcatgagaacctccagggccttggacccggggtccgggtggagagcctggagctggccatccggaaagaggtgaggaccagtgcggtgtgcgggagaccccagcccacagcccagctttgcagatgctctttttgg

SEQ ID NO: 5266 - DNA, 2300 bp, Homo sapien
tgaccgcagataaccacagcatctgggatagggtgagacacttagaagaacttacagcctggcagaactgtgtcatgaagggagggaaagactgtcttctggggagttccaaggcttaactcctgcccttgcagggatggggacagggacaagactgcctgaggagtctgtccttaacaccctgtcctctctctcagggaagcggcagccgacacagcgtctggcagagggcgctgtggagcctggagcgatacttctacctgatcctgtttaactactaccttcatgagcaggtggggcctgggaggagcagacccacgtcccctcctcctgggcctctcccagcctccccaccgcagtgactggcttgctgtggagggagaccccccaaggaaccggggagggaagggaggccaggagagacccagattcgggagtagtccctgagcagctgggcatagggaggccccacctctttccaccgggcccttgtctctgtccttaaccaggacaccagacgtccaggtcttctctcagccactcccttgtccctgctctgggccatgttggatatcttttggggcttcccctgccatggtgtgggcagggagggttcaggatggccctgtgcccctgaattcctcgtctctctgcctcgggctgcagtacccgctggcctttgccctcagtttcagccgctggctgtgtgcccaccctgagctgtaccgcctgcccgtgacgctgagctcagcaggccctgtggctccgagggacctcatcgccaggggctccctagtgagtatgactggcagtcggagaagtgggcatggctgtgtactggccctggcccctaaacactggattcctgtagggttggggtaagcattgcccttgcaggaggtgaagaagagaggctgtgggtgttgggatcctcttgtgaacagaatggggtcatgcttaggccccagcaagcatttgcagctttggcagctgttctggtaccttctcctcagtctcaaacccaagagctctgggcagggttctatgatctttgcctccagcttcttctctttgagcctcagcttcctggtccagagagtgggcaccattgcacttcttcttgccagggccgggggaagctccaagtgtgcaggagtgctttgtaaactgtgaagctcgggttccaccccaccccccgtctgccttgggccaggtcctgaccctttctgcggctacagtcggctgctgtgggtcccaggcttggtgctctccccacagcgggaggacgatctggtctccccggacgcgctcagcactgtcagagagatggatgtggccaacttccggcgggtgccccgcatgcccatctacggcacggcccagcccagcgccaaggtgaccggccctcagggcctgggtcccccagtgggtttggggagggagggctgagcactcactgccggccctcctgtgcccaggccctggggagcatcctggcctacctgacggacgccaagaggaggctgcggaaggttgtctgggtgagccttcgggaggaggccgtgttggagtgtgacgggcacacctacagcctgcggtggcctgggccccctgtggctcctgaccagctggaggtgaggccccctgccctctaggcacccctgcctccgaggcttctggggagtggcctgggagggtcttcagaaggcctcacactcccgcagacagatggagaatctgaggccccgggaggagcagtgtcagggagtggccaactcaggattcccactaaagtgctctgctaacctgcttggctttggggggtggctgtgacccctgaggcttgggggggtcagggatgggactggaagccagggccaggcctggccatggcaggctgtggcctttcagggctagcctagagcctgccccagtggcctgtgtcctccctcctgcccttgcccagaccctggaggcccagctgaaggcccatctaagcgagcctcccccaggcaaggagggccccctgacctacaggttccagacctgccttaccatgcaggaggtcttcagccagcaccgcagggcctgtcctggcctcacctaccaccgcatccccatgccggacttctgtgccccccgagaggaggtgagggtgctgctcaggctgaggcctctggggagggacaggaggcctccctgtctcccctctggtctgggctctgggagaatgaaacgaccccagcttctctacggggcccgggaatggtctcacgaggttttccgatttggcccaagtg

SEQ ID NO: 5267 - DNA, 2300 bp, Homo sapien
cagcctggccatcatggtgaaaccccgtctctactaaaaatacaaaaaaaaaaaaaaaaaattagccaggcgtggtagcgcatgcctgtagtcccagctactggggaggctgaggtgggagaatcgcttgaacctgggaggcagaggttgcagtaagccgagatcatgccactgcactccagtctgggtgacaaatcaagacttcatctcaaaaaaaaaaaaaaaaagaaaaagaaaaagaaaaagaaatgagaaatgaccaccagtgggtataggttttatttctggaaagtgatgaagatgttctaaaattgactgtagcggtggctgtacaactctgtgaacatactaaagccattgaatcatatacttgaaatgggtgaattatatggtatgtgaattacatctaaagattgttgttactaaagaaaaccatatacatggtgtctggtgattgaacaaattacgcacttgttgaaacttgtgtctctgaggaaaaactctgcttaatgcacattcaagtgtcaagtttcagaaggacagctgtcatcagttaaacgagtcaaaaacagtcatcaccctcaatgtcatttcggctctttaatggatcccctaacaaccactagcatctcttgggcattagccacttcataagccacttgaaacctgccaagtgtacattttatcattagctggaaggatgtgtagaattccaaagtcctctctttgattttataggtgaggaaactaacgctcagaaagggggttgatatctatcgccgtgaggcatacggtaagtttctggtgaagctgggatcagaacctgtttagactttgcctctcttttcccgcagatactttgcaggacttctatgtccctcaaaccggccttcctgtcatggtcaggaaagaaactcctcacagcctcagcatccaagtcaggccatgggtgacagctggaaagtgatcaggaggctgcagtttctagaagagggtggggacactgcggagagaagatggggccagattccgagaagacagcataagcccctgttcctgtaagagcagggacggaagcagggacataaacgcaagggatgagccccaaagtgtgacccatgagacatgatgtcacatgtggtctggagcctgcggccacttcttcccatcatatacacagttatgagaacaagttgtgagaaccacctcctcccttacccagctgcccccaccccagaagccgtgtgattttgccccccagtgccctgtgagtcactccacccatggaaacctcaccccaccctgacctcaagcaaggcagagtgcagaagacatgtcctccggtgctaccagaccactctcaccagcacccacgacctcagcagggctggagccagcgtggaggccactggctgtcctcacaaagcgaggagcaggagcccctgttcgaggaacatgcttggagttcggagcctgggctagggtgggatgtaggttgagcaggaagtggatggcaagattagagcaacatctctcttctcccactcagggaggagggaatggccacaggctctgacactcaagaagggccaggcacagttccaagcacttcacaacaacccctagggtctacatgacctacaatcccaattgttcagtgaagaaactgaggcacagtgaggctgaagaaccctaccagtccacactgctggtgcataaccgagctgcccaagccccggcggtctggcgtgtaggcccatgctctgagccgccgcctctgcttgcctcttacatcccacacatgcgatgctgtgcatcagaagcaaggagatggccctgctggcctgttcatcaacaccagggccgagtctcaaagtcctcagcgccccgccctcctccgcctgtgtgccctgagtccccgagccccagcagctctactcggcagatgagcctctggccctgctgctcgcttcctgagggctgtcagtggggagccggatgagggctgaggacagggtgggtgcttgtgggaggggagagcacaaaggacctgtgaccacagctgggggcggggcaggaagtagaagtgatgtgagtggtggctggtgcaaggagccacagtgggctgcctggggggctgatgccaccattccaggagcctcggtgaagagaggatatccatctgtgtagccgcttctctatacgggattccaggtaaggagagagcagggattggggggcctggggccctgggtggaggggaagaggctgatggagcaggaagtgctgtgacctataag

SEQ ID NO: 5268 - DNA, 2300 bp, Homo sapien
agtgtaaaattggatacattggagcatggtatccatgcagtgttaaactgcagtgggggcatggctatgaccacctggatttcaaaggatgtcctacagaggcttggggcccagacagagaactatcatagatgtgagaccacttcagagagcccccactagggaaatgtctaatggacctgtggggttggggccacctcagaaatcccccactagggctcccagtggagccatgggggcagagtgaccctggagatgccagaccaggagagccaccagcatgcaactccaatctgggagattctcagggactggactccaatacatgagggccactgcgtgggtggtgccaagcgaagctgtggggacagtgctgcctggaagcatgacttccaccccagtgtgtgcagaaggtggggcacagagtcaaagattattttcaagtcttaagatttactgttgtttgctctgttgggttttggacttggtcaaggcctgtcacccctttcttctttcctattgctcccttttggaatgggaatgtctatctatgcccatcccaccattgtatttttttttttttttttattttttgtgagacagagtttccctcttgtcacccaggctgaagtacaaaggcaccatcttggctcattgcaacttctacctcccaggttcaagcaattctcctgcctcagtctcccaagtagctggaattacaggcgcccgccacaatgcccagctaatttttttttgtatttttagtggagacagggtgtcgccatattggccaggctggtctcgaactcctgacctcaggtgacctgcccgccttggcctcccaaagtgctgggattacagatgtgagccactgtgcctgggcccaccattgtattttggaagcacgtaactttttttatttcataggttgacagctggagagcagcttgcctcagggtaattttattttattttatttttttgagacagtctcactctgttgcccaggctggagtacagtggtgggaaccttggttcactgcaacctccgcctcccaggttcaagtaatcctcctgcctcagcctctcgagtagctgagactacaggtgcatgccaccacacccggctacttttttgtattttagtagagatggggtttcaacgtgttggccaggctgatctcgaactcctgacctcaagtgatccactcgtctcaggattacaggggtgagccaccgtgcccggcctgcctcaggttgaattataccttaagtctcatccatatgtgatttagatgatactcattttaaatttttcatttcgttttattttttttaagtgacagagtcccactgtcttgcctgggctggagtgtagtggtacagtctctgcagcctcgaactcctgggctcaagggatcatcccacctcagtctcttgagtagctgggactattcaagatgatattcagatgaaatgtagactggacttaaactttaaagttgatggtgaagtgagttaaaacttttgggggtattgagatggaatgaatgtatttcgtatgtcagaaggacatgaatttggggggcaccaggggtggaatgctatagttttcttttcttttctttttttttttttttgatatagagttttcctcttgttacccaggctgcagtgcaatggcgcgatctcggctcactgcaacctctgcctcctgggttcaagtgattctcctgcctcagcctcccaagtagttgcaattacaggtatgtgccaccacacccggctaattttgtaattttttttagtagagatggggtttcaccacgttggtcaggttggtcttgaactcctggcctcaggtgatccacccgcctcggcctcccagagtgttgggattacaggcatgagccactgcgcccggcctggaatgcgatatagtttgaatatttgtgtgtctccaaaatttctgatgacacccctcagtgcaatagtattaagaagtattaagagtattaagagagccccgccctcatgagtgggattagtgcccttataaaagggcttgagggagtctattagtcccttttgcctttctacccttctgctgtgtgtgtgaggacacaagatgttgtctatggagtagggaaagccttcaccagacactgagtctgctggcacctcgatcgtagacttcccagcctccagaattgtgagtaataaagttctattatttataaattacccatgctaaggccttttgatatagcagcaggaacaggcgaaggcagcactcgaca

SEQ ID NO: 5269 - DNA, 2300 bp, Homo sapien
cagcgaagcaggctgctggggccccagctgtgacctgctcctcttgacttgctttccttgaggcaggaacaagggggtggaatggagctggggcccctgagttttctaggggagtctttctgagatggccccacagcagaaaaggggcaatccttacgccatgactttttccttctgtcccgcagggttcccactctgcagcttggaaaactgagaccctgagaagggaagccattttatccagagatcatttggtgggcttgggtttgcagagggccagagctgtgaagctccagcctggtcatctcccagccttctctctctctctctctttctctctctctctctttctctctctctctttcctatctctctctctctttcctctctctctctctctctctctcacacacacacacacacacacacacacacacacacacaccctctaactttcttgctctgtcatccctcacacacagaatcctgtctggaccttgactttgcacatcatttttttttttttttgagacagggtattgctctgtcacccaggctgggtacagtggtgtgagctgaagctcagctcactgcagcttcagcctctcaggctaaagcaacccttccgcctcagcctcccaaagtgttgggactataggcgtgagccactgcacgcagccaacacacatcttaaaagaccagaaagaggagaaagaggaactctattcttcctgaatttaatatagatcaatttggttgtggcatttccaaataactggatgctctgatgtagcttggaatgcttggaatataatatactttagctttctgaacctgcttcttaaatgcactggtcctccaaaaccttggcatcatttccaagattctttattccatggttattacaaaaaaatctcctttccacaactcccacccctggattgcttgaaatatagtttatttgcaagttattagttacatatttacagagtaaagcaagagcatggatcttctgttgggttgtttgtactgactcctgacctggtctcaacaccattgcaagactagcatcaagtgctcatctctcagactcttggttctttccaccttgggatgccacagttgctactggtgtcagggatggaagtggagggcagttatcacttattgagcatctattatgtgctgtagttaacacccatttcacagataagacaactgaggctcagagctaggatttcaatcagggctgtctgactctgaagccagggctctctcctcaccggctcagccctgctcttggctaggacacaggtcagtcgtgcaccctgggctggagtctggaaaatgggtagatccaaggggtcgatggttagtgagggcatcaagaccatagtgaaagaaagagggagtctccctctaccgggaggttcactgtccaccacactcccaaatgcagccggacaccccttgggctcctggctctggaacagaaacagagagcaggccctgcggccaagaaagggggcggagcagccatagaaagcggctttgggccaccactccggggatcccaggcgtctgaggggacaatcggtccgtgcgccaggaacccctgctctgtctccgcgtggcacttccgatccccggccgcaggcagctgcactccccagccgcgcgccccgcccccgggcgcccggcgccccagctccgacccgcgcccggccccgccccgcccagtgtgcccacccccggcccgtcccgccgccccgtcgcccggctcccgcggagtcccggagcgtcactgcgcgggcgggctgaccgaccagccggcagttggcaccgggtgcgctggcgcgtcagtggccccgctctccagccggcagcctcgcgcgcccggagccagcggtccaggcggcggcgccgcgcaggggacccggagcaggcgggagggaagcagctaggcggggaggcggctgaggcggcagcggcggcagccagccggtgctccgacagcccggggcgcaccctagcctcgccgccctcagcctgggacttggggatcgggcgcttgcccagcccgcgtcccagcgcggccacatggctccactccgcgcgctgctgtcctacctgctgcctttgcactgtgcgctctgcgccgccgcgggcagccggaccccaggtgcgtgcgggttgggcgcgcgggggcccgtggggtccggggtgcacgcggtcagggtggcccaaggttgccccagccacccgggcagggttcccgcgggtgggaggcagtatgcaca

SEQ ID NO: 5270 - DNA, 2300 bp, Homo sapien
tgagtctcctgttttccccctggtacctaacataatgctgcccccaactcctgcatagaaagtgttcggagcttgtttgctgattgactgtgggactggagggaggcattgtggaagtagtgtgtttgcaggcccgggtgttctctggtttagaggggcgctgataaaccctgggaaactgcaggccaagagggaagccatcaagccctaggatgtgagggtggcttggcccaggtttgtttggctgcaggtgggactttgtgagcatctgtcttcctccaggaacgtccccactccaagcactgaccagagggctgggctgggcacagacctcagtgtgtcctgcctcacctgccctccacctcgctctccaccttttctttctctcttcggcagggtatgcacccgtcactggcatgtgtcaccccctgaggagctgtgccctcaaccatgaggatggcttctcctcagccttcgtgatagctcatgagaccggccacgtgtaagtggcagcagcacggtgggtgggactggcagctgtgccgtgagctccagggaattctgtggctgtgggaggatttgcccagcttggcctggttccagtgtcctgggaggtgtcagaggagctggactgccactgcggcatggcctcctgcagttaccagtagagggaggccctaacctgagttaggaggagccaaggggcatgagtagtaatttgggcctgccttgggcccagcctccaaatcccagggccataggggaccagatgtggccctgcctttgggtgggtcagtggcagtgtccccatcacacgcagaggcctgctctctctgggtggtcttgatctctggcttccctccatcacgtccacatttgaggcctttctaagacttgatccagcccaccctgatactcagcactcattggagtgctggcctgagcccactgtaaacaggtgcacttagagcttaggcggtaggccaggcagaggctggcttgcctgatcttagggctttgggttttgtttagagtgtgttcattcattcaatatttcttgagcacctaccatgcaccgggccccattctaggaatgaggctacagtggagatcaggacagagaagccctcaagaggctacatgctgggtggacacaaatgagctactgttcagtaggtcatgccatgtcacaggggcagaaccaagagacaccatcagccctgttagattttatcccagctctgctcctccaggcaggtgggacctcctctccacacctgcaacatggggctgacaccaggggaacctctgaggcccctccctgtggagacacaaggtcaagcttataggcctgtgtatctgcctagcaatcaaagccagatgcagccatctgggaatgtttaagaacttagaattcttgggatttggcattaatgactaattgtgaagagcaaacttttaaatgtaaactcttattatggtaggtgcctaccatgtgcaaagctctgtgcccagccttgcagagtcttggagaggctcaagaggcaggcgctgacaggggctcaagaaatgaggttgagttgagttgaatgaaacctggtctttgcactcaaaggccctctgtgggaagccagcgaatggctatgagtttttaatggtgggatagatggctcctgctgtggaggtgagcccacaggtgagacagctaggaccagtggccgagtggggcttgatctggccttggaagctgtaagaacatgggtggagctcacagaaggggtgggtgtctgggagtggtgaacagcaggagcgaaggcttggagggcaggatgagccccgtcccagtgggagcagccttggagagaagattggtcctccccactacgtggttggaaaactgaggccaggaagagcgatctgagctccgggtcaggtcagggtctcctgctgctggcctgcctgcctgcctgccttcccggggcaggctcctgggatgtatcaggactcctctgtcttccccattccaggctcggcatggagcatgacggtcaggggaatggctgtgcagatgagaccagcctgggcagcgtcatggcgcccctggtgcaggctgccttccaccgcttccattggtcccgctgcagcaagctggagctcagccgctacctcccgtaggtcattcctgccctcagagctgggataggggagcatgcgacctgccactctgagcagacatcacacagctggctggcttccccacgttgcccctggcttgactcttccgtgactcatctcgcctc

SEQ ID NO: 5271 - DNA, 2300 bp, Homo sapien
tgataaactgggttatgttaaaattaggaattctctttatcaaaagactgcatatagacacagacaagcaagacacaaaggagagaatatatttgcaacacaaataactaaagatttatctgatcattaatttctccatctataggattacatgaggtaatatatctaagaggttggcacagtgcctggcacatagaaagtgttccatgaagtttctattgcctctgttatgactgagtcatccaggccaaggactgtacctcaaatcactctcaggctgacagatctctctacagtttttgacactccacaaaggagtcagaagagtttcctcagttcttcttttacaaaccagtgttgaagacatttcctgaggaaccccttcatccccccagctgcagtccctatgcagacccccatgctcgattgtaaataacatagttgaagcattacaaggcaccagtggggaggatgagagtgggttttcatctcagctgagtcagctcgcgtggtgggaaatgccacaagagtgctgaaagcaggagggaggagtggcttgtcacggggaagaaagcctctcttctcccaaatgctatatcatctatcttcacagctgccaggatgcccagaagtatggaagagggggttttcagtatgatttcaaaagagtcaccgtattcctgcagagacaggcccagaaaaagccagggaacatcctgacctgccgaaggatgggtgggcatttggagtaggccaagaccagaggacagccctcagggggccaccagagtggtatgaatccccaccccttagctgggaggggcagaacttttgaaggacttgggtttgcctctagctacccaccttccttttcttgctccccagagaaaagacacagagtctggaagccccagggcaccagtatgaagccaggggtgctgagagcaaaggccctgggaaaagcccacctcatcattctgagggacagcacccggcactgtctgcaagccttcccatagtttacagagcctgtctgcacccctcccgggatctgattgagttacagccctgtcggctaagaactatccttacccccatttgacaggtgtccaagttgagcctcagagaaatagtgaactacctaagatagttctcagacaaaggactcatcctactacctccatcaagttaccaataataatgatgattattatcctttttgagcatctcttgtgtgccagacatacaactaaaggcttcacttccattagcttgtcttcagaacaaccacagaagtaggtgaggatatcccattttatagacccagagaaggcaataatagtaagaaattatacttgggggcagatactgtttgaaacgctttaatatatatcaactcacttaatattctcaaacatcctgtgagaataagtgcagtatcatcatctccattttagagatatgggaactaaggctcagagaaggcaggtgcattgtctgaggccacacaactaggaagtagcagaatagggactcgaagcaaggattcttcccactattttgcatctgtggcagtcccggtgacttacccaaggtaacgtgtctatgggatgttgaaatctgattaaaacacctgtccaaatgcaagcccagaatcttcccacccagctgtcatgcagagagaggggctggggtccctctgggtaatgcgggctgccatcttctctccttccaagacccacctccctgagaatgggtccccagaaccaagatgcatggaagccgacccctgtgtggtggggtcaggccaggtggggctgacgaagctgggacgcagcccaccaacgtcctctgccagcgttccgcctccatccgcttctctctggctaaaaccagccccagactctccttctctcccttggcccccattgaaagtgttggatgggaggcagcagggaagtcaggagggacagaaggtccttagcccttgtctacccttccaggagggggagataggcaggggatgtggtagaggggtgctgggcagaggttctggagttgtgggaacagggtaacctagcaaccactgggctcagtgtcacaaagcaggcagacttgcccacagaacccacagccttcccctcgatttgtcctcttgctccttcctgctaggacagcagggcttctcgtacacatgctgtagcgggcactgccttggtgagtccagggacctctcgggagaggagatggaccctggacagcccagaagggcagaggtagaaagggaagttttgtggctg

SEQ ID NO: 5272 - DNA, 2300 bp, Homo sapien
gagagcagggtggtctgaagtctttctctctctctttctctctctctctctctctcacacacacacacacacacacacacacacacacacacacacacacagggcttcatcggctcagagagttgcaaacccagacccatgttctaggctgggctctgccaggaactgctaggagtcgcatctctctctggacctcagtttcttcacgtgtatttgtgtattctctggggtggagctggcgaatagctggagacccctctagccctaccattttttgattctaattaaccaaaaaggatattcgaggtccccgctacaaattctgaacccttggcttcccctccaaactcccacacaaactccaccccatcctgcctgtgtgtctttgggaggatcatttccttctttggtcttggtgtccttgtttacaggttgagggatgataagagtcacctgatctgggcaagtcaggccataaataaggcttgtatgtaaaggtgcctagcatagttcttggcaaagcaaggatcagtcgatatgattgcattggtttgagcatctgggaagaatgagcagactgcatactgtgtgttagggtgtagggaggaatcagacgtgaccctgccctctagtcatctgggtgcacagattctagattaaaggatgtgggggtggtaactaacaaggagatggagaggaggtgtgcagttcctgggggatctgatgaagaattaaagcagaagggtaggagatggagaatgggaaggcatacctgaaaccctaaagcaactcttgatgagtaggcattggcaggaggccccagaacattttctgaccctcaaacactgagaatgcatgtctgctggggaatagtagtgagggggctaagggtatgggggtgttcatgcctgagtcaggggctctggatggtagaaatgtctgggagttctgacggaatgggggtgaggaggcctaaagataacctgttcatagtctttcagggccttaaccattatggctggggaagtgggaagtgccgatggggtatgcagaggagggcagctgtgatagtacatttcatcctgaaagcactacatgtggataatgacggtagtgatgatgccctaattttagtgtcatggcaacattttccaaggggatggaattgggtaccctcattagtgtcatttttgtttgagagatttcaagagtctatctaggtgtcattttaaaatctattgaaaaaaaatcttgaatgcaggtcactgaccagttggttccatgtaactgcactgccttctgctaccactaaagcaatgttatgacaacctggacaagtcatgggaaacctatgtgagacttagttttttctttttctttttggagttgggggtctcactatgttgctcaggctgatctagagctcctgggctcagacaaccctcccgcctcagcatccccaagtgccgggattaccgatgtaagccactacacccagctgagacttagttttttcatctggaaatgaaggcgacctttgtgatcccagtgggcccttgcacttgtgtataaggtgattcccagcactgctcatgaaagtagtgatggcagagtagcctctgctctccattttatttttggggtgggggggggcagtggtggaggggaggatgaggatgatatttccattaaataagtttccttgttgcttttcttcaggcaccactgacctcgatggaaaaatgaagtccctggcccaggaaagagacccaactctgtggctgttttggattagtttgtacaatgccctgcagacctactctctcaggaggctccaagtgaccaaatgtgacaagaaagttttttgtccaaggcagtttggaagagaagttggtgaccgtcgggataccacagccgccccaggacggcctggttgagacattcactggagggtctgggtgcagcccgctgcctggccggtaggcggcgcgcacaggccgtggggcccgggtctgggcgtgcgcgcggctggtagcagcggggccgcgcacgccagggtccgggagccgggccggtgcccccggagccatttccgggaggggcgaggccggcggctgccgggcctccaatctcggcggcggcggcggcaacaggggagcctgggtctcgcggcctgcgagtccgtcgcgtgctgagggagacgcaggaggtggagccggccgggtgctcgagggaaggagactggaagctggttccggcgtgaggaggtggaggggccgccgcgggctccggggggcggt

SEQ ID NO: 5273 - DNA, 2300 bp, Homo sapien
gttcaagaccagcctgaccaacagggagaaccccgtctctactaaaaatacaaaattagccgggcgtggtggcgcatgcctgtaatcccagctactcaggaggctgaggcaggagaattgcttgaacccgggaggcagaggttgcggtgagttgagatggcaccattgcactcaagcctgggcaacaagaacgaaactccatctcaaaaataaaaaataaataaaaataaaaattagccacatgtggtggtgtgcacctttggtcccagctacacaggaggcttaaggcaagaggactgcttgaacagcccaggaatttgaggttacagtgagctatgatcacaccactgcactctagcctgggtgacagagcaagaccctgtctcaaataaataagcaaacaaataaataaaaattagatatatataaaaggtcctcctatagctctgatagggccatttattaagacctgctataccatttcttgctttagggattacatatgactttttagaactgtggagatgggcagattacttttccagaaatttttttagtacatctttcatgcctcagaagcatctaggggaatataattgggagttgggtagacaggttcgaagtcagtgattgagtcattagatctagatggggtttgggccttggaattccatttttattgttccatctatgattctgatctcagtaagaaccactgatccagtgtagccctcttcttttttgaagatgagaagactaaagcccaaagggttagattgcattcattataaggaagactttgaatgattaaagagatagtgaccaggggattgtatgtgactgaatttactttttcttccttcatttatttttttgttttaagactggaaaatatcaaaggcatctttgtttttgggaatccccaattgtcagtcattgctctgggatcccgtgattttgacatctaccgactatcaaacctgatgactgctaaggggtggaacttgaaccagttgcagttcccacccaggtaagcttgaagaagcctctttcccttattttgctccatgattttggaagaacttgggtggtacagtaacctgaagtatagagtttgactgctagaggctagcacgttagtagcaactgtagtatataaaggatttctctcttgccacctggaattattagatacaaagaacaagaccattagctttaaactctggcagaattaggtgacagcctcctagaccagtggttggtcatgaggtttttctctcagtctctagcctttctactctccaatccatcttgtacacagccatcaaattgctcttataaaatacttgttacctggctaatatttagttcaagatcttcctgggggtctctaatcattcaggcctgctactgccttctttattagacttttctaacctaatcttccatgatgcctttgagtaaatgcaccactccaactgagtacaggtctgttcatgtcctctgtgtacagcttagccttccacacgttggtgcattgccagtcccatctggactatctttttccctcttcacaattccagtaaaccccactaaattcctccagggcgaggtagaatttcttctgtgccctgaagtcctttaagaccccagccatgtggccctgtccccatgagagcacatgggggctgattatctaagataaaagtgtctcattgatggtgacgtggttgaaggaatggtggtggaatttgtgaggggatgggtgggacaaagcagccaacactgttcatcctcttagcatggttctcagtcatgccgagaagctctgaggccagcccatgcctgacaccccaagcatgagagagccgagattcccaggactaggaacaacttggatgactacacttgtcagaaatattgtgaaagggcaaccaggaaattcccgtatttggggctgcatcattttagaacattttttctttcttcaaggttcatctctctctgtctcttctttcctagtattcatttctgcatcacattactacacgcccggaaacgagtagctatacaattcctaaaggacattcgagaatctgtcactcaaatcatgaagaatcctaaagcgaagaccacaggaatggtagggacacttggagttttttttcttctcttggaaatttaggtgttggtggagagtttgaaggaatcatatgacccggagtctgttcctgcctctgcccctttgccacagacatcttttatttgttgactggagctgatgatctctgcatcaccca

SEQ ID NO: 5274 - DNA, 2300 bp, Homo sapien
aaaataaaaagctggctaatgggaagtgtgagtatgtatgtgtaagatgcatatggaaatagtaccccctcacaccatgcaggagagaatgaggactggtgtccccatcctggacatcatctagaactattttgagatacacacccatggggggaattgctggatttatagggtatggatatacttaagttgcctaagaaactgcccacagcccagggagcaattagagatgttcactgcagcagcattgttgtttaactctgtgtacgtatgtgtttgtgtgcccacatgctcacgggcttgggaggtggtggtagcagcagaaagttgaagggaacctgagtgtccatcactgatagaacaagaaacccatggcagattctcattacaaaatactaggctgcagttaaaagctacagattgaatatacatatagcaacatgggtagatcttaattttccactaaatactctgttttgtaagaaacagactgagaaatgtaatatatttacataataccatttacataaatttaaaaatacacatagacgaaacaacaccacacattttgcaagaacctgtgcaaacaaaaatacacattaacacattagagaggctgctatgggcggtggtggggggcggggaataaaagtggagcacaagaataaaagttaatagaaaaatgtgaaatgtgagaggacttttctaatctgactctaagacttattataaagctataataatcaagacaaggtagtgttctgtcatgacagacaaacagatcaatggaacagaagaaagggctcagaaataaacccacatgtatacagtcaattgatattttacaaaggtgcaaagacaactcagtggagaaaggaataactgagtcgccatgtgcaaaagtgcatctggatctataacttgaagcatataaaaatatttactcaaagtggatcacagactaaatgtaaaaccaaaagctataaaacataggagaaaacttttgatcttgggttaggccaagatttctatgtgtacaacatcaaaatagaaatccataaaagaaacatttgatatattggatttcatcaaaattaagaacgtttgctctttgaaaggcaccataagataatgcaaagaaaatatttgcaaatcactgcctgatcatgtccttatatccagaataaaacaccctcaaaactcgataagaagacaacccaatttcttttttaatgggcaggaaattcaaacatgctattcaataaaaaaaacttatccttagcaaataagtacatgaaaagacattcaatacaattactaatcaaggaaactcaaaaccacaatgagatactgctacacaccaattaaaatttaaaaggctgactatatcaagtgttggtgaggacagagaactgcaaccttcatacactgctgctaggaatataaaatgatacaaccattttgcaaaacagtatggcagtttcctaataagttataaaagtccacctaccacatgacccaggcattccattcctaagtgtttactcaaggaaaattaaaacatacgtactttcgaagatttgtgcaccatattcgcagcagctttatttgtaatagccaaaaggtaaacaacgcaaatgtccaatagtgaatcgctaaacaaattgtagtctatctgtacaatgcaatactataaaataaattttacttagccataaaaggaagaaaccattgatataggcaacaacatggctgaaccccaaaacagttatcctgcctagtatatactctatggtccatttacataaaattctagaaaatgcaaactaatttatagtgacctaaagtacatcagtgcttgcctggccaggtggtttcgggaggaaggggttaccaaagggcaagggaaaacttgcagggatgatgatatgttcataatgttgatctcggtgatggtctcacgagggaaacattaaaatttatcaaattgtacacgttgaatatgtgcaatttattgcatgtcaattatatccaaataagagatttttataaagaaaaaaataggtattctggcgcccagggccacccagctgtaagcggcggggtgggattccaacccagaagcgggcatttggagccctcatgcttcaccctagctccctgaaacaagcacggaggatggctctgagcagcgaggaaagtgctggaagcaagcaggccgagcgcgtccctggctggggacgttaatcattaccggagggcggcccgagcgcggccccgccccgggacggcagcctgcg

SEQ ID NO: 5275 - DNA, 2300 bp, Homo sapien
gaagcaacctgtggtcacccagagggagagtggagagcccagacaggggtgtctagctcccaggagggcggcctcccacaccctggtctagggcattccaccctcactcccaccgccctccctctggttctgtccagaccatgccgaccccaaagcgttccccaggagaggcaggcatgagcattgccactcactgttctcactgctcaccttgggcatgcaaagcattcaggtgtcagggccctttctcactcatgaacatccaaagaggcctatgcctgctgtgtctacaccctcacccctgcaatcaggtgatgccctaccacaccatagaagctgctctcaccaggtcaccttcagcctcccaattgtcactctggactctttcacagctgccgcccactccccttggttttgggacacacagccccattccagcactgctccaactcttgtcccagtcctaagtggctctcgcccctgagcttctcctgcaatgcaaaccttctacagatttgtacccttggcctgcaaatccctcctcctcctctcctcctcctcctctccccgcggtcgctctgatccattcaccccatggcttctgagactcctctaggtggaccattcttcagcccacatttctagcattccctgagctacgaacagaacattcaccacactttaaaatcctgcttctccttcaagatcaagtcccgacttctcctcttccagaaagccttgcacaatgtccccatgtcctgctatgtcactcagggtgtcatgtcctcttctagctgtgatggtcctacccacacctgccagatggcactgactggatggggaaatgaccccccataggcagccaggcccatcatgtgaactggcactgagggctctgccccatgggcaatagaccatcagatagggctatgggatcgcttaagaacaggagttcaaggccagcctgggcaacacagtgaaaccccatctctacaaaaagaaaagctagagcaagagggcagaggaggagggtggaggatggagcagacaagtagaagaagagtcagagaccctggaggtgaggcaggaaggaggcggagaggcggcagggaggagtcctgagctgcctggctcctggctccatctctcctcccaataaacttctttatcttaaggccacctggatgaacctctggaattagtgagtaaagggttccagcaccccaaacagatgaatgcctttcctcatgcgggctcctccacaaacacagaaccctcggggtttcctcccaccactgccccagggccctctgtgggatgagagagctcgggaaactggcagcctgagacaccagcaacctggaaggccatgctgcacaggacttcatgggctcatggcccagcactggggcccattagggttagctgctgtggccagaatccagtctcctgtcccaggagcccctcccacctcacacccaagtgcacataggagtcgggccagttgaggcccagtcacggctcggagagaggctgcagatctctctggcatgttggggcaggaaaaagcctgggaagggtggcctggccagcatccatggttgacaaagaaggaaactgaggtccaaggagggtggctgaggccaagggtggagagggtcgggtggggccggcacagccctgtctcctgaaggaggctctgctgtttctagcgcatctcacagcctctctggggagatctagtttccttcctggtttctacacgaccttgggccagtcacctttgctctccccacttcatttcctcctgcattttaaagaggcctaaagctcggcatcggggatgtggagtggcgagagccaagccactgcccggaaccaggctgttgtaggggcacagggccaggtgacctttcaggcactgtcaggtgaccggcaccctggagggctggacagatggagaccagagcctggggcctggaccaagagatcagctcaggactcctcgagtacagggagggcttcagtgcccggctggcccaaccctctgccaatcccgcaggtgctcccaagcaaacctctccggcaatttttcttaacatatgatctcctgctgtcactccatcgccttccctcccaggtagttctggggctgggggatgtgtgagtgtgtgagtgtgcgaaagtgtgtggggtgtatgaaggtatgtatgtgggggatggaggcaggggctgtgtgaagatggggagtctgaagatgtaggctgttggaaggtgtgtgtgcaagtgtgcgtactcgg

SEQ ID NO: 5276 - DNA, 2300 bp, Homo sapien
ttaaagccgtgaaacctgatacttggactagaagggcctgctgggtacactttaccacctaaacagcaaagttccaaggggtggaactttttagaaaaatctccaataccccactggcctgaaggagagagagaaagaggttggggagagagagagaacatgctgtggtctctgcatgctgcccgtctctgctgaggtccctgctgagctctccagcacaggcacaaccttgaccatgtgcctgcatccaggggatgaccgtcagatgtgggtcttggcacaggcgtgcctgtatgtgtttcctggcagtagttaagtatccaaatatctatttgtcttgggagtcatctgcctatttgtgtttttagttgtgtgcgcctgtgtgtttgctttttttaggcatacatctttggtatgtgggtgtctctggagtcgggtgcctatttgtaggtgtgatgtttatgggaggtgaaacattgcacctgttgtctttgttgtatgttttcgtgtgtgtacctttgcaggtgtgtatgggtgggtagttgtgtgtgtgcatgtgtatttgcaaggtggagttggtttgggtgtgctgagctgttgactgtctcatccactgcccttgctagggctgtcagaggccaagctaagcaacctacctttgcccacagcagcctttctcaattgatggaagttcttcccccagggagtcccagtccacctgttgccaccctcctgatgctgggtgcccagtcagagagggttagggagatgtgctgatggcatgcacgacctcccctagatactccaagaccccggcttgtgaggggagtgtgtgtggagagggtactagtcctgccttcacctcacctctggggaaacagctaggacagtccccttcgcacagcccaatccagccccagggaaggtgttcaagtgaggctcccccgtttagagggtttctttccaatcccatctcccccatcccctttgctcagtcactcagtcactccaagcagtgtgatctccggcaggtggctttacacctctgtgcctcaggtccttcatctgtaaaatgggatgtaaatggtgcttacttcagagggttgtgagaattaactgacatgatgcatacagagtgcttagccctgtgcctggcacagggaaggtctttgcctatgttagctgatccgctcgttctgatctctctgggtttcaatcccaagacactgcccatccttcaaacctcacctgtccccacgtgctccttggaccacctttgggtggtcaggactttccccctggaatcagactggctgggaggggagaatcttggaaagagattattgacacttgcactgcaatttccacacaagttttaaaatttaattctatacccccttatgaaatagttatccttttcctccattttacagatgatgatgaagggagcaatagaattgttaagtaacttgttcaaggtcacacagtaaataaggggcagagtccaagtttacactgagccaaaaatggctgtcccactgtcaggtaggaggctagtttacaacaacgcaggatcagagtgctggaggggtttccaggggtctggttaacagttctgccggagatcatacagacaagcagagccagccaggatgatcctaatctatacccagcttcatatcgctgtaagcccccgcgtaaccaggacttgggtgttctcattttgggagccttttttttggaaagacccccacatgtggaaggcagagcgcatactacagacaggggagccaaaagtgagagtcctatgtttaatcagaggagaaagctgacatggccaagccaaatgaaggcgcaaagccagatttccttaatttgggggagcgaaaattgggccgcctccacgtccagccattctccagcggccgggtttttcaaaacgctgcgcccagcgtctcgcgaggaccctccccccgggtcccccagctctgccgcggccgcgcccagatggccgtcggatcccccctcaaggtccccctgtcggctccgccctcggtcgcccaggccccgccccggccgcgcgcggtcccctcggttggcgaactcactccggcgagcgagcggcggcgctcggcattgtggcaggcggctggggccggctagggcgccggagccgcacgcagccgcggggctccgagaggcgcgcactggggctgggactgcgcggcgccgccgctgcgagcgccactgagcggtcgcgcaacttcggaggcacagcgccggagccaggcgagcgctca

SEQ ID NO: 5277 - DNA, 2300 bp, Homo sapien
tgcgggcctttcggagtgggaggggcagacacggccaagggagggaggagagagcctgggggtaggggggacccctggattggtagggaggatgcagcccagagaggggaagtgaattgaccaagatcacaacacagcagaattcatggccaagttgggcattcctgggttcccagccaggaacactccccagttctcaagatgccttgcctaactctgaaggagttctccaagtctgggggctgaggcagggcccagtcagtatgtccagaaggctgttgtcctggtagagttaaggaccattgcccaggcttgtgagctattctctgctgcccccttgggccctatgggtgggaggagtggagccacagctgaggtgacttgacagagttttagaaagaaccttgtgctaggttccagctgcaggcagtcccaggcccccatcactcccagggtgaccctggggaagtggcagccctttctggaccttctttgccgtcttacaatgaggtggggcatagacagtgacttcccggatcccctctggtgctgacggttacagcccagctctatctgccagttctgagtccctacactgtaggcaaaaggggtctcactaggaaggccaggcttcagcagaggggcctcgtcagggtgagggacgggtttgggggagggcagagggttccagagccaagccatccagttgacagctgccgccttgcagtgaatggcggctggtccagctgggcagagtggtcaccctgctccaaccgctgtggccgaggctggcagaagcgcacccggacctgcaccaaccccgctccactcaacggaggggccttctgcgagggccaggcattccagaagaccgcctgcaccaccatctgcccaggtaaggagccttgtccatgtccagccccaccccgaaccctgtcccaccttctgttttgtgtgccagagccgggacagccattctctccccagcatggggagcagaaggtgcttgtcccgagcccacagccggctgcccaggctgactagatgctctgatctctgaccccttattctgccctgggctgctggtgagatggaggcagaggctttgagggttagccccttctccctgaccctctagcctgggctcttctgccctccaagctgagggttctcagtgtcagcatgtcagccccaggccaaggtttcagagctccccggcctcagggacagcctgttgctcctgactgttaagacacaccgtggccacagaccctattcatactgacagtcctcctattcctctcatcctctgtgcagcccctctgctcccctacccccgcacatgtgctgtgttctctcccttgggttgtatgtttgtgcctacgctgtttttctttaccctgggtttgtgtctgtgtgtgtaaatcgtgcactgggctatatcgtgttgatgaccttatacatctatctgtaccctctttgtccacctgccaggtgcatctggctgttcattggcatggggttatgtggatatcatgtggatttctctgtgtggcacacatgtgttctgggttcctcatttccttccatggtgtgtatgcatgcatgtgtgttggcacattgctctgttctgcacacataactatgtgtgcacatgtctctgcgtgcacatgctcctgtatgccatgctcttacagtcgatggggcgtggacggagtggagcaagtggtcagcctgcagcactgagtgtgcccactggcgtagccgcgagtgcatggcgcccccaccccagaacggaggccgtgactgcagcgggacgctgctcgactctaagaactgcacagatgggctgtgcatgcaaagtgagtcacagggaaggtggggccctgggggtggggactctggagccatgtaagggtcccccaaacccggccccatgcctcagtgcccagcctgcagcacggcagtcctcagggcctctgtccccccaccacatccatcatctcatctcatccttcccattgccttctctgccaccctttccctgtcacctatgtcattgtctttccctttatttcccttgacagataagaaaactctaagcgaccccaacagccaccgtaagtcccatttcatggctgtcctctttcctctgggggatccctggttctctttggctggcttttcccgggatcagggtgcagggcagggagagctgaaggtgcctacccaccccccacgggatcatctacacctgacactgcatgtgtctgcatctccatcaccggcagacaggcaaa

SEQ ID NO: 5278 - DNA, 2300 bp, Homo sapien
catggtaattaaaccacaatttccagttagttctggaatcataaaatcagtgaggccctcggccgagctcactgggggtcgggctggggatgattcaagtgtaagtcaccaggcaagtggccccagtgtcagtgaaggcattaggaggcagagccaagctgggggaaccatttctctgctgaaccaggagcccagccctgaggggtcctctggggagcccaagagtgagggctgctgaggagagatacagggggacagaagtcggaagtgggcagacatccggggctgggagccatgccctgccttgctgaaagccttaggctgacgccaagtgcagggtgtggaggactccaggcagaggaagcagggctacttctctgagggccccccagggaggaagtgcgtggacaggtgcttcctggagctcccaaaggaagcaaggggaagagcagccatcttggccgccatttttgctctccctgaactgcccagtgtgaaagccgttcaaacttatacttagcttaattaaaattaaataaatttttaaattcagttcctcagcggtactggctacatttgagttgttcaggagccatatgtgactagtggctgcatacgggacagtgcagccataggattttctaccactgtagaaagctccaccagacaaccctacttcagaccctgccactttgaccttgaggcttcccgcctggccatgtttgcctgggggaggaaagtgtagccgtgggttgcctccctgggcccatccttcttcccacatgctcacctcttctccaccgcattgttgtgcatctcattccacttcttcagctccccgtccctccacttcccaccctcagagcatggaatggaagaagagttcagaacagctacttacaaagataacagagccagaagaccttatctacatacaaagataacagagccaggacctttggtcctctggaaattgctacagactcagaggtttcagccccagcactcacagggcaaattatgtagccccagtgactctgagccacagaccctgtctcatcagcagcaagcaatgaattaacacatggcatgaacatgtttgttcttttgtttctcatgccacaactaggagggcagtaaggcagggacttcgagcccattttaccgatagagaggttcaaggctagcccgaggttgccagcctgtgtaggcagggctcagactggaactcagcaccgggccggttggccctgggccctgccctttccagggacccagggcctccctgattgccccagggcctggtctctgctgccccttatgtggtcctcctgtccccgcagtgctggaggcctcaggggatgcggcgctgtatgcggggctcgtggtggccatcttcgtggtcgtggcaatcctcatggcggtgggggtggtggtgtaccgccgcaactgccgtgacttcgacacagacatcactgactcatctgctgccctgactggtggtttccaccccgtcaactttaagacggcaaggcccagtaagaacccgaggatgtctggggtggttggcagaggcaggatacccagagggctctggtggtacccagaccagagccaggctcctgactccctcccagggtttttccagagtttgctctagagataactatgtggatgggtatggattagagaactaccgagaaggaagggagtgacccaggctgcgggattcccaaagcttcctgcagctggcagcaattgggcctttcacagctggacatttgggtgggattttgcagtgggagctgggccagtgagctgaggcacagctgggtctgactatagcccctactcctgcaggcaacccgcagctcctacacccctctgtgcctcctgacctgacagccagcgccggcatctaccgcggacccgtgtatgccctgcaggactccaccgacaaaatccccatgaccaactctcctctgctggaccccttacccagccttaaggtcaaggtctacagctccagcaccacgggctctgggccaggcctggcagatggggctgacctgctgggggtcttgccgcctggcacataccctagcgatttcgcccgggacacccacttcctgcacctgcgcagcgccagcctcggttcccagcagctcttgggcctgccccgagacccagggagcagcgtcagcggcacctttggctgcctgggtgggaggctcagcatccccggcacaggtgagcccctgccctgcttgtgcgtcagcctggccttagcacctcctctg

SEQ ID NO: 5279 - DNA, 2300 bp, Homo sapien
aagctctctatggaccggtgagtatcccaaaccacagcccatccccatctgccttcgtcctcaaggtctcacaggggcaggcagggcaggcagcctgacagccacgaccatctcccagaccagctgcccttttgccaccatttgtggcaaatcagcaactcaggattggatatgcaaagttcaagaatactgctcccttgaggagcatcatgctcagagcactggtccttgagccaggcagactctcagaccctgctcttttcccattgtgtggggataatgctccacctgcccatctcaccgaacagcaggagactcaaagccagggcatcagcttggtgccatcattgtcagcacctggtatctaggacagagaatgtgctgcgagatgcttgctgactgaccaagatacactttggtgtcaaaactcctttggagaacctcaaatgctggataagtgctggataaatataaggccaatgataataaatattatacttattgaaagatgtgtaataaacctgcattgagtctcaaaaaataaataaataaaatatgctttagataagacattttactagaaatgaataggacttacaaagatggctaaggctttattcctcctatcaggggagttcatgggagcaggagggaacacgggtgggaggaatgaccacatgctagacgtggtcattctctcttggggccagtgtctttcaatgataataatgatgatgatgaacaagatggttacatgctagagacaacgctagacccttactttatatgatcttggatcttgctgagcggtaactggcattgttcccattttagagacaaggagactgagattctgagccataggttctgaattgccgagagccacacagactgcagcacagtagctgcaattcagacccaggacagtgggacaccaaagctcacagccttcccacttccccttgtgccccttcacctccaggctccggggaggggctaagtgcttgggaacctcagtgccctccttccctctgccaggtacctgaattactttgccaccaaagcgagccccacgggtgtgatcctggacctctgggaagctctgcagcaggacgatggggacctcaacagcctggcgagtgccttggaggagatgggcaagagtgagatgctggtggctgtggccaccgacggggactgctgagcctcctgggacagcgggctggcagggactggcaggaggcaggtgcagggaggcctggggcagcctcctgatggggatgtttggcctctgcttcctcccagttcacagccagagttgcctctcctcctcctcttccccaacccccagaccatgaccagccttagaaaatccatgtactctgttgttagagggcccagagttccttctccacccccgctctctctctcttggcctgagatctctgtgcaggaaccaagatggggctgaagcctctggaggcagttggttgggggcgggcaggcaggaggccctccctccacccccccaccctcagcccggcaacttctgggttccatgggttttagttccgttctcgttttcttcctccgttattgatttctcctttctccctaagcccccttctgcttccacgcccttttcctctttgaagagtcaagtacaattcagacaaactgctttctcctgtccaaaagcaaaaaggcaaaggaaagaaagaaagcttcagaccgctagtaaggctcaaagaagaagaaaaacaccaaaaccacaagggaaaagaaaaacccagtttcttaggaaacgcaaacgatttattatccagattatttggataagtcctttttaagaaaaaaaaagaaaatgaaaaacaacacaaaaaaaatagaaaactcttttcttgagtgtggatgagaatgggcacgctcacacttctggccaggagtgaatgtgcctgtgtgtgtgtgtgtgtgtgtgtgtgtgtgtgtacatgtacgcgtgtgcattgaggagagagagactgaacagagagtactttgctgctaacgaatccatcttggactaaattctgacaaggcctcagtttccccagttgtgcagggagtaggtcagacagggttttcactgtctagatttagctggttagattttcctctaaaatcttaagcagatgctgaatccataaagccaaggagtgctgagggctggagtgggtgggccctccctcccacagccccagggagatacatctggactcctgggaatctggattaagaaagttgggatgaaagaggaggac

SEQ ID NO: 5280 - DNA, 2300 bp, Homo sapien
gtgtcctgaaactgtctcactcactcacatacatgcacattctccaaagataaagataacaatgactacaaacaactcaggactctgcatgaagtaaaagcaatcaagtgacaaagcaccggagcttcacagacatgggtcatggtcttggggctggaccagaaatagccctgatctgctgccctcactgaatcctacggctttgtccctcgtgctgtcccagctcccctcagcctcacctgcctgcctgtaaccgggcatgacaaaaagagccttggctctgggttctgccactccatcactgccagctgtgtgccctgggaagccacttgacctctttgagcctggctttcctcatctgtaaaatggggacaacagtcccatttcactgggtactggggtgggggggtggaatcaaatgggagactgttcatgaaaatgctctgtatattagaggatttttttccaacgtaaagaggctaaaaataaggcctgatgactaaactaacatatacactatcacattttgggggtggggagtgtcttccttggaagtgatggaaatttgcattgagtgcctggcatggatcacctgacttaattctcccgacagtcctaagccgaccctgggtttcagagaggtttagtaattttaccattatccctcagcttgtaagcctggagctaagccccttcctctcctgggccggggggctttctgacaatttagggtgctagtctccaaactcgcctgctggtggagcttgttaaatagatccattctggatccccattctgcaccccctgagtgatgggttgtattaatccaggtatttattgaacacaaattatgtgcccacgatgagggaagagcaaacaaagcagatacagcaccaccctcagggattggggagtggcagcaaccctcctggggagaggtccccagaatctggatgtgtactcgagacttttatgatcaggccagtgtttggggaatggtggttataaaatgagaggctggggcagggagtggggatgttctgagaacctgtccacacactgacagcctcaatgggttctgtggcacccctgagccctgggatggcaactgcaagaatttactatccatggtcacagatcttcaggccctgtgaagcatccagatccccgctctgaataggccaactgggccaggaccgggagtcaggaaggtttccgcctttttttttttttttttttttttgagatggagtcttgctctgtcgcccaggctccaggctggagtgcagtggcaccatctcggttcactgaaatctccgcctcccgggttcaagcgattctcctgcctcagcctcccacatagctgggatcactggcacgcaccaccatgcccggctacttttgtattttcagtagagacgaggtttcgccatgttggccaggctggtctcaaactcccgacctcaggtgatccgcctgcttcggcctcccaaagtgctgggattacaggcgtgagccaccgcgcccggcccctgctttcttaaagaacacgcggcagctgtgtgttacacgctatggctgaggtcaagtgtgagggctggaattgctgactgccatgttctgggtctactgaaaatagctgcctggcctgggaggcccagttcagtccgggtgtgggtcccgcttcacctccagagcagcggcagccggtaagggtagaagcggcctttggagaggggtctctgcagcggcctggggacaagatgagggctcctttgagtcctggggtgcaggttatagtagctaaaggggaggtctgagacagtggggtctggctccaaggtaaagaaggagcagcaaccaaaaggcctgatgcgcagcgcacccatcgcaagcatgggcagtgcgtttaagactgggtgactcactttttctcctataaaatgggcgcacgcaggccccagctcagcgccagaagggggagccccggcgcgccggcagaagacaaaggaaaaaagcgtgtttgcaaacggggaagcggcggcgtgctgccgcgaggggcggggcggggccgggggaggagcccgcctgccgcctgccaagcccagtggtcctggccgtgcgccggaggcagcggcggcgtggcgcagcggcgacagtaagtgcgggccggctcgggctcttccggctacggtcccggccgcccccagactcgcgctcagcgacctccctcccgggccctgggggcggctgcgggctgccaggggagccgcaggaccctaccccatccgtggtccctt

SEQ ID NO: 5281 - DNA, 2300 bp, Homo sapien
ccacctgctggctccagggtacatgctaccccagcaggggagaatgtcctggtcgtgcagagtccgttcattcagcaaacattgacaagggtgcctgcagtgtgcctgggcccctcccgactcactggcttcaaggcttgcaggaaggatgcctgtacttggaaccagcagacacagattcccattcccagccagtcctccccggtgtgctgaggagtccagcatgggccccagtctgcttggctgtgtaacttcactcttgtcatctactagttatgtgaccctgggcaagttactcaacctttctgagcctcagacccctctgtgaaatgggtcttagagtagtacctaatatattaggctgttgtcagcctcaagtgtgacctctgttaggcacagaccttggcatttgtgatcactggacttaagtttagctattgggagttctttctatttgtgggacatagcaagtgccttccagacctcagtttttccatctgaaaaaagggggcaatgttttctgccctgcctaattccaagggatgctctgaggttctcctgaaatagtggataaggttctgcacccatgtgaggaggtgttcccatcccaccagggaataaaggccccagtcttcttggtacgatgctttgagttaggcttagcctcctatagaaaccaagatgcatttatttattagtttattgggtggggaagaggctactgcagaagggactctgaagtgtcccatcctcagcattttggagacatttctcatttatcaagctgctgccacatcctaggtgctatgtagagcaaagaagcaggcatgctaccttacagccaaattcagcagccagccagccagccatgcgacaggcccaggatgccagggagatgctgacatttgttcaacagctgcttataggccaggcattgccagccagttgcagttgcataactatcataaaaacagcttctctgggtttacatttggggaaattgaggcacagaaatgtggtaacttgcccaaggccatgtaggcaatagttgctggcagcctaggctcttccatttatcttaggcgctaccatagattgaaagtggctggctccttgtagggtgtgatgagcagaggtgggacccaggcaggagctgcaaacccaggcttggccatttacgtggcctatggccttcagttctttggacctctctttcctcacaaatgaaatgggaatggactgtcagaggctacacaccagcttctggaggcagccctggacactaccagttttttaaacaattattacttaatttgaatttttttaaatttacacttttaattttgtttttgaaccggtaataaactagtcacatagttcaaaattcaagagacacaaataagaatgcagggaagtccccctccccgccccccaccatcccagtttccctccttagagacagccactgttagaaacttcttatgtagccttccagagatattctgtgcatatacaaatacatatgtgtatgtatattttctctccccactttttttacacacatagtagcatattctacacaccatcctgctccttatttctttcacctgaaatcgaaaagggtttagagatcattctttgcccattaagggtcctaattcttttttatggctgcacagaactgtgaatgcccttagaccaggtttgcctttctgggtacattgccacagtccccactatcatgcagtgttttacaaaacccagcctgttccacagttatgtgctactgctacctctgttgcccttgcatggttggggtgacctctgaggacacttacagttctgacatcctgcccttctccaggtctgatttttgtctttctccctgatccttaaaatgaagctctccaaccaggctttggtgactttacagagcccagggtgagggggcatggtcattttgtaggctgggtgggtccccagctgtcccccagccttggtttctactcacctaccctgtctctgttgccctccttgctccaatagtggccgttgtctcagaggacgactttcagcacagttcaaactccacctacagaaccacaagcagcagtctccgagctgaccaggaggcactgcttgagaagctgctggaccgcccgccccctggcctgcagaggcccgaggaccgcttctgtggcacatacatcatcttcttcagcctgggcattggcagtctactgccatggaacttctttatcactgccaaggagtactggatgttcaaactccgcaactcc

SEQ ID NO: 5282 - DNA, 2300 bp, Homo sapien
tgtgctggcagacaaaggccccacaccccgccctcctccaggacatgagtccacgcctctccccagcatcacctctgtgctcctctgctcgcatcttgactacagccagagtccatttgcagctccctgaacatgcctcactctctctcccaagacacatgcacttatatcctcccattcgtcgttaccatccagcatagacattgcctccaaatggccttccacgatgcccagggtgggttttgtgcccctcagatgtgctgtgtgatgccctggggcctcctgatggagcacctaccacagtgagatgacatatctgttgctggtctgtcccgtgtcctgggcatccagcatagtactggacacacagtagttgctcaatgcacatttgcggaatgaccacaccattgagtacacatgttaacagactgagtgatgggctggggctcagcacacctgggttctcatcccagctccctacagactcactccacaaccttgaactgtcccttcatttcttgggcttcctcataccccttagaaagcagtgacagcacctgctctccctttagctgaggaccagagggaaactcaaattagcctggggccacaaaagcactttgaaaaaattcctttcttgcttttcttgctcatcatttcacacctacgtgtgtgtgtgtgtgtgtgtgtgtgtgtgtgtgtgtatttttcctacctttcaagtttttctttttttaattaaaaaaaagtatgtaatctggcttttctcccagccccctcccactggttagcaggaaaattaactacacatccaatccggtttaaagcttagtctaatctgatgatttaagcagccccttgagatgatgttcttgcttcctagaataaaaatgtgcagcttctcagatagaatccttccctgcttttctccccaggccagtatgggggctgggaagagtacatggctcatatgcaggcatggtgctggggagtgtgggggttcccttggccccaggcagcactaacttggcatcacctgctccccatgatgactgaggccatcacaggaggatgcccctgccctggccaccacttctgtgccatccatatttcctcactccaggggaggcagtagagcatcattctgagaactgaccagagccaggcctcctgggttcattgctgagtgactttgagctagttcctcagcctctctgatgtcagcttccttatctgtatacatgggataggtacgaatacctgtcttacagaaccggtgtaacaatcaaacacactggcatacagaaaatgcctagaagagtgctagaaaagtatgcattaaacactgtttgagtgtttgctatggcgacgatgatgatgaagatgacgacgatgattttctttccttcttccctttgcccccaaacctcctgctaagttttggggaaaggaagctcagtgggtggctgctctgtttaaacactagacaaagccagcaggagctcagccctgtggcaggaagagcaggggtttgccttgaacatcctggtgtcctcgtgtccttgaacctcacagcaaggtgaaaagcagcagaacccactgagcgctggccctgagccaggcactgccgcttgcaccccacactgctcacctcttcagcctcacccccctgtgagttgaatcaactctccccattgtacaagttcaaaagctgaaaccagagcaactgagtcccttacccaaggccacacagctagggagccgggaaggcaggattcgagtgcaggcctcttgactgcagagtgaacagtcctaactgctaagctcgcctgcttcccttaaggtggctcaccagccccagcccacacaggagccccgaaggggtgtctaactgcttctggcatcctcgccccagggttgcagtccacatccgtgtcctggcctcactgacggtcatcctggccatcttcatggtgataactgcactggtgaaggtggacacttcctcctggacccgtggcttttttgcggtcaccattgtctgcatggtgatcctcagcggtgcctccactgtcttcagcagcagcatctacggcatgaccggctcctttcctatgaggaactcccaggcactgatatcaggtgagagccagggtccgggcagctgaccaggttcatccacccaggagtcatgggagggagccagagatgagcatgtggtggccttttctgaaaaggaaatggcatgggtgctgattgtgtttcagtcatctagtgttgtagaacaacaacggtcattt

SEQ ID NO: 5283 - DNA, 2300 bp, Homo sapien
cggtgtgctcacccctggtctagaaaatttcttggcacatagtatttgacaaataaatacttttaattgaagcagtctcttctcatcaactgttgcctcccaatcaattctctctctctcttatttttttttagatagagtcttagtgatcctactgcctcagcctcccaaaatgctgccattataggtgtcagccaccaagcccggcctctgaagctttcagtcttaggataaagatcaactcctgattaaggccaacacacctgcacagtctggcccccactccattgtggctttacagtcactgccaaggactagagggaccactcagtgactcggatcagagagggggtgcttaaagccaacagatggtgcaggctcactcaccctcccaagcttcccaggagcgtttcctcgtacgctggaggcacggagctctccccaccctttctggacttcctgacatatgccagctccttcccacctttgcacaagttgattgcgactgcggtcaccaaaccattgttcctggcccagccgttgcctgcagtgggcacctggggcctttgcacatgctgtttctcctgcctaaaactccactctctctcccttgctcatccttcagctcagtcacctcctctaggaggtcttccctgatcccctcggccaggcgccattaaagcactcttcttcctagcactgattctggctgtaattttacctgcttatgtgtttcattgatgaatgtctggttcccctactagagaagcttcatggggcacaaagaccaagcctgttttgttctccatcctattcctagaaactatttcagttagctagcacatagcagtgactgtgaatgaatgaatgaataatgaatgagcgaatggtaaggaactggagctttggaaccagatagattctgggttcaatacccgactccaccacaggggcaagtccccaacctcctaaagcctgtttctcactgtaaaactgggataatggcagggcccaccagaaagactttattgaagatagaatgagttgaggcccagaaagtctcagcccagagcctggctccaggcaggtactgtcaatgtactgactggaacagtgacagctcggaaatcctgtcatgtgagaaatagttttaaaaaatcagaatgcttagccccggggaagtaaagatcaaaggtaggggataaacctcttccattacctgcatatggaccctttcttgatccagctgtctcagaaagccataaagtctctgtccctataggtgtgcaaaaaggagccgggagaccatgactcgggcactgcagacggagctcccgcaggggtgagggcgcctaagtgacctcacgggtctcctccaacccggggtcctccatttctaagcacttggaggcctcttgagctctagtgagggaggaggcgcagatgggagcgcacgagtcgggtgggcaaaggcagctggttggagagaagcgtaggccaagaggccccaaggactagagggactgctcagcgactctgggagcagagagggggcgcttaaagccaacagatggcgcgggctcacctaggccgagcgcccgctcgcccgcccgggcttcccgggagcgttacctcgctctgcctgaggcgcggggcggacgagacgctgggggccccatccccctgcgcgcccctctgcgggacggctggcggcctggcggggcactgctctgtctcgcacctggggcctcttccgcgggcttcctccctgcccctttgggggattcgtagagttgccacagcagccggtgccatgacatcggcagagggcagcttcgccagcactgaaatattcatgccctgagcgcccggcggggctcggcgccgctcccgggggtccgggcggggccgggcgggagctcgggggtcctggcggcctgaggggtgggggagcgccgagcgcgggcgggcgggcgggggccgggcgaggcgggaggtgagggagggagctgcgggaggcggggtctggacggcgggggccgagcggggcgggggccgagcggggcgggggaagcaagggaaagttgatcgcggacttgagcggcggcggcggctcgggagagagggacgcgggctgcaggcgcgatgcttggctagaggacgcgtccgacggcggccggacgctgaggtggtcggggctagtcagcccggcctgggcatggagcgcggggtggcagagcctctggacgtttggggcgcgcccagtccgagcccccggcgcgcctgaagttgcgagcggc

SEQ ID NO: 5284 - DNA, 2300 bp, Homo sapien
gagattctcggcctggcattgcgggcaacagtgtcagttcccagccaccactgagctggtaccaggatggggaaattgaggcatcctctgggaacaagctgctgagagccatgggccccagagttacagctgggagcctgacaggatcactcccctttccccaccacagagtccagagtgggctgggcaggggcatttgtggcatgaacaggactgcagtcacaggtatgggacagagagggcctgtgccaggctagacaaaagccagctgcctgcaaaagcctggttatggcaaatcagagccactggcatcccctgtccaagaggtcaggggacttgttttgagcttccccgctccagccctgggtgcctggtggtcattcaggtccctagctgggagctctccccatgggcagtgcccaagcctgccgtgtgggccccagtcctggagcctgggaggctgcctgccgagaacctctctgctcacctcctgcttccagaccttcctctcccttgcagcacccactcccatccctaaaggccctcccaccctctcattggctgtccctgaggattcctaaagacaaccagccctcccttctcctaggcacagcagctccatctctgcaggccaggaggaggcaccaggcttcttggaactccaggaatgccttgcttcattcaagtcaccccagacaaactaagggagagctaacctggggacagtcgctcctcaaatcttagctcagagaatgttcgagcctgaggggccttagaagtcattcacttgagccccttcatctcacagaaaaggacatcagattcccagggggaaaaagaactcatttgaggttactcagcaaattaagagaccgaactgatgttagagccccaagtcaaaactgttagtggcaaatttttatgtgaaaggatctgagtttgagttctggctacacacttagaagttgtatgactgtggacaagttactcagcctctctgagtctctgttaactcatctgaataatgggctcatcataactacagatgcgagtgaagtgcccggtagagtggctgccacgtcatctgtacaaagcactgcagttactattattgctggctattgttattcagttgcagcaggctacttaaacagtagaagatagatttggagttttctttcttgccaagcattaaaaaaaaattttttttttgagatgggggtctcgctatgttgtccaggctggagtgcagtggctattcacaggtgcaatcttggtgcacaacagcctcgaactcctgggctcaagtgattgccccacctcagcctcctgagcagctgggactacagatgcatcgttgaggttttatacaatgaaattcccaactgacggtttaaatattgcttgcctggctgcagggggatggcctgtgtgacctctcaggagtctttctcggagtcccccagatgtcacagaccctggagctccccctgctggttggattgggaaaagtcactgaaccagtaaatccccagcccaaagcaagggactcatgaatgcagggacacaggtgccagattaatcccctctgtggcctttcttctgaggagtccccatctttgtcaatcctctgctgccctgggatgagtgggggcaggaagtgggcacagagaggggtggtgacctccagctgaactcagcaaaggagctgagggcagcaccatatctactccaagctggtcatcccaccaccggatgtccaaggaagtcaggcctgggctactaggggctggaggtctagctgtaccccagccctgctttgtaacactggataagctgccttcctctggaccttggggatgctgtttgtgttttcctgtacagctcagaaatcaccatggcttcttagaattcttaagcttccttttactaagcccttccctgctggagtgcaagagcatgggtgtgtgtgtgcgtgtgcatgtgtttgcacttatgtgctgcacggtgcaggtctgtgtgtgtgtgtacatatgtgtgtgagtgtccccaccatcactcaacctaaggctgtgtgttctctccgctctctaaggatcaagacaagaccaggcctctgtccaccctggccaacttggccatcatcatcacagatgtccaggacatggaccccatcttcatcaacctgccttacagcaccaacatctacgagcattctcctccggtaagactcctggcccttccttctcagaagtcccttctcagagggacttccttctgagctcctgttagggatgggc

SEQ ID NO: 5285 - DNA, 2300 bp, Homo sapien
ggatggctacaggctgaatccagcctaggatgtgcagggagctgggggcagtcccacctacccagcatcccaggcctcaaagcctggaagggagggtccacagggggacattcaggacatggccttcccaggggagcacagggcagtgctgatggacagaaacaaggggtgcccactgcagccttggaggccacataaggtttcagtacatgaagaagcagggagggcacttcaggcagaggcaccagcccatgcaagggcctggaggtgggaaagtgccttgtgtgcacaagcatgcgtgcatgcaccgcagctggcccatggagtggcccacactggggaaggggaggctgtgatcaggtagggccatgtgtggaggcctaaacattggccaagaagtttggtctttggtctctgggcagcagggagcccttgagggccccagaggggaagagtggtatgatgagacctgtgccgccgggtgctcctggtcctcccaggaagtttgcagtgagctgagtaagaagggaatgaattctctgggcctcactctttccaaccatcaatcccttcccagcccgcccatgcccagatgcctctgccctctgccctgctctcctcccctcctggaatggctgcccaccctctggagacttgttatcacccctgagtccagccctcactttgggcattgcctggcaggaggagagggcttctgccagccttctagggagcctcccacacacacaccaatcccagccagagcaataagccaacccccaagggtggtgggaggctggtctggagaggagctttggagggtgagaagacctacctccagtgagcgacagcactgccacgtatggtcagctggcctggggaagaaggatggcgtcaccctaggtctccaggctactccagctgcctgcaccaccccctggggtgaccactcttgcctggacatgcagcgctggttacaagctccttcctccagggaggacaacccaagagctgcctggggctgagtcagtgccccatcctcaccacctcccagccctgggagggtcctgtgggaactggagggacagagtctccggggaccttaagcttagatcccaagcaaagcccgtgttcctgaatgcagaggggacgtttgtttgacctatccaatattttataaagaatgaccattagttgtgaaagtttaaagatcaggagattttatttaaaagctcagatgttcaatttctcatgagaaatcagaagatctggtgtctctgggcccacattctgcctgtccgctgtggactggagtggaggacagctgcccttccagcggggcccatccaggtgtttgacccaggtgctatacccgccagtccctgacagcagttggctttttgctcttagtacctgtatctgcatcctaaatttgccacgacaaactaccacaaacttaaaacagcagaagtgtattctctcctggttctcaaggccagaagttagaaattaaggtgtcggcagggtcacgcttcctccaaaggctctagagagaatcagtccttgaccgtcccagtttctggagtcgctaggcattcggtggcttgtggcagcataactccagcctctgcctccatctgcatgtggcctcctcctctctgtctcaaatgtccctctgcctttctcttgtaaggacacttgccattgggtttatgggccacccagctcacccaggatgatcacttctcaagatccttaacgtaattacattttcaaaggcccttttcccaaataaattaatcttcacaggttcccaggggtttaacatgggtctgttttttttgggagccatcattcaatccacttgagtgcctcagttacctcctctgtaaaatggggatgacagtaaagtgtctgcttcatggggttgctgtgaggactgaatgggttagaagaatggctggcacatggtgttatctaagtatttgatactgttagtgttattcctaagctaaaaaggaagtcaccccttgcaaaggctagggcagatggggcggaacagggcacctctctggccggtgcccgggagtgtgcaaagtcacaggaagtgtgcccctctctcaggcagctgctaacacctgtcttccttcaactcccacagacaacggccctgtagggaagcgacacacgggcacagccaccgtgttcgtcactgtcctggatgtgaatgacaaccggcccatctttctgcagagcagctatgaggccagcgtccctgaggacatccctgaaggccacag

SEQ ID NO: 5286 - DNA, 2300 bp, Homo sapien
gggaaacagtgttagctgaagtagaggcagctggggaggctaaggaaggaactaggaccccagtctggagtgaagggctcatgcagggacagcagagggctgtggttggaagagtggaatgacagcctcaatcagcagcactgatgccctggaacctccacaggacagggagtatagacatggtggtatgaaggcagagcgaggagcctgtagcaggcgctggcctcgatgcacatccgggcactgcggtaagtgtgtctaaggattctgatgagcatgttgatggtggggaggaggacgagtacactggagcaaaaagaacaagggccctgggtcaggcacacccaagcatgaatttaggctttgtcacttactctctatggcactatggataagtactttagcccccttgagcctcagttttctcatctctagactgggcacaatgatgaccagccttgcagggttgaggggaagatcagaagtcatcttgcaaagcgtcttggctggtgcctagcatggggatgtgtggtgaaggtcaacatgagtgatgccaccttctccagagagccctctggatttatgccagagctggggatggctggattgccccttgccgtgcagttctttctctctccattccctgagaaaccttaggagctggcaggtggagggatgtaacagggtgcttcaattgtccagatctggaagggctcaggatggtgaagagagccacgttgcccagagcatgcccttgcatgcctatccatggtgagatttccttgatgcctccctgctccagcagcctgcaccaccctggaagctttgtcttctgtcatctcaggaggaatgggggccacagatgaagtgttcagttggtttcaggagaggaagttaaggaaaatgaaggcagtgaatgctgtgatggaaggtgcaggaatcccaatggggactctgggcattgaaaacacctttgggccggatgctttgcctaccctggatgcctactgcctgcccctgcccacccagcacaggggaaacaccaagtcccccaccactcacttgctgggtgcccctgggcaggtcacacctctctgggcctcagtttggtcatctgagagaagacgggggctcttttctctcagaagaggagttagatgacccctgaggacctctccagctttaacagtccataggaaatctcttgtccatcttggggttggcagacagtgcctctttttatgggcaagggcaggagggaacagctaaaaaccagaaactggggctccaaaaaagggaatgggtctgaggctcaggtcttggacagggccatgactcctgtcttgagttgcatttctgggagcttggaggtccctggtggggaagctgccaaagacttgggctcctaagcaggcagctggttgtcagggaagctctggcttctggggagaaagaaggctgggggagggaagtgtgtgtgtgtgtgtgtgtgtgtgtgtgttttggaaagagcctccagtggaggtctcccgtggcccacccgcactgtggggagcatggccttggaggtccgtcagtcctatgctttctgccctgggatccccctgacctttgaagatgcccctcacccctcgcttctgtagccagacaccttcaaagggaaggtgcttttctacaagctgagggaaaagcctggaaggaatggggcccagggacgctgcaggaggggcctcaggggctgccagggaccagcactctccctgctcccctcctgccatggcttgtagcccctctccagggtaacctggtggctggcaggcactgaatagcgaacctctggctgccgccgaccataccattcaaacttccgacaggggaaggtgagcgccatggggccgcagaggcagtaaaaccctccccctgcgtctccccagagtcttccacccctgagagggctccaaggagacaggctggagagaggcggtgggaaggccagggggcatcccagagtctctggacagctcccctctccctcttcccaacccagttgccatccctactcccttagctatcccctcccccaaggcagggcccaaactcttctagacaaagccaggtccagctggggagtgacggggaggccactctgctggccaggctgaccgagggctgcagggcacagcagagcctggcagggctggggtcacaggcactgcccagggctccttgggcctcccttccacagctgagaagacctctccacggagctccggacggctggggtctggctctgaggtcag

SEQ ID NO: 5287 - DNA, 2300 bp, Homo sapien
gatgggtgcagctggccccatgttacttggtgacagcaggggcactgaccaccagagtgtgctgatggacaggctctctcctggatggagagtagtgaccggtctaggcacttagccagtggtctctcagtccaagggaggccaggccccacctggaggatgtagtgatccagctcttctctgtccaggggcctggccacaaacacttcgccaatggagtcattggtggtgacgatctcaaaggcccccgcgatgttgccagaggccagggagaagaccacctgtggggagaagagagggtgaggggtgagcaggtgtggaggagaggtggccaggtcaagccaagggggactccctggtcctcctctgcccacgtgggccctctgttgagcaagggcttttgggagtgcagtgttttaagcagaagtgattcatctccctcaaaatgggggtgcaggcccatggaggtagtgtagcacccatggaaagttccggggctaggagatatcagtatcctggcctggaagagtggggcttgagtcccatggcactgacgtcttcccagggtagaggggattgtgctcacgctgctggggtgggcacacgctgcggcattacctggactctacttggttcttacggcaaccttgacagaaagcaactgttctcagttcacagagaggaggctcagaaacatggaacaaccagccaaggtcacacagcttgcaaatgccagaggtctgaacctacacacttttgtctccaaagccagcatccctcgaccccctagaccatgcaagccatgctaacacccgcaaacacacggcctaatgcacggaacagatgaaagctgtgtgaacactggcgggtttcatcacttctccctctgcactctggggtgtccaaacctggagcgacagcaagcgcctcctgccatggggctgggcctaggaagcaggagagaggacgagcatgtcctctcagggagctggggctgcgtgggaaggagttacccggaaaacaacttcactgaggggttgcgccttggctggccttcgggctccatgtccacatgacccaggcagggccaccggcctgcatagctctgaggcagctctgtcccttctccctgaccacagactgggtgattgcaggggcagagaccggaagaacctggtgcttggtgatgggggtggctcagaaggcccctccagctgtgagagctgtgggagccccgctgacatggtggatcctggctgtttcactcggtggcccacctgcccattgctgccagcatcagggtcccaggccttgacagtagccactcgctggcccacagggcagtcctcgggtatgctgaccgccgagtcggaggtgaagtcaaaccgggggctgttgtcattctcgtccagcacagtgatgtagacctgagggtgaacgtggtcagagacctacagcctccttcccctccttggccccaaacacctgggtcccaccgtgggtccagtagggaccagatccccagtgggttctggaacatcagcaaaccctcagagcccaccgaagcctatcctgactttacaaaggaggccctgggcccatggctcctagcagtctgattggtgtggggtggcaggtagacacacttaaatcttggctaggagggcaagggaagaggcctggtggggagactgtcagaggtggtggggacaggagaactgaaaagccaggccatggctaaagtggatggaggctaggaatgctggtctagcatgagcaaagcttcctgtttttcatgaaaaataaggaatctagattttaaagtgaaattggctgatgagtaataaaatttagagaagaatattatgtgtgggctgtccaaaacacatctggtggccagatattgcccgaaggtgtctttgtttgcaaccttgggcttagagggaaggaaatgggcccaggagcaggagggggctgcaaggtggcttggttccagtgggtagaagggcagatggggaaggcatgtgaatttctgactgtcaaataaaaaccgggcatgcaacaaatggcacgcaagagcatattgttttgtgtctgtggctcgggcttcttgtggagaggcaggagagtgaaggcctgccgcgggtgaggcctccagtccacggacggccacaggccactgcggctggaatcacaggtacccaggggttcactgatgagggtgtgaggggggttggaggagctcaggttttaggtatcccaggacaggccttctcccactgccctgccccaggccagac

SEQ ID NO: 5288 - DNA, 2300 bp, Homo sapien
ggtctgggcttggggagggaaggtgggtttgacttcctctggtctcggagggaggagaaagtcagtgctccaaaggccctctcagctgagcccttcctgtcctgccctggtgttgaggaaacagtgcttgaggtttctggaccatggtccttgggcaatgcctgtgtctcaccctgatgcaaccccaggaggctcagtggtgggcagtgtggtagggagaaaggaagtgaaaaggggggagggaactgggcccagctcagaggctctatccccctggggaaggggttggcagggcaattgctcccctttctctaattccaggccctccccggctgctaggccctggggaagagggagtctggtttcaagggtgtcctgagcaaagccagtccaggaagggttgagatggggtggtgctctaggatcttgcccttaagggacccccctcacttgccagaggatgtcagggtgagaagggcccggtgtccacctgatctcagttggctttgtacctcccctggtggaagggagctcatgctatgccagcaggaagggccctgggctgccttccaaggtggggtcacaaggccaggagcatgcccaaggacctgggttatgtcctgccagcctctggggctcccatcctggggagttcactggctccagggggactgggcctgcacaagttcacttagtaataacatgatgcctcagccttcctctgttgtagccttccctgcccttagagcaagggctaagggcctccagagagcccgtgacttggatcaggccacccacaaggcccccaggactcctggctcccattgagtcctgataccctggttcctgacccagtcagactctgagtgtcctctgcctctcagcctaggagtcacctattaacccaagatccctaaagtgccagaaaaacccctggaagcttcagctagactggggtaaactgagtaaaatggctgtgctcttccactcctgtgatccctggtcctggccacgatcacctctgctcctccatcacacaatcactcactcactcattggtttgtccattcagataaaagtgcagtaaaaccttctccacgcccagctttgtgctagggtctcagaaacatcagagagaggtttgtagtttcgctctggagggcagaacagccggaagaagaaccaactgctggttatctcaggctggaggtggtagctgaagggggtgtggacagtaaggatttgccgggaaaaaggaagggtcaggacatttcgtgaagtgggaggacttgagctgagccctgagggatgagaagaattaggaggggagagacattccagtggtgccagcagtgctgggtgtgggtgcaagagcagaggcactagaagttagggtgcatcagagtgtcctgcagatatccaggcaccagggagggagggcgggtgcacagccaggcggacagctgaggcctctgccggaggggagcttgcaggatgtgctgtggggcacgccaacaggtgttgcctgcatatctgtgtgtgtcccggggtagggatgtgctgatcttggcgtgtagtcctgcacctgttctgtgtgtgtgtgtgtgtgtgtgtgtgtgtgtgtgtgtgcgcgcgcgcatgcactcagggtgcctcaggctctgaatctacagttaaactggctccagcttgcctagctcttcacaatgtcagatttcattcattcactcatttactcactcattccacagctgggagtgcctaccacataccaagccctggtctggctggaggatgtagggtacaagtctctgtccccagatcactcaaaggctggtggctgagggcagatgcaagccatggtaacgtctatcacgctgttagaggtagatctacttcttaggctgcgcagcaataataatttctctccaaaaggactgggggacggtagaacgggctttaaactgccgatcaagtggagctgactcgctgggacgcacgctggctccccacccacggggccggcctccgggaagcccctcccacgcggccctcggagaggcagttcccccacacggccccccgggggcgctgcgcgaagggggcgggtgcctggagcacggcgctggggccgcccgcagcgctcactcgctcgcactcagtcgcgggaggcttccccgcgccggccgcgtcccgcccgctccccggcaccagaagttcctctgcgcgtccgacggcgacatgggcgtccccacggccctggaggccggcagctggcgctggggatccctgctcttcgc

SEQ ID NO: 5289 - DNA, 2300 bp, Homo sapien
tcccagctcccagtcctgtctcctcgctccctgcttcccccttctttctcctttctctttctttgctgttcccttgctactctcttctctccccctcctctggagggaaaccagaaccgtccttctcttttccatctctccccttgctttctttctctgcttcctcatcctcccttgagcagctcctctggccttcctgattccctcgccctaccagtgtatgagagcacctatctcaccacatcatgccagtattaaatatgataacattttcatgttggcaattttagaggaaagtaataccttgtttgttcttttgttttttgtttttgttttggctttttttttgagatggaatttcactcttgtcacctaggctggagtgcaatggtgcaatctcggctcactgcaacccctgcctcctgggttcaagtgattctcctgcctcagcctcccgagtagctgagattacagacatgtgccaccacacccagctaatttttgtatttttagtagagacatggtttcaccatgttggccaggctggtcttgatcatcctgacctcaggtgatccacctgcctcggcctcccaagtgctgggattacaggcgtgagtcactgcacccagccgtgataccttgtttaatatgcatttctttactaactaggtggctgaacactttcttcatatgtatgctggccatttaaatcctctgcaagttgcatgcgatcaatgattttcttacactatcacgaaaccaagagaaccatggcttatctttcacaatgtatgtagtttattgtaatgctgatggttttatcattttcccaaaagttcagtgtttttctcctttgaggagttaggaaagggacatggagctgatacgtgtacttcttggaaggcccagaggaatgatagaagaatcaacatggctgtgacaaagcactaaaacagcagtaagatatcagtttttcacacgtgattagtggacattaggatgctggacaatgttgatattggtgaccgtgtggggacatggaaaccctcatgcactgctgtaggagttgtgactgattccactgtctggatagcaatccagcataagggacacttgtaccaccattacccagtatatgttccagagaaagtctcagggcattaatgaaactgtctgaggatgctcactgcagtgttattggtgatggtggagttggggccatgcaggtatccatttctgggagactgaagagtaaaatatcatgggtgtgcatcatgggggtaccagccagcagtgccagcggtgagaagcaataaattagacacacacagagcaatgtagatggatcctaataataagtatttactgaaaaggataataaatgggatgagatatatgccacagcaccatttccataaatgtaaaatacatacaaaataatacatgattttcagaaatacttttattaacaaaaaatatacttcaatacattacaatgactgcctgaggggagaagggaaggagagatgagtatgggaatgaaagggagtagacgcacacataaaacaagagaagtgccagtggtcatagtgtgcagcgagccaaagaacatgataaactcaatctgcatttgaggcccaaagggaaacagaagaaggaaaaaccatgagcactaggagaagttagatagaaccagctacatcccaggttagcaaaattcctggctgcatgggttggtcaggaccatggagagctgctccacgtccctactcaacttgaggctctgctcaatcccctactgcttttctctttcctgttcccccttcctccagctgactctcttctctatttttctttccagtgtcttctctgccccctcctcctcagccctccactcctcccttgcccactttgctaccttttcttcttgccagagcctcagcccctgagctctccactccaaatgggcttccacttgctcccctggtttccttcccagtgcctcttcccctccccactccctgtttccacccctccctccctcctcccaccccgtcagctctgagtccccaccatcctccctgccctgctctgctccatccctgctgcaccctgaactaactgatgttaaccctcttctctcttcctcatggctggcaggcccacaggtttgagctctgtttctctgtcacttcccacctcatctcttctctgcctcaccccattgccttcctccatgcccaccacacccccaccacccttcctgtcctgtggggcctgggccaaggccgtggcccagc

SEQ ID NO: 5290 - DNA, 2300 bp, Homo sapien
aagatgagaggggatgatctgaggtctctgagcgtccttttggcttggggtcctgtaacctctgcatggagcactgggatgctttgctcctccatctgcaaggagctgaaggatgggggatttgtcctagagccccagctcccttgctttttttgtttgttttttttttgagacggagtttcgctgttgttgcccaggctggagtgcagtggcacgatctcggctcactgcaagctccgcctcccgggttcacgccattctcctgcctcagcctcccgagtagctgggactacaggcgcccgccacatcgtgcggctaattttttgtatttttagtagagacggggtttcaccctgttagccaggatggtctcgatctcctgacctcgtgatctgcctgcctcggcctcccaaagtgctgggattacaggcgtgagccaccgcgcccggctagctcccttgcttttaaccagttgttgtgtggtctgccccacgcttctgcctggccttgggaagcccaaaggtggagcagccacgaagtctccatctggccactgaggccgacctgtgaggcgtccagttgagaccacatcttgtcccaactcactcagctgcctcacatggcccactgtggtgcatggggcacacttccccatctggctccccagaggaagtcagagctgtggtgggggctgggggcacttagggagattgcaggggagcagaactgaaggttctgaggccttagtccctggggttgttctccagagcggattgcagattggaggaagttggaggaactgtaggtttgcccttcctgggtcaggaaacctggcttcgggccaggttctatctctacctgttgtgtgaccttggataaacgtcttgccctctcctaggctcaatgtccctacaggtaaatgacctctaagtgcctgccctaaggggctaagattcccctcctttccctgccttgcggttggcaggttcttatccttctggagagggtcatcatcattctctgttcaggtcctggcaggggcagccacaggcagagggtctttgggtcttaatttctgaaggcttccatgtcacataaaacgttgattacataaatttgttatgcttttctcttaagctgtctcgttacaggagtgttggttgtgactcttatgatctcttatgatgggtgaggaatggtattacatctttaacggtaccacaatgtgaggcttaaaagttttttgtttttttttttttggtgatgggaatctctctcgctctgtggtccaggctgcagtgcagtagtgcgatcttgactcacggcaacctccacctcccgggtttaagcaattttcctgcctctgcctcctgaaatagctggaaccacaggcgagcgccaccacgcctgactaatttttgtatttttagtagagacagggtttcaccatattggccaggctggtcttgaactcctgacctcatgatccgcccgcctcggcctcccaaagtgttaggattacaggagtgagccagcatgcccagcccagacttgcctttgaccaggtgccaccacctgcccccacgtgcccctggccaggactgagccctgtaccctgttacacgactacttattctatgtgaaaccccaagctattctatgtgaaacccgctactacaatgggctaatttttttgtatttttttttttgtagagatggggtttcaccacgttgcccaggctagtcttgaaccctccgcccgcctcggcctcccaagtgttgggattacaggcgtcagccaccgcggccggccaacaatgtggagatttaaaaggtattttacatatataatctctgacctattcaattagtagggcttttcttttatgacctttcccttccctttctccaagttcttcctcactcctccccatagcccttcctttcgcccctcccattgccccctcctattggcctccccttcgcgcaggcgccctcagaggcgctgagtcagggcgctgttgagctcgggcaggcccggatggggcggggttagcgcctgcgctctggacggctttggggcagggcagatttatatctgcgggggatcagctgacgctccgcattgcagactgcggagtcagacggcgctatgtacgccctcttcctcctggccagcctcctgggcgcgggtaagccctgggaccctcatcctggggaggaggtgcctcgcagcgtccatctgccccagaatgggctgtgccgggcctggcccctctgctccccctgccctagttggc

SEQ ID NO: 5291 - DNA, 2300 bp, Homo sapien
ttacggagagtgaagaaagcctgaacataaggaatctcagaccatttcccactgcgatggcaaaagtcgtctaagtctctaagtatattgaaatcaaaagtgccattttcaggccattgggagccattgtccaattggtattgaggccaagtggtattgcagtaaaagataagtctcttagaacggacctctgaatggaggctgagagccttgagattgcagaggagacagccaaggcgggtggtcttgggatgggtagactgagaggctcccatagtgaatggagggtggggggtagaggaagaagagactgcagatgacaaggatggcgagagagggtgtcccctgtcctgcaggccttgtctggaatagaggcagccaccgagtcaggtgtccttcaggtctcctctattctggacaaggcccttgggtgaggggtgataggagagagagaggggaggggggagagggagagagagagagacacctctaaggacacgcagccagagcctgtccccttcctgggtttcggcaccaaaatgtaacgttagctgagagaaaggacaagagagagacccaaagttaggcgagtaagtttatcctgccgggctgctccaccacagtcagaggaggcagccctggagcttataaaatgaggggttcatatgggggagagagaccctggggttgtcggttaactttaccacatatcatctcgtgaccgcttacaatataggaatttagaagagggtgtaacttaagtttatccacatttctcgtgaccttccccatgctgcctgttgggctgtaagcaagtctggtgaccttgctgtagcacctagataagggtccaggaatgcagcttcggagtattcagggtaagggtcagctgcattgtgtgtggggcggggggttcctggggcaacttgtccctaacagggtcaggattagttctatctggttctctatttgctgtccatctgtaaatgctgagaatggcagagggaggccaagtgtagataatcaggttttagcttttttggattttcctacttctcctgtacaggaaataacttattgtctaaaccccatactatcccattaaatgtcaggagtgctgtcttaggcctgaattagctcatgacgttacgtactggaagtcccaggaggaatgcccagcaagtggaatccaagacgttctcgccttctcggggacagggccatcaccaggattcggaaaggaacagggaggttcggtttgtgttccagttctgagccctttacctcatccctcgagaagctggcctttgcaccccgcagccggtgctgcccagccgaccacgccatgcacgggaggcgactgggaccccacttgcctggcagcccggccggagacccagctgcctgggagggtccgaagataatgccaggcagccctggcgggccgggaagaccctctgtccctcccgtttcccagttcttgaattaggggagccttggactggctggcggcgcaggaaagtgcaggagggcggatgtgggacctgctgccgcccagggagacggtgctctgttctttggaaccagggaaaccgtcctccagcccacttgccccaggggggagcaggaagatcctctccgggcagagatgatggggaacccgtgcagccagagggtctccctggcaaaggtcgggggagggggcggccgtaacggccccgggcgctccggcacggagaagccaagggggttctccaagcagcctccacccaccagcctcgccaggagagcgtggatacccgagcggccccaagcgagtccccggggactggagggccgaggggcagcgcccggaacaaaggcccgcagaggggtcctggagacagcggctccccgggggcggctcccctctctcccctctctcccctcctctcctctcccgccagctcctccttctcctccccttcctcccccagaggcccggccggctcgcggcccgagcagcgccaacttcgccaacggttcccaagttgccgggcgcgcaggggtgggagctgggtggggtgaggaagaggaggaggaggaggagaagggctcccggacgccttggacgcggttcaggaatccgccgccgctagccggctcgggcctgagcggggagggcgccaggcaggacctctcgcaggctcgctgcgcaggacggcgcccgcctggcgccgcttcccttccagcgtgccgaccggccccgcagcgcctccatccctccggcccgccccggagaagacgcacagctcgggccg

SEQ ID NO: 5292 - DNA, 2300 bp, Homo sapien
ctgtctcaaaaaaaaaaaaaaaaagggaatagactcttctttctgcagctgtatttgctctagctgtaaacaactttgtagccaagtgcagtggcacacctatagtcccagctactccggaggctgaggagggaggattgcttgagcctaggagttggaggccagcctgggcaatatagcaagaccctgttagatattatctatttagataataataatgacctgtaatcccagtactttgggagaccaaggcaggtggatcatctgaggtcaggagttcaagaccagcctgggcaacatagtgaaaccccgtctctactaaaaatacaaaaattagctgggcgcagtgatgcatgcctataatcccagctactcgggaggctgaggcaggagaattgcttgaggcagaggttgcagtgagccaagattacgccattgcactccagcctggacgacagagcgagactccatctcaaaataataataataataatgatacatactatttcagtcgagggtcattttttcctttatccatctgttgttcaccaactgtgtatctcttgcctggcccaggattgagagataatgaggggcccagatgaactccctgtcctgcctgaagggatgttcagtattgaacaattgttgctttatggctttatgacaaagtcccaggtgctcatgataatctttgtacagtggtggggctgtagggagccctaacatagcctgggggaggctgcctagaaagtggagacctgaaggctgaggccatgttaaggatttaggtagaatttatgcgctatgatatttttttctttcgttaattttttataatttacgtatacacatggtaaaatgtgtaacaaggcacagtgttacatagcaaacataagcctcactccaccttctctctccacctacctgtccaccttctagatgcagccattgttaccaggccttgcgttttcctgcagccagagtccatttgtatcccgcatctatattttcttcccggcatttgtttctgaatgggagcttgctacatcggagtctctccaccttggatgatttgtcaccccccaccttcccaccccaggagacacttagcaatgtctggagatatttgatggttacagatgagcagtgggggccaggcgtggtggctcgtgcctataatcccagcactttgggaggccgaggcaggtggattgcttgcactcaggagttcaagaccaggctgggcaacatggcaagaccccatctctacaaaaaattttaaaaattagctgggtgtggtggtgtgcacttgtggtgactaagggggctgaggtgggaggatcaattgagcctgggaggttgaggctgcagtaaactatgatcgtgccactgcactccagcctgggcaacatagtgagaccctgtctcaaaaacaaacaaacaattattggcaattagtgggtagaggccaagactgctgtcaaacattctataattcacaggacagtccccacttacctggtggaaaatgtcaacagtgctgaggttgggaagccccgtcctgcataagcacagggtctgcacctttgtgtgtgtgtgtgtgtctgtgtgtgtgtgtgtgtgtgttctcatgtattttctggatcattcacatttatacatccacctcattattctttgtggccacataaaaatccattacctggatgctccaccattttcatttaggtgtttgcactctttttgctattataaacatttatgctacaaaggttattcttttccgtgcacaggcctttgatgtgtgaggtcaagggagaaactgatggaggtgggatggatgaacccgatggttcattagcattttaaatgacctattaaagagaccttcagtgtctctggggcacagtctgtctggagagtgggtctggggtcctggctgctaaccagggccgagatcctcaaaagtctggtggagagacatcctctgcattcctcgtgtacagacaagggtgttctgaccacctgtctctccgcaggacaagggtgtcccccacctgaagacggcaagctgggtcctgagtgatgcccctcagctgagtgtccaaggctggcccgaggagcccccacggccccacctttccccatggagaaaggactcactttgccccaggactgccgggactttgtgcacagcctgaagatgagaagcaaatacgcccttttcttggtttttgtggtgatagtttttgtcttcatcgaaaaggaaaataaaatcatatcaaggtgagggttgc

SEQ ID NO: 5293 - DNA, 2300 bp, Homo sapien
aattgtactgtactgtatttttatcttttaagagatagtctccctctgttgcccaggctggaatgcagtggcacgaccatagctcactgcagcctcaacctcctaggctcaagcaatccttagcctcacccactgcccctccttctcagcctaatttttttgttttgatagatacggggtctcactatgttgcctaggccagtctcaaactcctgggctcaagggattgtcctgcctcagcctcccaaagtgctgggattataggtgtgagccaccacgctcagccataaatgctgttttcgtgaaaaataataccaagggtaagaataatcagagtattgccagcagatggtgtttataaagtttttattttccattttcttaaaaataacatttgatttcctttatgcatgtgtggagtgtacttgtttccttaggctgagtaataggcagataaagacgacacgaggcagggtccccaagtggaggcggggcgggacgtgagaggatgggggcgcaggggaaaggcagggctggatgactcacgggactcttgagtgcccatcaacgcacacgcacacagtctaacactttgtttttcaattttttaaaagacatctaaaattactgagagatacaatttcagcagttaaatctacagacggaaatccaagcacttgaacacaattcctaactctaagctcagttattgcacatcacacagtttaagcaggcttcaggctggaaagcagtttgctctgctgggaacttcctcgggatgtctgggtctccttctgtggtgtctctcccctgggactgccgccagcccgcagcctctcgacgaccccaggtatcaaagctcagccatttgttctccccaggggctgagggctcgggctttggtgaagcagagggtccccgtgttgatgccaacggaccccaccccctccaaagtgaagttggaagcaggtgaagctcatggaaggctgaaggcaggcgggctggagtgaaggggggtgaccaccccccacgtgtgggacaacagggggcagtcaagatgccgccacccaccacccctcccttccaagctcccaggccatgcttccttctccatcacccttggaccctctctgagtggtctctcaaggcacatttattttctctgctgcaacctaccagatctgacatccacctcccccagcacccatgggccaaggaggcctggggcagccaaggggagttccaggaccaagcaagcaagaaaccgttctttgaacacatggttaagcttcttccagcatggccctaattcccctacctgcctaagccaggggagtgggggcaggaaggagcgaggcatcgaggagagggcactggaggggctgggtggcaggccccttggtcaaggtcacaaatcaaggagctgaggaaggaccgatctgcaaccttgctcatgaggaaaccttaaccttgtctaacaaaaagccactttgaggccgcccttcagctccacagggagctgctgttttgtctaccttttgaggggaccagtctcagtagggcgaaaggcagtgtgggggcttcggaaacaggcaaggctggacccctgcaatcctaccagaggctagttcagtcccttttgctttcttcctaaaacatatttacaaggacacacaaacgtgcacagccagaagacccagagacagagagagcacgtgtcccaggagcggagggtgacatcaagaggacaggggacacccttcctctgaactccttccttccccaggccccccagcatccttaacaacccccacccccaccccgaggaggaaagttccagaactccagctgggacaaatggaagagataggtagactccaatcctagcaagagcagaagtttcaagtagctccgagtcagaggcgcggctgcctcagagagcagagggctgatgtggaacagcatttccctgaactgagccggggctggagtggggaggtgaaggacagagagaggacaggagaaagaggggactgggggacctggaacgacgcgacacctcaacaatcagaactgggctgcggaatgggaagcagtttatggagttaagtggggctctgctatttcccccaagaaggactcggaagatgttgattccagggcagagtgaggggcagacaggatgaggctcttctgtaaagtccaacagacgctcacagatgctgggaggctggggactgccaggttgggagcctcacccagagagcctcactgcattgaccccacacccaccactcacc

SEQ ID NO: 5294 - DNA, 2300 bp, Homo sapien
atacaaaaattagctgagcatggggacgggcacctgtaatcccaggtactcgggaggctgaggcaggagaatcccttaaacttgggaggcggaggttgcaatgagccgagatcgcaccactgctctccagcctgggcgacagagtgagactccatctcaaaaaaaaaaaaaaaaaaaattgaaaaaccttttctttttcttcttttctgttttcttttgagaaagagtctcgctctgtttctccagctggagtgcagtggcacgatgctagcccagtgtagccttaattccgaggctcaagcagtcctctcacctcagcctccgagtagctgggaccacaggcatgtgcaacgtggctcattttttaaattttgtatagagatagggtctcgctatgttgcccacgatggtctggaactcctaggctcaagccatcctcctgcctcttggcctcctaaagtgctgggattacaggtgtgagtcagcacacctggccctttttttcttctttgtaaactaaaactattggccatttcctacaagttttacaccagtcatctggaaatttgggttcttcttcctaaatagcattactattggcttcactaatgggactggaatgttgttgattagctttcgacacaggactagtattgacccagcttgaaggtgctacagaaggcaagtcccactggagaagctacctgggactgtgggagccattttgaccctcagagtctggagacagctattgtcatattgatgggcatcttgacagcacctttccaaactctttattcagcaactttggtaactctggaagcccctaagatagcacaggaatgggagagctgtggtatctggtacctatctcctaagtgccttagagatatatagctagctttgctaaaaacgaaaacagaaacaaaaaaaaaaaaaacaacaaaaaactaggattgtaggattgagatggtggaaaagatggcaaattttgatgaatcttcagaactatgggacaccgtagccttctcttcccaaccagaggaaagactaactttttaaaaaaatgcccattatgcccacttagtatgtaattttgcttgcactttacagcagttttaatgatggtattaccattagttttagatagaaaataggtaattgctcaagaatccagccagtaagtgggattctgtcctctagtctccacgacagcaagccgtgctctctcactgtacagcgccaggacacacccaggaagaatgctttattactgtgagatgaagacgtcaatggccagggcctcactgcagcaccaccactaaatccaacagcaaaggaaacaagaaaacatggaaagggagctattgttttctgttttcccaacgagactccggcctgagccactgaggcattcagagttcccagataggccagattcagggtgacaaggaaccttgtaagctatgttttttcctactgattaagattatgttttttaaagcattttaaatttttattttatttttagatcacagcagctaagtctttttataaaaacacaatctagggcttgggtcccaaaagttcactaggttttgtcccatcagatgatgtttcctctttaatgtatttgtaatgtaaacctgtccccatttctgctgtgctcttgggactgtggccagcctccagccttccccgctggtatgtcaacatttaaatctacagccaataaggagggtcgcagtttcaacaaaacccgaaacacctcaaacaaaaccagcaccccaccccagccccccactccccggcttccccagtggcttattcaaactaacttgaagtcaaaaaaccataagcaaatatgccttttccaaatttgcagcctccaaggcagatgaaatggtcagacatttgccttttagggttgtcctgggaagagctgacaaaacgggtgacagcccctaaacagctgcctggggaggaggacatctgcctctgtttcaccagccactcagtgctcaggccttgccttgcgcaacgcggtgccgctggggagcaatggttctgagcagccagttgttatacggcttttgtcttaacgaagccacccattacggtagagccataactcgcaggaagccagctgtcagggctgtggcgcaggcccctctgggtgggaggcaaggggagaaaaacagtgtctggccaaattccctttccgacacctgagcctggctggctttgtaaccggagagttttgtgccctctcccccatcccatcttccccggggagatcc

SEQ ID NO: 5295 - DNA, 2300 bp, Homo sapien
ggcccattctgattggtccattttacagagtgctgatgggtgcatttataatctttaagctagacacagagcgctgattggtgcatttttacagagtgctgattggtgtgcttacaatcctttagctagacacagagtgctgattggtgcgttttcacagagtgctgattggtgcgtttacaatcctttagctagacacagagcgctgattggtgcgttttcatagagtgctgattggtgcgtttacaatcctttagctagacacagagcgctgattggtgcgtttttacagagtgccgattggtgcatttacaatcctctagctaggcagaaaagttctccaagtcccccattcaacccaggaagtccagctggcttaacctctcagtggcatttacttgtagtcccaacaacttgggaggctgaggcaggaggatagcttgaccccaggagttcaaggctgcagttagctgtgattgtgctactgcactctagcctgggcagcagagtgagatcatgtctcttaaaaaaagaaaaacaacaacaacaacaacaaaaaacaaccctcggtttcctatggcttaccaagtaagagtccaatgctgcctgacccatgtggccttcacagcttggcttcagcctgcccttccctttctacagattttctccagtccttgaatgtattgtgttctttgacattcaatctctcaaatactcaggagaaacattgttttagagtcaccttcacttctttgattcccttataccagagaatctcacttctcaccacttacagtgccactgtcccagccatctgggtgattgccacagcctcctaactgccttcctgcttctgtcctgcctccactgctgtctgtcctccacacagcagccagatcatgtcagtcttctgcctaacaccctccaaaagctcccacctcactctgtaactactgaagtcgttccatgggcctgagagcttcagctaacctggtcacacctctccgacttcatcacttctctcttcctagtttcactgcagacactggcatcctttctattcctcagtccttctgtgcatatgcctgtctcagaaatgcgtatttgctgtttcctctctccagaatgcttttccctcaggtctctgtcaaatgtcactttattagggagacccttcctgatcactctacttaacatagtgcccccacccccattcacactctactccctctctgccgtttcatctccttcaaggcatgtggcacccagaggtgtgcgtgtgtgtttgttcattcctcctacctgaatgtgagctgcacaagggtggggcttgttttgttcactgctgtgttcctatcacctgtgaacacaccatcctttgaggtcttgttctgtccatttcccctattgcctggtttccttttctttctctgttggataatttcttgtcagtaagcgtttgcaactttttctcctcattgaaaacacacacagccctcactcaactctgtatcttcagattccccaggtattcgtttctctccttcctttcaagtttcttgacagagttatgtgcacttcctgccttccctcctctctggctcctccgtcagaagatttctatccccagtgtgctagcaaaactgctctgatagaggactctaattgtgagaaacaaggaggcatatttttgctttttttcttttctcgagtgttgtactgtacggttattccttttttcccccttgtaattctcatttcagcctctctgaagtcttcctgttcttatttcctcatccttatcagttgtctttgctggttcccaggtggctgggacagtggcactggaagtggtgagaagtgagatgccctggtataagggagtcaaagaagtgaaggtgattctaaaacaatgtttgtcctaagtaattgagagattcaatatcaaagaacataatacattcaaggactggagaaaatctatagaaagggaagggcagcaatgaaacagaaaggcaggctgaagccaagctgtgaaggccacatgggtcaggaaggattggactcttacttggaagaccataggaaaccgagggttgttttttgttattgttgtttttctttttttaagagacgtgatctcactctgctgcccaggctagagtgcagtggcacaatcacagctcactgcagccttgaactcctggggtcaagctatcctcctgcttcagcctcccgagttgctgggactacaagtgcatgccaccatgcccagctaatttaaaaaatttttcttgtag

SEQ ID NO: 5296 - DNA, 2300 bp, Homo sapien
gcaggagaatctcttgaacccaggaggcggaagttgcagtgagctaagatcgcgccactgcactccagcctgggcaacagagcacaactccgtcttaaaaaaagaaaaagaaaaagagaaagagaaaagggccaggcatggtggcttacacctgtactcccagcactttgggaggttgaggaaggaggactgcttgagcccaagagtttgaaaccagcctgggcaacatggcgaaaccctgtctctcaaaaaacaacaacaacaacaaaaaaaagagagattaaaaataaaaggcattataaatgcccgtatataaacacagcctgtccatggctttgaaagagagaataaaggtctctttattactttaacctaatgagtaaaatgcaaacttcagtggttatctaaccatttgcacaatatctctttttttttttttttttttttttttgagacggtgtattgctcttgttgcccaggctggagtgcaatgacacaatctcagctcactgcaacctctgcctcccgggtttaagcgattctcctgcctcagccttcccagttgctggaattacaggcccctgccaccacccccggctaattttttgtatttttagtagagatggggtttcgtcatgttggccaggctggtctggaactcctggcctcaggtgatccacccgcctcagtctcccaaagtgctgggattacaggcgtgagccactgcgcccagcaaactctttctatctagcaagataattaagacaatgagggatatttaatacacttaaccatccagaaaaaaaaaagcccctaagtacttttagaggtgctagaaattcataccaaacaatcagttccagttgtctgttaaagcacagttaaaataacaacttaaccaatatggttctcagaccaacatactgctgaaggggggaatccaatttccacaggccactgcccaacaaaatgcacatcgctcactgcgaagccaagcttctggtcacatcacttaatgaatcaataatttaggaaacaaaggttccttacaggctagctgaggttaaattcaaccaatattcctaccacgtacagcttagatagtcttgaagcccaaaatacttaaaagttccaaagaaaacaagttgatccttactaaatacactaatgttcaagccaacgtgggcgcggtggctcacgtctgtaatcccagcactttaggaggccgaggcggatcatctgaggccaggagttcgagaccagccaggccaacatgatgaaaccccgtctctactgaaaatacagaaagtagccgggtgtggtggcgggcgcctgtagtcccaactactgggaaagctgaggcacgagaatggcttaagcctgagaggcggaggttgcagtgagctgagatcgcgccactgcactccagcctgggcgacagagcgagacttcgtctcaaaaaaataaataaaataataattgatgagttgtgcgcttacagaaccaagaagaggtttcgtgagaaataacaacacagaaggtaaaccgacatggatggaggaaaagggcacatcattagcaatactcgatgacatcacaacccagtggcctattccccgaggcctctaaagttctcaacgaaaaaagactttcaaaggaaaagcttaaaaaaaaaatgttccccacaaaaacagactaagatgaaagtcgggccctcagaccacgagctccggaagaacaggcagttgtcgcggagacagcaaatgcagcatctacctgtcctacatggccctgcgctacgagactgctcggaaggaaagagaggaataaccaacttaaccctgcttcgaggtggtttggagaggaagaggaaagctgtgtctttctgcaatatcgtgagggaagccgaggccctgaatcatcaaagagaaggagaagaggactaggcggctgcaggtaaaccaaggtagggcgaggaggaggacccggaattcctctacgcgagcgcgttctctgctcccctcctcgcgtctccgccccggccacgcccaccacggcacgggcgcgcgcacgccgccttcgccgctggctccgtctgttggggggcgaacacgccgcggtcctcgtcgtggtgagcgcagccactcaggctggtcctgggggtggggctgtaggggaaagtgctaaagccgctgaggtaagaggccgaggggtcgagggccctcgggagcttggtgaaaagggagttaacccccaggatcctacctgcagggactagaaaaatggagaaggtaggagga

SEQ ID NO: 5297 - DNA, 2300 bp, Homo sapien
gatttctggattaaggatactcaacctgtaataacggcacctacctcacacaggtgtgacaaagattagttaatacacgtaaaacacttggaacagttacaggcttagtaaacacttcataaatcttggctattcaaagtcattaacggagagttactactgagtcttttttcctatgcagatcccaggttttcatacttactatgaaaaaacctcatgggaaaagtattaattctctccatctaacagagtcagcaagctcccacaggagaaagaatctgttcaggaggagggccagtgccttctattaagcactttacactttccttttttttttttttttgagacggattctcgctgtcacccaggctgaagtgcagtggcgcgatctcggctcactgcaagctctgcctcctgggttcacgccattctcccgcctcagcctcccgagtagctgggactacaggcgcccgccaccacacccggctaattttttgtattttttaggagagacggggtttcaccgtgttagccaggatggtctcgatctcctgacctcgtgatccgcccgcctcggcctcccaaagtgctaggattacagacgtgagccaccgcgcccggcctacactttcattttaaggttcaatgatcttaagaaacaccctgccaccttcgaaaagtctttctaccctcaatgccgagcacagaacctggggcagtgtttccactgtgcttccagtcccgagcatttcggatgaatgaatgatgaacaaacgacagaacgcagggcgagcagctcagcaaaggtcatgcaggagatagagaagcgctgtgtcatgagtattggatcattatggatttttttctttctcattgtgcagatctattcgcacaactctatcttcaaccagtttgccaggcccaccggaggtgcccagtaaaattttgtcaaacaaatactgatgatgaagtatcctgggacttggccctgtcaggtaagttggggctgacagtggagatcctcacaggagagtaacgatgctttgtggacacagattgctgtgtccgagctaagatgcttaaacatttacttcatgtacggcagggatgacctcgcattcatatatttatgaatataaattcctttcctttctaacagatatatgcctattttcttaaaaagagtaattccttaaaagttcctaccctagtacaaaggcaaattattacaagtaatcattaaattccatcatcaacaaatcgttccacttcaaaacagctggattacaacccaaaccaaatagatgccgcagctgtaacgggggggggggggggcgggaacggggcgggggtgggcgtggagaaaaagtggccagagaggggagcgctcagaacaccagcggctcccaagctaactcctagccacttttcccacccagctgggtccccaggaaactacgccatcggcgctgtcccactgcgcaggcgccagccctcggcccgcatgcgcactcggtcaaacccggcctggggaaatttcctatcgcacgtctgctgcagcagtctcctgtttctcctcctaccttctccatttttctagtccctgcaggtaggatcctgggggttaactcccttttcaccaagctcccgagggccctcgacccctcggcctcttacctcagcggctttagcactttcccctacagccccacccccaggaccagcctgagtggctgcgctcaccacgacgaggaccgcggcgtgttcgccccccaacagacggagccagcggcgaaggcggcgtgcgcgcgcccgtgccgtggtgggcgtggccggggcggagacgcgaggaggggagcagagaacgcgctcgcgtagaggaattccgggtcctcctcctcgccctaccttggtttacctgcagccgcctagtcctcttctccttctctttgatgattcagggcctcggcttccctcacgatattgcagaaagacacagctttcctcttcctctccaaaccacctcgaagcagggttaagttggttattcctctctttccttccgagcagtctcgtagcgcagggccatgtaggacaggtagatgctgcatttgctgtctccgcgacaactgcctgttcttccggagctcgtggtctgagggcccgactttcatcttagtctgtttttgtggggaacattttttttttaagcttttcctttgaaagtcttttttcgttgagaactttagaggcctcggggaataggccactgggttgtgatgtcatcgagtattgctaat

SEQ ID NO: 5298 - DNA, 2300 bp, Homo sapien
tctggttttgctacttacttgctgcatgactgtggacacatcatttaacccatttatgcctagtgttccattactggaacgctaagcatgtgggagttatttataccctactgctcaaggtcatcgccaaggtctgatgccaaaaatgtaaaaaattgcaacctccggcatatatatatatatatatatatatatatatatatatatatatatatatatatatttttttttttttttttttttgagacagagtttcactcttgttgcccaggctagagtgcaatggcacgatcttggctcactgcaacctccgcctccccctccgggatctttttgttccttagttgtcttatctgcaaaatgggaaacaggttgagtacccttcatccgaaatgcttgggacttggaagtattctggatttcggatttttttttcaggttttgggatatttgcattatacttaatgattaagcctctcaaatccgaaaatctaaaattcaaaatgctccaattagcatttcctttgaccatcctgtcagtgctcaaaaagttttaaattttggaggattttggatttctggattaaggatactcaacctgtaataacggcacctacctcacacaggtgtgacaaagattagttaatacacgtaaaacacttggaacagttacaggcttagtaaacacttcataaatcttggctattcaaagtcattaacggagagttactactgagtcttttttcctatgcagatcccaggttttcatacttactatgaaaaaacctcatgggaaaagtattaattctctccatctaacagagtcagcaagctcccacaggagaaagaatctgttcaggaggagggccagtgccttctattaagcactttacactttccttttttttttttttttgagacggattctcgctgtcacccaggctgaagtgcagtggcgcgatctcggctcactgcaagctctgcctcctgggttcacgccattctcccgcctcagcctcccgagtagctgggactacaggcgcccgccaccacacccggctaattttttgtattttttaggagagacggggtttcaccgtgttagccaggatggtctcgatctcctgacctcgtgatccgcccgcctcggcctcccaaagtgctaggattacagacgtgagccaccgcgcccggcctacactttcattttaaggttcaatgatcttaagaaacaccctgccaccttcgaaaagtctttctaccctcaatgccgagcacagaacctggggcagtgtttccactgtgcttccagtcccgagcatttcggatgaatgaatgatgaacaaacgacagaacgcagggcgagcagctcagcaaaggtcatgcaggagatagagaagcgctgtgtcatgagtattggatcattatggatttttttctttctcattgtgcagatctattcgcacaactctatcttcaaccagtttgccaggcccaccggaggtgcccagtaaaattttgtcaaacaaatactgatgatgaagtatcctgggacttggccctgtcaggtaagttggggctgacagtggagatcctcacaggagagtaacgatgctttgtggacacagattgctgtgtccgagctaagatgcttaaacatttacttcatgtacggcagggatgacctcgcattcatatatttatgaatataaattcctttcctttctaacagatatatgcctattttcttaaaaagagtaattccttaaaagttcctaccctagtacaaaggcaaattattacaagtaatcattaaattccatcatcaacaaatcgttccacttcaaaacagctggattacaacccaaaccaaatagatgccgcagctgtaacgggggggggggggggcgggaacggggcgggggtgggcgtggagaaaaagtggccagagaggggagcgctcagaacaccagcggctcccaagctaactcctagccacttttcccacccagctgggtccccaggaaactacgccatcggcgctgtcccactgcgcaggcgccagccctcggcccgcatgcgcactcggtcaaacccggcctggggaaatttcctatcgcacgtctgctgcagcagtctcctgtttctcctcctaccttctccatttttctagtccctgcaggtaggatcctgggggttaactcccttttcaccaagctcccgagggccctcgacccctcggcctcttacctcagcggctttagcactttcccctacagccccacccccaggaccagcct

SEQ ID NO: 5299 - DNA, 2300 bp, Homo sapien
cagccttccaagtagctgggattacaggcgcctgccaccacgcccagctcatttttgtattttaatagagatggagtttcgccatgtttaccaggctagtcttgaactcctgacctcaggtgatctgcccaccttggcctcccaaagtgctggcattacaggcgttagccaccagcctgcaatcctttttgaagtcctttcttttaattgggctaaaattcacataacataaaattaaccatttgccattttaaagtatacaattcaatataaagttatttttaatctaaatactagaaatttatccattacaacagccaatagccacatgtggctacttaaattttaattaatattaaataaaatttaaaatacagttcttcagtcacaccagtttataggtgcaacatgaagctactggcaaccatattgtgcagtgcagaaatagaacactggaacatttccatcatggcagaaagttctattagcatggcactagaccattttttcttttctttttttttttttttttttttttgagacagagtctggctctgtcacccagactggagtgcaatggaatgatctcagctcactgcaacctccgcctcccaggttcaggttcaagtgattctcctgcctcagtctcctgagtagctgagactacaggcgcccaccaccacacccagctaaatttttttttttttttttttttgagacagagtctcactcttttgcccaggctggagtgcaatggtgcagtcttggcttactgcaaccactgcctcccaggttcaagcgattctcctgcctcagcctctcaagtagctgggattacaggcacgcaccaccatgcccagctaatttttgtatttttagtagagattgggtttcaccatgttggccaggctggtcttgaactcctgacctcgtgatccacccgcctcggcctcccaaagtgctgggattacaggtgtgagccaccgcacccggccattttttctttaaaaaatactaaatacacttgttagagggctgagcgcagtgagactttgggagaccacggtgggagaatcacttgagaccaggagttaaagaccagactggccgggcatgatggctcatgcctgtaatcccagcactttgggaggccgaggcaggcagatcacgaggtcaagagatggagaccatcctggccaacatggcgaaaccctgtctcaactaaaaatacaaaaattagctgggcgtggtggcacgcgcctgtagtcccagctactcaggaggttgaggcaggagaatcgcttgaacctgggaggcagaggttgcagtgagcagagatcgcgccactgcactccagcctgccaacagagcgagactccgtaaataaatacatacatacataccagactgagcaacatagcaagaccttgtctctatttaaaaaaaaaaaaaaaaggaaagaggccaggcgcagtggctcatgcctgtaatcccagcactttgggaggccaaggcaggcaaatcacctgaggtcaggagtttgagaccagcatggccaacgtggtgaaaccccgtgcctactaaaaatacaaaaattagctgggcatggtggctcatgcctgtaattccagctactcaggaggctgagacaggagaatcgcttgaacctaggagacggaggttgcggtgagccgatatcatgccactgcactctagcgtgggcgacaagagcgagactccgtctcaaaaaattaaaaaaggaaagaaagaaaataccatatacactttttagaatttttgttaaagtcgtgtaagcttctgtggcaaagggagggttttgttttgaacttttgtaaggtgtcatgtattcagtacagttttctcgttaacatttgcattttttggtatgaaataggattaaacactcacaggtaggtgctctgttcataataggccatggtttccaagattgtttcctgaactttttgttccagttttgggatgccaccaagtgataagtttgggtattacatttagatgaaaaggttaatttttttttttttttttttttttttttgagagtcccgctctgtcgcccaggctcactgcaacctccgcctcccgggttcaaatgattctcttgcctcagcctcctgagtagctgggatgagaggcgtccaccaccacgccctgctaaatttttttgtatttttagtagagacagagtttcgccatgttggccaggctggtcttgaactcctggcctcaggtgacctatccgtctcggcctcccaaagtgc

SEQ ID NO: 5300 - DNA, 2300 bp, Homo sapien
gaggccgaggcaggcggatcacgaggtcaggagatcgagaccatcctggctaacacggtgaaaccctctctctattaaaaatacaaaagattagccggacgtggtggtgggcacctgcagttccagcttctcgggaggctgaggtaggagaatggtgtgaacccgggaggcggagcttgcagtgagccaagatcgcaccactgcactccagcctgggtgaaagagtgagaccccatctcaaaaaaaaaaaaaaaaagaagaagaagaagaaaaaacatcgtaactcttgtttccttagggtgtttaggtgtcccgcccaaatcagcctggaggaaatgtgaatgttcctgatggattaattcagatcttctctctggccagcaggaagacacacccatgcaggtcacctctgtaagagtgatttcaagagtatgtcatctactccagccctccaagaacaactagccgccttgatccagtgtcttttattatttttaatttttatatccccattgttaagcaatctggtgtctttaaggctccaacaagcgacagagcttgaagaatgggaagagaaggccttgaaagtcccagtggctcacaaactattccattctgcagctgtctttaagatgtctcctggatcccctgatttctttttttaatccataaatttgtctccataagtgggtctcccacctgtcaaatgagagtagggtgcagagcttggattctggttctttcaggttctaagtcttggcccaagtgtcagctttttcttttttctaagttggggtggggatgggggttgcggagggcagtggcctgacatctcctgcaagtgtcatttgtcacgcgaaagcaagcctgacccgaggcaaggcccgcctatctggttaggttccttgcccgcccccggggccctgggcatctgatgtaagtttggctccctcttccatcagggtcctcctgtcccagactgataaacctttagagcaataaaggtcgagtccgtctcaacctccacccaccctcagcaaccactgttagcctctgagcactgctgccaggccagatttcctgtggccccgcctgaatgatgaaacacgggatggccattgcactccctggcttttccagagatctcggtcctcggtcctgatgcaaccgtctggatcttttacacaaagcgctaggcgagcgctgggtgctaggacccggggggcgcccgggcagggaggtccggctgcgctgcctgcagtccgcggggagggcggatgggtctgtgagtccgactgctgtgaatcctcgcttccatccctgcactgggcgctatgaacccgggcccatccacactcctctaaccactctcctcaagccctctccttgggagcagttggaagtggaagcagatagggtttgggaggaggcagggatccccattaacctatgtcctgggctgtagagtaacagccaggatgggcaggtggggccttggggaaggggcagcatggtgcccggagcttcccagtctgtggaccccacccccatatcccgagcctttgcaaagcagggatagagggggtaagggcgcgagggcaggccgggctaacgtctgctcctgcgccgccgtcccacgggcatcccccccgtgtgtgcccagttgttcccgaagctttaggatccaagacgctgggggcaaccattttccttgcccgccgccccctcacgcttccctgcctctcctcctagcctggtcacgggctgtcccctcctccagcaatgcaaccctataataaacaagtctttccttgatcctcccctgccgcgagcgccctcggggaccttggcagctgcagccgccgcggatcctttccagaaagggggcgtggcggtgggtcggggttcgactgcgagctttctggggctcaatggaggcggggcccggccgctgtcaccgggcaggagagaacgttgcttacgtgcgcccggagtccattggccaaggcgggccacactcccgggtctggattgggtcgtggcgcagagaaggcgtggcctcgccgcgctagtccttataggctgctccgcgctggtgctagggcgcagcaggccaagggggaggtgcgagcgtggacctgggacgggtctgggcggctctcggtggttggcacgggttcgcacacccattcaagcggcaggacgcacttgtcttagcagttctcgctgaccgcgctagctggtgagtgtcccttctgtgtgtgggtcctagagctcgcggtctggtctggtctggtccc

SEQ ID NO: 5301 - DNA, 2300 bp, Homo sapien
tagatcacctgaggtcaggagtttgagagcagtctggccaacatggtgaaaccccgtctctactaaacatacaaaaattagctgggcgtagtggcaggcgcctttaatccctactcgggaagctgaggcatgagaatcacttgaacccaggaggcagaggttgtgttgagccgagatcgtgccactgcactccatcctaggcaacagagcaagactccgtctcaaaaaaaaaaaaaagtataaaaattataactagacagtgcttcaaacacattttgtatgccacagatcaaagaacagctagctggctaaaattaaaatattgtggacaattgcaaaacattttaaattctggccaggcggaaggggtttccttttgctctgacaatatttattcaattttttttttttttaattttttgagatggagtctcgctctgttgcccatgccggagtgcagtggcacaatcttggctcactgcaacctctgcctcccaggttcaagtgattctcctgtctcaggctcctacgtagctgggagtacaggcgcccgccaccacacccagctaatttttgtatttttagtagagacggggtttcaccatgttggccaggctggtctcgaactcctgacctcgtgatctgcctgccccttcctcccaaagtgctgggattacaggcgtgagccaccatgccggccttttttttttttttttgagacagggtctcgttctgtcaccctggctagagtgcaggagcctcccctcccaggcaaagctcccacctcaggctccccagtagctgggaccacaggcccacaccaccacacccagctaattttttgtattttttgtagagatagggtcttactttgctgtttgagcacaggctggtctcaaactcttgggctcaagtggtcctcctgcctcagcctcccacagtgctgggattacaggcatgagccattgcccctgatcaaaatttttttattttgtatctaacaacagaagagtttaacatcacagattatcacacagtgaatatatttgttaatttttatttctaattcttctttttttgtttgtttgctttttctgcaccctagaaccagtgctatttctaatttttattttgttttaattattattttttgtagagatgggggtgtatgttggccagactggtcttgaactcctggcctcacgtgttcctctcatgttggtctcccaaagtgttgggattacaggcatgagccgccacactggccataatgtttaaattggtaatatatttgtgtggttcacatctcaaaaacttgtatatactgcatgtctccttccagccctgccttccattctcctggaggaagcaacttttgctgatttttttttttttttggcattctgtcaaaagtaaatgcagacacctcacttcctcctgtatttcacaccagttgctgctttgtttttatctgggaaagctggcaggtgaaggagcgtctgtgttttggagcctcgtggagggaacggcagagtggtgtcatgtctccccaggctccactattctaggggagctagtggtgattatggctgacaccacaccccacccaggtccagcagagtgacattggctcttccctccagggcgggctaggggtgtttgtgcagctgatgcctatcctcatcctgattctcgtgtcagctctcagccagctcatggtctccagtccaccctacagtctgagtccaagaccgtgagtacatgggtgaggccgggccatgggcagacaaggggctttaaattctcagccccatcaggggccttctttcccatcctgatccagccagtgtgcgatcataatgcagaaacctggcttcgaatcaagaaaatatactttctctattcaactaggactcttaagctttttaggattatggtcccctaagaaattgcagcgagagctacagaacttttccctaaaactatgcacacatgtgcacacacacatacacacacacgatacacatgtacacacacacacaatacatgcacacacataatacacatgcacacatacacgcacacatatacacacagagttttgcatataatttcggcggctttgtgactcttccctgcccatctcccctgccaaccctgacgaagaacctctgctcctcggctctggttgggcttcctgaggctgtggaaagaacagggcactagagtcagacagagcaagcatggcttagaatcccagcttctccactaagaagctgtgtgaccctaaacaagttata

SEQ ID NO: 5302 - DNA, 2300 bp, Homo sapien
ggctggactgcagtggcaccatcttggctcactgcaacctctgcctccctagtagctggaattacaggcgcccgccaccacatctggctaattttttaatttttagtacagacgggatttcaccacattggccaggctggtctcaaactcctgacctcaggtgatctgcctgcctcagcctcccaaaatgctgggattacaggtgtgaaccaccacgtccggcctgtcctgcctactcttaaggactatggctttcaagagagcagatgactgtccccccagcacccacaggcctaatcagggcaggagctggtggctttgctgggaggggaagtgagtgggaagcagcgggccgctcggcgaggcacgcagcctgcttgagcaggagctctgaatggtttccttgccttgcacagccctgattgagtccctcaaccagaaaccacagactgccggtgaccaacccccacccacagacacaacccatgccacccacaggaaagcaggtgggaccgatgccccctcggccaacggtgaagctggaggagagagcaccaaaggctacactgcagaacaggttgcagctgtgaaaaggtagatgggtgggcaggggctggagcctggggagactggggaaatctagaggcttcctggagcatgtcctccacctcccatctgcctgtgggcagcacagggccctgggagggtcttggaggatggagaaggtccaagggtccaggctcaccaggacctctccttatttccctcaaggcccaggaatacagtgtgggaactggggctccaccacccctcccgccacgacccacagcagaggctggaaaagctgacactgccggcttcctctgccgctggccaggcaggccccaggcctctttacacagctctgtttgtcaatagagatggagctttgtctccccctccagattctaccccaacccacatcccagcacccaacaaagacccttttagatcagagcctgtgtggggtagaatggagaccagaggcagagttattgccccacggctgtgagcaggccccacgcagagtagctcgctaccaggccagagaccacccagccaaggctcctcaggcttagacgttcccagctcccatttctccccaggtctcccagcagctggccttgggaatcccccagggtcatgccacagctcctggcaagcttcaggaccaaggccgcctgtgtgagactgagcatgactgctgtttgccataaaagtgtaggcgagatctgtacttcactgagtcggcaaggtccattgtaggcaatagaaactgatgtatgagggattgggaaggcctagaaacggccaagaaccaggaggtctccagggacgcggagaggaagaattggtgaaagagaaccagggtctctttaggccctgtgcttgcggtgaacagtcacctgccacttctggccttcatgttacccactcaagactcagattgggctgagcatggtggctcatgcctgtcatcctagcactttggggggctgagacaggaggatcccttgagcccaggagtttgagaccagcctgggcaattagaagaccctgtctctatctttaaatatttaacattttaaaaacttttaaaaattaaaaaaaaaaaaagactcagattgccaggagagtcggttggctgagcttgggacaccaccctgggtgatggacaccgacagtcctcctgagctcttcccatggggaagatagatactggcctggcgaaccccacagatgccctcctaaatccaagaatccagacggtgttcttctgtttcccgtggtcctgcccagctctgcatcacatttggtgcccacttggctcccttgtccctggtgtcacacagctgacccaaggagctgtcagccttgccctgttggtcccccgcagcctgcccagagctgtgcgccccacacggcctgttcatcgcccccctcacacagacccatgtagagcaccccgtaccatggtctcctccttccccagggtcaagcaatgtaaagattactatgagatcctgggggtgagcagaggggcctcggatgaggacctgaagaaggcctaccgcagactggccctcaaattccacccagacaagaaccacgcacctggtgccactgaagccttcaaaggtaagccagccctgctttcctagcattttggtgtgttcatctcctgtccatggcagggagtaagggaccaagacagctttcccaggaagcagggagcaggaggaagtggccttgggcccaag

SEQ ID NO: 5303 - DNA, 2300 bp, Homo sapien
aaccgggaggcagaggttgcagtgagctgagatcatgccattgcactccagcctgggcaacagagtgagactccgtctcaaaaaagaaaaaaaaaaaaaaccaatggtaaaaatagggagtagtgcagtggactgaatattttacttattcaaaatgtggtgcaatgcaaacatatttgcagatttgaatgagttcagtagaaaaaaatggattcataagttggattcataaaagcaaaaagcagagtaaaaccaaatacactgaaagaaatagcaattaaagtagtattaaatgaactctagcaaggcacggtggctcatgcctgtaatcccagcactttgggaacccgaggtgggcagatcacttgaggtcaggagttcgagaccagcctggccaacatggtgaaaccccatctctactaaaaatacaaaaattaggccgggcacggtggctcacacctgtaatcccagcacttcgggaggccgagatgggtggattgcttgaggtcaggagttcaagaccagtctggccaacgtgttgatatcccatctctactaaaatacaaaaattagctgggcatggtgctgggcgcctgtaatcccagctactagggaggctgaggcgggagaattgcttgaacccaggaggcggaggttgcagtgagctaagatcatgccactgcactccagcctgggcaacagagcaagactccgtgtcaaaaaaaaaaaaattagccaggcgtggtggcacgtgcctgtagtaccagctactcaggaggctgaggcatgagaatcacttgaacctgggaggtagaggttgtagtgagctgagatcgcaccactgcactccagcctgggcaacagagtgagactctatctcaaataaacaaacaaataaaaaaaaataactctaaataaagtactatagggtttattaataaaaccaagtgtgcttttggaagactatcagaatatcagaattctgcctaaatttattaagaaaagagatatatgtataagtatactatctgaaaaataaagcaattactacagatttatccatgaattatgtagaattttatgtcaatttttattaacaaaattaattttgttcatgtaaaacgaaaaagacctctatcctgcctactttttttttttttttttttttgagacagatccttgctctgtcgcccaggctggagtgcagtggcacaatcttgctaatctccacctcctgggttcaagcaattctcatgcctcagcctctcaagtctctcgagtagctgggattacaggcgcccaccactatctccagctaaatgtcttttggggtttttttttttgtatttttagtagagatggagtttcaccatgttggccgggctggtcacaaactcctgatctcaggtgatccgcccgcctcagcctcccaaagtgctgggattacaggcgtgagccactgtgcccggattttttttttttttttttttttgagacagggtctcactctgtcacccaggctggactgcagtggcaccatcttggctcactgcaacctctgcctccctagtagctggaattacaggcgcccgccaccacatctggctaattttttaatttttagtacagacgggatttcaccacattggccaggctggtctcaaactcctgacctcaggtgatctgcctgcctcagcctcccaaaatgctgggattacaggtgtgaaccaccacgtccggcctgtcctgcctactcttaaggactatggctttcaagagagcagatgactgtccccccagcacccacaggcctaatcagggcaggagctggtggctttgctgggaggggaagtgagtgggaagcagcgggccgctcggcgaggcacgcagcctgcttgagcaggagctctgaatggtttccttgccttgcacagccctgattgagtccctcaaccagaaaccacagactgccggtgaccaacccccacccacagacacaacccatgccacccacaggaaagcaggtgggaccgatgccccctcggccaacggtgaagctggaggagagagcaccaaaggctacactgcagaacaggttgcagctgtgaaaaggtagatgggtgggcaggggctggagcctggggagactggggaaatctagaggcttcctggagcatgtcctccacctcccatctgcctgtgggcagcacagggccctgggagggtcttggaggatggagaaggtccaagggtccaggctcaccaggacctctccttatttccctcaaggcccaggaata

SEQ ID NO: 5304 - DNA, 2300 bp, Homo sapien
tcccccaccaaactgcttttgtagtcttttccatttccttgttttagtaaatagaaattctcttcttccagttatcaagccaaaaacattggaatcatccttgaatcttctttctctcacagcccacatccattgcgtcattctgtcttcaaaatatatccagaattttactactactcaccacctccgccatcacccttatccaagttaccattaattttcacctgtattataatagtagcttcctgactctcatccggattactgtagtagcatcttaccaaatcctgcctgaaaggccaagcaatgtaagggctgacagatgactcggggattcggcaacgtggaggtcactggcaaccttcacaagattgctttcactggagtgatagccctcgaagaacgggataatgatagaactggattacactctgtagtagaatcttttttttttcttctttttttttagatggcgtttcactcttgttgcccaggctggagtgcaatggtgtgatcttggctcaccgcaacctccacctcccaggttcaagcgattctcccgcctcagcctcccgagtaggtgggattacaggccatgtgccaccatgcccggctaattttgtatttttagtagagacggggtttctccatgttggtcaggctggtctcgaactcctgacctcaagtgatccgcccgcctcggcctctcaaagtgctgggattacaggcgtgagccaccgcgcccagcctgtagtagaatctttacgctccctagaatgtattcgccttcctgatctgttataactcaccaagagaattcccttttcagagcctttgcacttgctgttccttcggcctgaccacccttcctccagacagtcacatctacctgttatcgttcctgaattctggtacctgttaatgacagcttctgagaggtttcttttatcgcgctatttaaaatagcgcctcccactctctatccctgtgttttccataatttttcttcagagcttttatcactatctgaatctatctggagctcccccagcctacacacactggaatgtaagctccatgagagcaggagctttgttttgctcacccctgtatccccatcataaaaccatgcctcacaaacagtgggcactcaatatctgttcagtgaataaataacctttgtctgaaacgtatgtagttacattacgtatatagatcaccacttagtaaaccgtctgggaataacaggcactccgaaggccccagtctcatcccgacggctaccacgtgaccttcctgagcttgggtttcctcctccggaagattagagggttggcgcatactcaactctaagacctccggaacatggaatctgggcgtgcaccattattgacacctacaccagccgtccctttcttagaagacatacggtagcacttccaccctcgctcaaaactcgggaaaggaggggcggagggtggatgtcatcactccgcgcccggctgcccgcgacgcgccggcgggtggcgcagcccttcgctcgcccggcctccccctccctggttccgcgttctggttccgccatggaatccaacaaggatgaagctgagcgctgtatcagcatcgccctcaaggccatccagagcaaccagcccgaccgggcgctccgcttcctggagaaggcacagcggctgtatccgacgccgcgagttcgcggtgagtgtgaggtgccggagagactggggacattagaactgatggggggaacacgggaacggaccgacgggagcagttgggggagggggaggggtggcgaggcgcggctacgcctgcgcactgaggcgcgcggtggctgctgggaggcgtagtttttccctcttgttcctctgcgggatgcgagccgtctggagactcgggcggccgggacttcagctttcggggtgctggcggagcccgctggggtttgaggtctccgagaatgaaacgcgctggcagccgggacgaagggaacttacctggaagtgaactcgaactacttttcccaaggggccgttcggtagcccaggccagtcgccggcctgggaaatattacagttcaggaaaataaacataactcctttaagggagagaatgggcgctagacagggagacatttctgttcttcgggcgccagggaaaggcgcttccgtatcttcactccctctcacctctcgggctgagggtcagggaccactctcccaaaatgcaagccggcctttgcacccaccccagtccgccgcctcggactgtcctgaagccgg

SEQ ID NO: 5305 - DNA, 2300 bp, Homo sapien
gatatgacgtttgaccccccctccctccttttctaaaaaaactgtttgtagagaccgtgagggggggcggtctcattatgttgcccaggctggtcttgaactcctgggctaaagcgagcctcccacctcagcctccccaagtgctgggattacaggcatgagccaccatacctgacctactcatttccttacaacctgcttcttcacattctcctttactggattttcttcctcttccagatctttaaatgttgggatttcgtgaggctcagtaatcagacttctctgctcttctccatctacactcacttccttggtgcatatatatatatatatatatatatatatatatatatatatatatatatatatatatatatatcacagctcactgcagccttgacctcccatgctcaagtgatcctcccacctcagcctcctgagtagctgggactacaggcgtgtactaccacacccagctaattttttatttttttgtagtgatgggatctcactctgttgcccaggctggtctcaaactccttgcctcaagtgatcctcccacccctggcctcccaaaatgttgggattataggagtgagccactgtgcctggccccaaagttatatttccaggtcctttttgcctaaaccctacgtatgtacaacatcctagtctgtatctctgcttgattctaaaaagcatcataaactgaatcaaacccttaatattcccccaccaaactgcttttgtagtcttttccatttccttgttttagtaaatagaaattctcttcttccagttatcaagccaaaaacattggaatcatccttgaatcttctttctctcacagcccacatccattgcgtcattctgtcttcaaaatatatccagaattttactactactcaccacctccgccatcacccttatccaagttaccattaattttcacctgtattataatagtagcttcctgactctcatccggattactgtagtagcatcttaccaaatcctgcctgaaaggccaagcaatgtaagggctgacagatgactcggggattcggcaacgtggaggtcactggcaaccttcacaagattgctttcactggagtgatagccctcgaagaacgggataatgatagaactggattacactctgtagtagaatcttttttttttcttctttttttttagatggcgtttcactcttgttgcccaggctggagtgcaatggtgtgatcttggctcaccgcaacctccacctcccaggttcaagcgattctcccgcctcagcctcccgagtaggtgggattacaggccatgtgccaccatgcccggctaattttgtatttttagtagagacggggtttctccatgttggtcaggctggtctcgaactcctgacctcaagtgatccgcccgcctcggcctctcaaagtgctgggattacaggcgtgagccaccgcgcccagcctgtagtagaatctttacgctccctagaatgtattcgccttcctgatctgttataactcaccaagagaattcccttttcagagcctttgcacttgctgttccttcggcctgaccacccttcctccagacagtcacatctacctgttatcgttcctgaattctggtacctgttaatgacagcttctgagaggtttcttttatcgcgctatttaaaatagcgcctcccactctctatccctgtgttttccataatttttcttcagagcttttatcactatctgaatctatctggagctcccccagcctacacacactggaatgtaagctccatgagagcaggagctttgttttgctcacccctgtatccccatcataaaaccatgcctcacaaacagtgggcactcaatatctgttcagtgaataaataacctttgtctgaaacgtatgtagttacattacgtatatagatcaccacttagtaaaccgtctgggaataacaggcactccgaaggccccagtctcatcccgacggctaccacgtgaccttcctgagcttgggtttcctcctccggaagattagagggttggcgcatactcaactctaagacctccggaacatggaatctgggcgtgcaccattattgacacctacaccagccgtccctttcttagaagacatacggtagcacttccaccctcgctcaaaactcgggaaaggaggggcggagggtggatgtcatcactccgcgcccggctgcccgcgacgcgccggcgggtggcgcagcccttcgctcgcccggcctccccctccctggttccgc

SEQ ID NO: 5306 - DNA, 2300 bp, Homo sapien
ttgtgccagtgcactccagcctgggcaacagagcgagactctgtctcaaaaaaaaaaaaaaaaagaagaaaggtatttcttctgtagccattatttcccagcagacagttgttgtgtaatataaaatgccttcaaaacttgtagctatgtctcaaggctgctgagaggttgcaaaactctttactgtgtttgccacatgctcaatcttttgataaagtctcctgtgaaatctattcagattgtattacaagttagcattgaaaaaattcctgtcatatgtggtcacaaatttgcagtcttttctcagttgctaaaagcacatgtggtagtggaattaagagccttgttaaacagctgctgccagtgacttcaaagtgacatctagccaggactgacagttatagtaatttctatgttaatgtggcaaatttaaaatatcaataaaggctgggcgtggtggctcacgcctgtaatcccagcactttgggaggcccaggcaggtggatcacttgaggtcaggcgttcgagaccagcctggctaacatggtgaaaccatctctagtaaaaatacaaaacattagccgggcgtgatggccggcacctgtaatccaagctacttgggaggctgaggcaggagaattgattgaacccggaggcgaaggttgcagtgagccgagatcacagcattgcactccagcctgggcaacaagaacaaaactccatctcaaaaaaataaataaataaataaaataaaataaaacatcaataaagtttttcttaacattggtaaattgctttatggacatggaactgatgagattataggttttattgccttgacacattttctagccagttatttataagatatttattgttgactatttcaactgtaaaattcaggtatgagataaatttttttcactaaaatattatgtggctggtgtagtattttgtatgttccatgtgcagaatgggggcttgtataccagataagggaatgaactttcatattaactagacagccttttagttaaatatatgccatacttgattttgttgctattccaacatttgcttgtgtgattcccaactttgctttctaaatatgccatacgtaaaggatctctagcagtttgtttaattttataatcaaaaatctgttgcttcagacctgttaataattgagtttccatgatacgtaattttatttttctatgccatcattgaatgtactttgactttgaagacctactagcttttgaaacctatgaaatctaaagtctgttttgttttaggaattaggaaattacatagaagtagaaactgtaaaatcaatccctttataaaaacttggtatttaggccaggtgcaatggctacttcctgtaatcccagcacttttggaggccatggcggaaggatcatttgagcccaggagtttgaggccagcctggacaatgtggtgagaccctctcactacaaaaataaagataatttttaaaaaagagaatgttaaaaaaattcttctgggaaggattgtaaaaaatagaaaaaaagacttggtatttaagaagctataggttggcatatatatggcattgtaccctattactgaaatcttctgaaatttcttatgacatttaaaaattttgctagccttcagtgatttaaaacattagaaaattcttcaaaaaaagttttaaacaaaagttacatgagcattgcctcaactggaatatgaatggtatattgcaagaaataaaaaattccaagaatattaacaatttttggtattcatttgtaatattaaaaaactaagtatagaaaaaaatgatagaatttcttcccaaaataggatggaaaatatatgagaattgatgagcagtgatgataagaatatatgagcatatgagcattgcttaatatagtaacactttctaaatttctaactttaggtgatggaatatgagaataggattcgagcctactccacgccagacaaaatcttccgatattttgccaccttgaaagtcatcagtgagcctggtgaagcagaagtgtttatgacaccagaagattttgtgcgatccataacacccaatgaaaaacaaccagaacgtaagttgctaaagtgaaatataagactgtgatatttattttgttataggctactttgtctctttctacatagtactgaaatcttacaggtccttgtaatgatgatatgaacagtgtgtctattgaatatcaggcattgtgctaggctttaggagtacaaaagagaagcctgcagtctaa

SEQ ID NO: 5307 - DNA, 2300 bp, Homo sapien
gtcctaagaccaaaacgtttgagaaacaatgatttatgtttttaaatgttatttaacagttagtttgactgattagttttatatagacaaatgttgcctaaaattagaattgaatttcagcaaatctttctttctttttttgagacggagtctcgctttgtcgcccaggctggagtgcagtggcacgatcttggcttactgcaagctctgcctcccgggttcctgccattctcctgtctcagcctcccgagtagctgggactacaggcgcccgccaccacgcctggctaattttttgtatttttagtagagacagggtttcaccgtgttagccaggatggtctcgatctcctgacccgcccgcctcagcctcccaaagtgctgggattacaggcgtgagccaccgcgcccggcctgaattacatcatttaagagtggaagcctcagaggccttcaggtcaggtctatgtcccgctactgcatgtactgcattacctaggggtgtcagcctgcttccctatctgcaaatgaataaaacagtatccatcctagagtggttgtagacaagcactgggttgtatgtaaagcgctagcacagagccatgaacacaatcatctattgtacttaggttagttgggtctgagaagaaatggagaaaacagagttgattctgcttacttcacaatttaccccagggatggttttgttggctttgtttccatggttgttgccttttccacagctctgctacgtaaattcttgggaaaaaaaaattatttgaaagttctctgggaccagcgaggtggctcgcacttgttaatcccagcactttgggaagccgagacgggaggatcgcccgaggtcaggagtttgagactagcctgcccaacatggcgaaaccccgtctgtactaaaaatacaaaaattagccgggcgtggtggggcgtgcctgtaatctcagctactcgggaggctgaggcagaagaatcacttgaacctgggaggaggatgttgcagtgagcatcactgcactccaacctgggcgacagtgcgagactccgtctcaaaacaaacgaacaaacaaccaaccaacaccccgctgccccccccccaaaaaaattctctggtattatagtcatatttccatcctatttccacagcaggggtgaggatcctttgccatcccatttttctgataaaaacaccttcttcagccgggcgcagtggctcacgcctgtaatcctcgcactttgggaggccgaggtgggcggatcacctgaggtcgggcgttccagaccagcctgaccaacatggaaaaaccccgtctctaccaaaaatacaaattagtagggcgtggtggcgcatgcctgtaatcccagctacttgggaggctgaggcaggagaatcgcttgaacccaggaggcagagattgcagagagccgagatcgctccactgcactccagcctgggcatcaagagtgaaactctatctcaaaacaaacaaacaaacaaacaaacaaaaaacacattcttcaagggaaaacatgtttttaagtggcttctagagattataaactctgcaataatattagtctgcaaataaaacacctgacaaaatcatccaccagaggaagtggtgagggtttctaaatccaaaaaagtctcaaggttatgaaacaggaacatttaatctctgagaaaacctaaacggagttggaaagaaacaatttccaactcactgtggtccagttttcttttcacgaactcctttttgcttagccaacatagccaacacgaaaacgggtaccgaggaggtgttacaagccacagtaaatttctcaacagattcctatgacccttgtggaggggaaaaaaaccagaagaaatgcccgagagcttctgggagctctccagctttcccgcctaaacgctgaggggagtaagggggagtgacggggctagggcggggcccgaggctggggcgtggcgcgttgatttccccgcccctccccgttccttttcctctgtgcccctcccacacgcctgtctccacgatcccgacaggcccagcggctaggagagtcacgtgagagtgggcggagggggtggaggtttgtctccgctgtttcatctctatggctgtcagaggtgggcggctttgaccgagaggctgctggagctcgtgtttggacgcgtgagtcttggactctggagggtataaggagacagcaatttagggaaggcgaaggggaagggggttggcgagacagccttagggaactgggcttcgtggctggccg

SEQ ID NO: 5308 - DNA, 2300 bp, Homo sapien
tagataaaagatgacacattttggtaaataggtaggatgaaaacttttgctaatactgcccatttcatgtttgtgcacttaaaagtattatttacttagttcttttgctaatgcatatgagtaaatctcactgcaggatgcacatctaattttcatgcttggaaaaatagagtaaaggcaattctagtaaaatttcttaaagtggaaagtggaaatggagcaatcctgattcatagctagatctggtgacagcacagaaaataaaaacaaaactaaaatccatggtgatctctgtaagaaggcatgaaggggtgagagagaaaatggcacagcatgggtaaatacatcaaatgcagttgggataaatatagatgggtggaaaataattgtaagggaaattgttccaggaatgtcatggatttccaactagggggattactgtgtgcagctgttgaatgggggctcattcttgaggtctcaagttccacctgttgggcaataaagccttttgagtgagtgacatgatatctaccccggagaagccaatcatctcactgttttggtgtaggtggggcataaggattaaacaaacaaaaaacttccacgtcattttttagctattcttggccaagaaggtaccatttcagtcaaactttaaagaatattcttagaataagtgataacattttcttcgtatttatgtgtgtgttttgtttttgttttaaatttatcatctaaggctacactacaaagatgttttccaaaatttaaaataatgcttgtatttgcttcccaaactattttcctgctccagattttaaaaagaggtgtgagaatttaatcagctcataataataaacagctagcaaggaaatactcttctaaggaaattcaggacccaaaatctttcttaggcagtattcaaggagccctcattgtgagtttaagtggaaagaagtgtttttcaagagaaagtgtttgttattccaaagcgtattctgataactatttcggcaaaattatgaagcatcattaaaatagccttttacatgaatttttttttttttttttgagatggagtcttgctgtgtcgcccaggctggagtgcaatggcccgatctcggttcactgcaagctccgtctcccgggttcacaccattctcctgcctcagcctccggaatagctgggactataagcgcccgccaccacgcctggctaattttttgtatttttagtacagatggggtttcaccgtgttagccaggatggtctcgatctcctgacctcgtgatccgcccgcctctgcctcccaaagtgctgggattacaggcgtgagccaccgcgcccggccttacatgattttttattacgttattaatgtgttctgtttctgtaaatgcacacaaagtcaaatatgataaaatagtgctgtttctggagagtgtgagaatatccgtataaaggtgctgtaaaaatgaattgggtatttgagatgtatacacgtcagttaattcactctgaaggcatgtactcattctgggactttgatattgtaatcgttctacctctcctatattatgctacgcatcacagtcattagatcactccgtgatgtagagttaatttcagcatatctaaatattatcagttatgaatgataattctaggcgtgtagttgagagttacagcatacaccgttaatggttattaatttggtgcctattttgccaacttagaacactcacttagaactcaacttcgaacaaagcttttcacaaatatctatatcccccgttactcttatcatagctctattgttggtgaagattagccgaactgaacatgccatctctattgctgttattttcacgggtttgggtgtcaattatgggttccctagaatttgcccgtaattgactatgtcccactataggtaactctggaagggactggcagcttccagtgtggttctcccgcctgtcgattggaccttgcaggaagccccgcctcatcaactcagtcaagggctttagttggcccggcgtcggtgagtggcgggtcttagctccgccctggccgtccgctgcgctgcctgggtcggcgccgtttccagttgagagatggcggccgccgcaggtagatcgctcctgctgctcctctcctctcggggcggcggcggcgggggcgccggcggctgcggggcgctgactgccggctgcttccctgggctgggcgtcagccgccaccggcagcagcagcaccaccggacggtgagcgagcgcgcccggaggctccgggg

SEQ ID NO: 5309 - DNA, 2300 bp, Homo sapien
ctgttgggcaataaagccttttgagtgagtgacatgatatctaccccggagaagccaatcatctcactgttttggtgtaggtggggcataaggattaaacaaacaaaaaacttccacgtcattttttagctattcttggccaagaaggtaccatttcagtcaaactttaaagaatattcttagaataagtgataacattttcttcgtatttatgtgtgtgttttgtttttgttttaaatttatcatctaaggctacactacaaagatgttttccaaaatttaaaataatgcttgtatttgcttcccaaactattttcctgctccagattttaaaaagaggtgtgagaatttaatcagctcataataataaacagctagcaaggaaatactcttctaaggaaattcaggacccaaaatctttcttaggcagtattcaaggagccctcattgtgagtttaagtggaaagaagtgtttttcaagagaaagtgtttgttattccaaagcgtattctgataactatttcggcaaaattatgaagcatcattaaaatagccttttacatgaatttttttttttttttttgagatggagtcttgctgtgtcgcccaggctggagtgcaatggcccgatctcggttcactgcaagctccgtctcccgggttcacaccattctcctgcctcagcctccggaatagctgggactataagcgcccgccaccacgcctggctaattttttgtatttttagtacagatggggtttcaccgtgttagccaggatggtctcgatctcctgacctcgtgatccgcccgcctctgcctcccaaagtgctgggattacaggcgtgagccaccgcgcccggccttacatgattttttattacgttattaatgtgttctgtttctgtaaatgcacacaaagtcaaatatgataaaatagtgctgtttctggagagtgtgagaatatccgtataaaggtgctgtaaaaatgaattgggtatttgagatgtatacacgtcagttaattcactctgaaggcatgtactcattctgggactttgatattgtaatcgttctacctctcctatattatgctacgcatcacagtcattagatcactccgtgatgtagagttaatttcagcatatctaaatattatcagttatgaatgataattctaggcgtgtagttgagagttacagcatacaccgttaatggttattaatttggtgcctattttgccaacttagaacactcacttagaactcaacttcgaacaaagcttttcacaaatatctatatcccccgttactcttatcatagctctattgttggtgaagattagccgaactgaacatgccatctctattgctgttattttcacgggtttgggtgtcaattatgggttccctagaatttgcccgtaattgactatgtcccactataggtaactctggaagggactggcagcttccagtgtggttctcccgcctgtcgattggaccttgcaggaagccccgcctcatcaactcagtcaagggctttagttggcccggcgtcggtgagtggcgggtcttagctccgccctggccgtccgctgcgctgcctgggtcggcgccgtttccagttgagagatggcggccgccgcaggtagatcgctcctgctgctcctctcctctcggggcggcggcggcgggggcgccggcggctgcggggcgctgactgccggctgcttccctgggctgggcgtcagccgccaccggcagcagcagcaccaccggacggtgagcgagcgcgcccggaggctccggggagggcggggcggcgctggcgtgtgggagccgccggcgggcaggccgccggggcagcaggcgagttacctcaactcccggccgctccggaggttgccgggcaccgaggagccgccgtgcccttcaggcgcctgcggcggcgaccaggaagggagggcgggcgggaggaagccgagaggaggaggaggggcgacggcggggatgttcccgcaggactggggacaccagggcggggaaggcacgggacttgaacctctccccgactcgcccccaatcgcgttccctcccttcttcgttcttaacagccctgccccaaggctccctgaacggagccagatggaagttgtcccctttccctcctcctccgggcgggttggggagttctgagttgccgcggccgccttgtgtgtgccaggagagtggcagtgccatgctgctgggagctgccccggagagcagcccaggaccccggcggggccgcccctcgtcc

SEQ ID NO: 5310 - DNA, 2300 bp, Homo sapien
aatagttcatgaaaggggactgagcttgcaggagagatttaatattggtatagtagaagcactgtaatgtagctccaggcctagaaatcaggagacctggactctaccccttactgtgacgttctgaacaagttacttcagcctcctagagtgcagtttcttctggtaactttggacaatttaaagctatatgcaaatgtgagcagcagctttggtacaaggaagacactgttgattgacatagatgacttttggaactcaaagtgctcttgcttttatgttcccattaattcagcacacatttactgaggcatacaagatacccagctaggtgttgtatcccattttactatatcagctcttctctaatccaatttgctaccttcatctgaattttttcattgattgaacttctataataactgtagtaaaggacatccttaaagaatgtttgaaatatgtggttaattctgactgtggcttgttttgtttagaagagtgctacccttatgctgtacctaacatttaaagttaataagaatctaaaagaaaattgtgcttaaaaaaaattgacagctttaatcagcagagtttttatttgattctgaaaacataatttttagatttctagaaatacatgctactcacaatagaggatattgaatgaaagaatttaatctttcaccctttcagtcgttctcataacttcataccctttagaccatgatactgaggcccatacagctattctctgtctttcatcaacaggaatgaataaaagttggtatactagggagaagaagaatgagggttaagattattagaatgggccgggtgcggtggctcaagcctgtaatcccagcattttaggaggtcgaggcaggtagatcacgaggtcaggagatcaagaccatcctggctaacacggtgaaaccccgtctctactaaaatatacaaaaaaattagccgggcatggtggtgggcgcctgtagtcccagctacttgggaggctgaggcaggaaaatggtgtgaacccaggaggtggagcttgcagtgagccgagatcgcgccactgcactccagcctgggtaacagagtgagactttgtctcaaaaaaaaaaaaaaaaaaagattattaggatgatggcatttttatttatgcctttgtatttgcaaatttgaaatactatatatttttcccttagcacttactaagggggaaaaaaatgaattaaaatggcaggactacagataaattattgtcaccattttaataagcataataatcaaattgattctaaacctctctactagtttttaacatttgctttaattttgtctttatctaatgaagatcattattatttgtattatttttcttaatgttaatcatgtcctcatttgtagcatttagacttccaagaatataatggtagatatttatttcaaattttttgagttacccaaatatgaatttactttttacatttgtggacaacttttttgttttaacaaaaactattggctgggcatggtggctaatgcctataataccagcactttgggaggccaaggcaggcagatcgcttgagcccgggagttcgagaccagcctgggcaacacggtgaaaacttgtctgtacaaaaaatacaaaaattagccaggcttgtggccggtgcacacctgtagtcccagctacttgggaagttaacgtcggaggattacttgagccctggaggtaggggctgcagtgagccaagatcacaccactgcactccagcctgggtgatagagtaagactttgtctcaaaaaaaaaaaaaaaagagagctattactttccttcagtttaacactgaaggtgagatacctataatggatgaatctgcctcatctgatagtcccaggaatagcaatcatttaaggcatacattttttaaaaaatgtaacttttgtttcagacctcttaagtcatgaaaatgcagcaacgctgaatgatgtaaagacattggtccagcaactatacaccacactgtgcattgagcagcaccagttaaacaaggaaagggagcttattgaaagactagaggatctcaaagagcagctggctcccctggaaaaggtaaaacttccaatctcaggttttttaccttaacctgtattttttccagagcatatatgtttctgttttttcttgtaagttttatgcaattgagtcatgtcaatcaagttagttctttagtttatgggactgaaccataaaaaagtttaagtcaaagctaagaaagggcttgaaaaggaa

SEQ ID NO: 5311 - DNA, 2300 bp, Homo sapien
tggggtttcttcaacaaatggaaggaaggggggaagaccattatggataaaaatatatatatatatatatattttttttttgaaacggagtctccctctgttgcctaggctggagtccagtggcacaatctcggctcactgtaacctctgcctcccaggttcaagtgattttcctgtctcagcctcccaagaagctgggattacagacgtgcaccatcacacttggctagttttgcatttttaatagagatggggtttcaccatgttggccgggctggtctcgaactcctgacctcaggtgatccacccaccttggcctcccaaagtgctgggattacaggtgtgagccactgcacccagctgataaaaataaatttaagtgacaatcaaaatgcaatatataaatcttgtttggatcctgactcaacccagcaataaaaggaatatttggaactattggagcaatttaaatatggattggatatgagttaaggaattattactaattttcatagttgtaataaaagcatcatgattatgtaaaaaaatacaatgtgttagaaatgcatactggtatgtaaatgaaattgatagaatgttagtaattattatagctgagtgttcattattgttctttatacttttgtatatatatttgaaatttttcatcataaaaagtaaaaaatgaaagagcaggtcaactaaaaaggaaaaaatagaaataagggggaaaaaacatcttaccatcctgggaattcttgtttacagaaccaaaggctatctggtgaaagtccttgactccagcaatcaatcctggcaacaagtctgggtttatctcatgcacacgtcctctgtttctctgcaacacatatgaagccctcagatggcttcctaggcgcaggaagttgtgggggattgttttttctgtttaaagcactgatacttagcaacactatcctgcaatgagacagcagagtcatccattgctgccatcaaaccacaacttaataagttaatggtcaaattgcctgtgtcccactgatgttagtaatgaagtagctaactacaattttagatcaatggaaaccccttgcttgaccataaaccctgtgcttctggagaccatgtgtacttttgtcattgtcaaaaaccagtgattgcccgagctcggtggctcacacctgtaatcccagcactttgggaggccaaggcaggcggatcacgaggtcaggagatcgagaccatcctggctaacacagtgaaaccctgtctctactaaaaatacaaaaaaattagctgggcgtggtggtgggcgcctatagtcccagttacttgggaggctgaggcaggagaatggcgtgaacccgggaggcgaagcttgcaatgagccgagatcacaccactgcactccagcctgagcgacagagtaagactccgtctgaaaaaaaaaattgtgctaagaagcacattttctctcctttgtctaaaagtgaaacttcaggaaattttgacatttaattttccagagtgttaatttaatgagtagtttctaattttaagctcctaccccatcttaatgtgagaattagtgaaataaataacattaaaccattttttaattttgggagtaaagacaataaaaatatgaggtattgctgcttgaattagtaaaaacacaatttaaaccttgtttctttcagaagttttgaggccaaagaccgtaataaaacaaactcaggagcttatttcaagagaatactgtccttgtctcatacctgtccttactactttgttttgtgtgctattataagctcctcaaccatctgaccaagacagttgcagtgatttggcttcatccattctcgtttagtgtgcagtgctatggctgcaacattgtgaaatcaattcctagaagtcacaaagcaagaatttgacgtgaagggatgtccctcatttagaattcccttctggataagatactggggtttcattgcagggaattcttgagagaaaacaataggaggatgagggattgtgagttgtgtttttttttttttttcctaaagaaaactattaataaaggaaccctgttgacagtgtaaagcagtgcttctctctggggccaaggccagagctgtggacaccttatcccactcatcctcatcctcttcctctgataaagcccctaccagtgctgataaagtctttctcgtgagagcctagaggccttaaaaaaaaaagtgcttgaaagagaaggggacaaaggaacaccagtattaagaggattttccagtgtttct

SEQ ID NO: 5312 - DNA, 2300 bp, Homo sapien
tataaaattatgacaccaatttttaaaaaatttatgtatatattgatactcatgtatctctattaaccttattatattttacaaataataaaacattttttaaaggaaaaagctttatagttagctttttttttttgaggcagagtctcactctgtcacccaggctggagtgcagtggcacgatcttggctcactgcaacctccacttccctggttcaagcaattctcctgcctcagcctcctgagtagctgggattataggtgcacgccaccacgccgggctaatctttttgtatttttagtagagacggggtttcaccatattggccagactggtcttgaacccctgacctcaggcaatccacctgcctcggccccccaaagtcctgggattacaggtgtgagccaccgcgcccagcctatagttagtattttaatggcaagttcccctgcttttggaaaaggagctctgcatttgcagttttgttttggtgaagccctacaaattatgtagctggccctggtgccagctttcccattgatagcctgtccagctttgatcaagtcacttaccctctgcatcagttttctcacccccaaatgggactatttaatctgcttcatgaaactggcatgaacatttgtgcatatgtgcatgtgtatgtgtgtgcctctgtgtatgtgcatatgcatgaaagtggtttgaaaaagtatagatgctttaaaatattgggtggcattgttgtgactatgaataatttttaaccactgcccttcctggagtctgagtcttcagccaaacacatttactgaaaatgaagaaattaattcatttaattcattattttccatggggctttccagacaaacatttgagaaaggagctaaatgattcatgtggtccataaaggtatcatttttatagactggtgattattttattattactatttttttgagacagagtttcgctcttgtcgcccatgctggagtgcaatggcgtgctctcggctcactgcaacctccgcctcctgggttcaagtgattctcctgccttagccttcctagtagctgggattacaggcggctgctaccttgcctggctaatttttgtatttttagtggagacggggtttcgctatgttggtcaggctggcctcaaactcctgacctcaggtgatccaaacgcctcggcctcccaaaatgctgggattacaggcatgcaccaccatgcccggtcctagactagtgattttatagatggcatttcttcacacgactaaaagcagtctaaactgaaaacgatgccaaaacactagacttcagtcaacagtcttaaaagcctacactcccaaatagactatttgataaaccctctgacttctaagaaactcaaaggaaaaacaccaccaggagagccgagtgcccccagaattgtccttggaccatctgtagatcttgtcttatgatccacttatgctgagtgtaaacagagatactgctgtaaatagaagccaaaatgtccctgcactcagatggctacatctgggagctctgccaaattagaggatttatgcgtcagagccaggtgggttccacagcagaagctggggtctcaaatctgaacttctgcttaacacacacttggtacctactctgacactatcgtgacccttggtaaagtgactattaattcctaccgctggggctttcctgggccctgtacacatcctcctgactctccttggagactatgtaggtagctggctgaggggtgtggctaggaccttcggtcaagctcttctatcaagaggctggccctgaagagccacacttgtaactgatcaacagcttaacaagctggtcggggtagaactccgaatccttcaccgttcctgcgtctcagaagctggctaacatctccctccctccagggtggtagaatccactttgaaatgttctctctccctggccctcccactccctaacctttgccctctttctaattgccctgatctcatcccaacctccatagctatgtttaaagtccacctctggggaacagacagattgaatgttccagataatccctttcccagtcctgcctgacatctgggtagggggtttgtccctggaattctgggacactggctggggtttgaggagagaagccagtacctacctggctgcaggatgaagctggccagtggcttcttggttttgtggctcagccttgggggtggcctggctcagagcgacacgagccctgacacggaggagtcctattcagactggggcct

SEQ ID NO: 5313 - DNA, 2300 bp, Homo sapien
acatttctcagcttagccactgctctgtttccctgggtctctgggtactacttcagccctgggatgtgcagctgctcagcttggccagtgcaacaattccccaagggtgatgtgctgtttcagctcaggctcaggggacgtgactgttctgggtggcccagacatctcatgggatgcagggttctgccaaagtactattttcttgggagggagtacatggctgcagctcctgcctcagggagttgggggaggggtgggtagagcagttccacctctcttgaccccaccaggaagggtgtaacagctgctggcagctctgcttgggaatgtcaggccttcaagtaggccttcattcctggcttagcttcagggatgaaggggtgctgtggctactggccccagagcaagacacactccagcagttccagttccaccagtattctccttctggtttcatcagcagcactcttaattatgttctcctttgattttgtcagcattttattgtgttgtgtgattgagggaaagagttaagtatcattctcttcactttaacaaataagaaaactgagatgatatccaaagttacattgtaattaagagagctggaacttgaactcagaccaaatatttttcttaaattttggtgcgtcacactgggacattgtcgtaagcaactgaagttgttagggcccttcgacaggaataattaaattggtgttaatttctttccttttttagcagggaaaaaatatgtaagaaaagatattttattaaagtggattgcgagttcagcatttggggctttggaaaacattttttgatttaagttccaaaggaaagtgtttagtgaaacaaaataatagaaatctcaaattttagcttatgtattaaatttttaaaaattagctgggtgtggtagcatgcacctgtagtcccagctactcaggaggctgaagtgggaggatcacttgtgccccaaaggttgaggctgcagtgtgctctgattgcatcactgcactccagcctgtctctggtggggggtggggaggggtacatatgtagatatagatctatatatatagatatctatatatgtagatctgtatagagatatagatatctatatatacatctgtagatatagatatctatatatacatctgtagatatagatatctatatatacatctgtagatatagatatctatatatacatctgtagatatagatatctatatatacatctgtagatatagatatctatatatacatctgtagatatagatctgtacatagatatatagtagctgtcctttgtttttcatccctgttttcataggaactcttgttgattttaaatatttttcatttctctgtaaatacctgaccatgatctataaaagtccaaaaaatgaggttcatagattttttttgaatagtaatctttatagttcttttctttcatgctttgtgtctttccttcaggtagcaaattatggagttggaggacagtatgaaccccattttgactttgcacgggtaagtgaaaaagaaatggagaaattcactgaggcttatgcattacattgtttgtctcaaaacaaaacaaaaaaacagtctcactctgtcacccaggctggagtgcagtagcacgatcttggctcactgcaacctctgcctcctgggttggagcaattctcctacctcagcctcccgagtagctgggatcacaggcatgcgccaccatgcccagctaatttttgtatttttagtagcgacagggtttcgccattttggccaggctggtcttgaacttctgacctcaggtgatccacccacctcagcctcccagagtgctgggattacaggcgtgagccactgtgcccggccgcattacattgttaaagaaaaagttattcttgacacttgttaaagatggtaaggcagacttcattcaaggggggaccattgcgataggtatagggaccactgcaaatgcagtgggattttgcagtaagggagagaggttaagcccaattccaaatacaacaaggaaaagtgggaatttatagccaatgagcaagggtgggtgttagtagatggaaaattactaagaggtaagggaagattctggctaaactgacctaacaggattcttgctgaagtcagggaagagtgatcatcatccaggggatagtggaagatgaagaacccagttaggttttgagggtgatcacatggcaaggacggggaattctggctaacctgacttagcagggttcttgcttaaattggac

SEQ ID NO: 5314 - DNA, 2300 bp, Homo sapien
tactgagtaaactgtcaactttcagagtcagctctatgtagggctagtgaatatgttgattacagctccatttgaggaagtttttttttttttttttgagatggagtctgactctgtccccaggctggagtgcaatggtgtgatctcagctcactgcaacctctgcctcctgggtccaaatgattctcatgcctccgcctcctgagtagctgggattacaggtgtttgccaccatgcccagctaatttttgcatttttagtagagacagggtttcaccatgttggccaggatggtcttgatctcctgaccttgtgatccgtctgccttggcctcgcaaagtgcagggattacaggtgtgagccaccgcacgccctgcctctttggtcttataattactttatactcctaaaaagtattgaggactccaaaaagcttttatgtggatcatatttatcaacatttactatattaggaattaaaacaaacatataaaatatttattcatttaaaacaacaataataaacctgttacatgttaacataacataaataactttttttttgagagagggtctggccatgttgcccaggctgatttcgaactcctgggctcaggtgatcttcccgcctcggcctcccaaagtgctgggattacaggtgtgagccacttcatttggcctaataacatatttttaatgaaaaataactattttccaaagcaaaataatttagtgagaagagtggcattattttacatttctgcaaatctcttcagtgtctgggctaatagaagattctcatatctgtgtctgcgttccatctgtatcacaggcatgtagtctctggaagacctcactgtattgttattagagtgaaaaaggcagtaagtcttagtatgaaaataaagtcttagtatgaaaataattttgaccttatggattccctgactacgctttcagaaccattgatttagacatcattatatctactttttagttgcctagtgctcccagagtaccctctctctctttctgtagctatataatcactcacctcctgcgtaagtcaaatgttaattattgctatactttttagcatacatggaaaactttagaaaccacaattcttaatgaataacaagtcttagcaactcatttttctctttaactgacaaggaaaaaattatcttcttcattgtattctccctcatagtacagggagatataaagaaacccttggtttggggttactttataactaaggcaaatgttagactaagatcaaacgcaacattgggtgccttatataaattaatgttactggagaatctaatatttactaagtcatttctgtgtgtgaggcatgtgttaagtgctttacatacattatctcattttattctcacaagaatcttacaagatgggtagtaccgtcatttctattttacagatgagtaaacggatacggagaggttgttaatgcctagtgttacacacaggattgaggcaggatttgaattgagataacctgaccctggagctcttagtctattatctactgataaggtataaaggtaggagatagagcacgattagtataaaatgagtgctgagatgtgagaggaacaagacagctgagataccaagactgaatctctattattttccaccctagaaaaattctgctttattttctacactcccacgttcctcttctcatttttaagatactttattgccggcggcctcgtcgcttaggcctgacgcggaccctgaaatcaaggaggcaaactgaacaggagcgggggaaaccccgtggtaaccacggtaacggtggcggggcgagaaccctgcgcaggcgcgttacatcccactcccgcttacccacaccacggcggccggtcccagccactcctctcggcctcagactccacgggccggccacgggtgggggcagcagggaggcacgggcttggcgcctgcgcagtcgccggggcgctggtgtgatcgagctcacgtagcgagggctgcagtcgcctcctccctggcgctgccatcgcggcctagaggttataaaagggctaacgggctccctctgctgcccagtcgcgccgccagcgggctgagggtaggaagtagccgctccgagtggaggcgactgggggctgaagagcgcgccgccctctcgtcccactttccaggtgagacgctccctcgatcccggagactgaggccactgggcagccgtggaccttctcggacggctgcggcgatccattccttcccgctgtggtggtact

SEQ ID NO: 5315 - DNA, 2300 bp, Homo sapien
cagtagctgagacagcaggtgggcgccaccatgcctagataatttttcttttttttttttagagacagagtcttgccacgttgctaaggctggtctcaaattcctaggctcaagtgatcctcctaccttggtctcccaaaccgctggtgttacaggcatgagccactgtgcttagccccagtattcttattttggttgttgataccattattttgccagttttaattacatctgcaaagttcttttgccgtgtacggtaacatattcacaggttttcgaaattaggatgtggacctttttgaggggccattattctgcctaccacagtgagcatccccgttgaggctacttgacgcaggtggtctgactacctcactgcagccatttcccacaatgccaaagtgccagcatgttagtgactagagtcatttccagtttcagctacattctagaatcccttatgtcttgattgtcatgtccctattcataagcaaggaagaagtctctatcacttctactcccaaggcccgtccacatgtctgctgacttggcattcacaggtaaacccatcctcttacactgagtttttcctctgttaaaggtaaataacataaggttactccattgcttaaaatacttcaatgctttcccattacttgttacagtacttaacaggtcggcatgacctagcttttgcgtacctctccaatctcctctcatatgggttccttccttccttactgcattgtagccacattgaatttctttttttttttctttttctttttcagacggagtctcgctctgtcacccaggctggagtgcagtggcgcgatctgggctcactgcaagctctgcctcccgggttcacgccattctcctacctcagcctcctgagtagctgggactacaggcgcccgccaccacgcccggctaattttttgtatttttagtagagatggggtttcaccgtgttagccaggatggtctcaatctcctgacctcatgatccacctgcctcagcctcccaaagtgctgggattacaggcgtgagccactgcgcccggccccacattgaatttctttagctcctcaaatgcaccaagttgtgtgtgtgtgtgtgtgtgtgtgtgtgtgtgtgtgtgtgtgtgtgtgttgctacatggacctcacatataaagacacacagtaatattctctctctctaaatgttcttattcacacacttcatctagctaactcagttctcagtttaaatgtcatttctatagtgatacttttcttgtgatatcaatctaagccatgtccctcgccttcttctttcccagagcaccctgatgatttcatttttttttttttttgagacggagttttgctcttgttgcccaggctggagtgcaatggcacaatcttggctcactgcaacctccgcatctggggttcaagcaattctcctgcctcagcctcccaagtagctgggactacaggcgtgcaccactacacccagctaatttttttttttgtatttttagtagagaccgggttccaccatgttggataggttggtctcgaactcctgacctcaggtgatctgcccgccttggcctcccaaagtgctgagattacaggtatgagccactgtgccccgccaaacatgtttattggccatatatatatatatatatatatatatatttttttttttttttttgagatggagtctcattctgttgccaggctggagtgccatggcacaaccttggctcactgcaacctctgcctcctgggttcaagcaattctcctgcctcatcctcccgagtacctgggactgcaggcgcgcaccaccacacccagctaatttttgtatttttagtagagacggggttacaccatgttggccaggctggtctcaatctcttgacgttgtgatccgcctgcctccacctcccaaagttctgggattacagttgtgagccaccgcaccaagccttttttttttttttttttttttagatggaatctcactctgttatccaggctggagggcagttgcatgatctcagctcactgcaacctccacctcccggttttaagtgattcttgtgccttagcctcccgagtagctggaactacagacatgcgccatgatgtccatctaattttcatatatatatatatgtattttttttttaacagacatgggggtttcaccatgttggccaggctggtctcgaacttctgacctcaggtgatccacccagctcggccacccaaagtactgggattacaggtgtgagcc

SEQ ID NO: 5316 - DNA, 2300 bp, Homo sapien
tcccaaagtgctgggattacaggcatgagccaccatgcccggcctactctgatctcatctctgatcaccatgctctttcctagcctttcctcaaacggcacactcccaccccagggcctttgcatatgcttattttgctctgtctacaaatctctttccatagatataaatttggtttcttcatcaccttcttcagggtctttgtttaaatattatcttaacaatgaggctgaccatcctatataaaatagcaaaataatccctctacttatcttgctttatttttcttcttaagctttataaccacgacacattgtatatttactcgtttgtttccccttctagaatgtaagttacatgaggacagagattttcatgttttgttccctgctgtatcctatccctataacagtcctaggcacattgggtactcattaaatacatgttgaatgagtggacttcttctcttggctgggtgcggtggctcacgcctgtaatcccagcactttggaaggctgaggcgagtggatcacttgaggtcagaagtttaagacagcctggtcaacatggcgaaaccctggctttactaaaaatacaaaaattagccaggcatggtggtgtgcacctgttatcccagctgctcgggaggctgaagcaggagaatcacttgactccggaggaggaggtttcagtaagccaagattgtacgtaccactgctctccaacctgagcgacagagcaactccatctcaaaaaaaaaaaaagtgtcttctctcataggcaagtaacttcagtagtaaaacgagaagagagcagcaccaaagtagctctgctgagaggtgaagccagctggacttcctgggtggagtggggacttggtgaacttttctgtctagttagagaattgtaaatgcaccaatcagcacactgtaaaaatgcaccaatcagcactctgtgtccagctaaaggattgtaaacacaccaatcagcactctgtaaaaatgcaccaatcagcgctctgtgtctaggtaaaggattgtaaacgcaccaatcagcactctgtttccagctaaaggattgtaaacacaccaatcagcactctgtaaaaatgcaccaatcagtgctctgtgtctagctaaaggattgtaaacacaccaatcagcactctgtgtctagctaaaggattgtaaatgcaccaatcagcactgtgtctagctaaaggattgtaaacgcaccaatcagcactctgtaaaaacgcaccaatcagcactctgtgtctagctaaaggattgtaaatgcacaaatcagcactctgtcaaatggaccaatcagcactccataaaatggaccaatcagtgctctgtaaaatggaccattcagcaggatgtgggcagggacaaataagggaataaaagctggcacccccaacagcagcggcaacctactcgggtccccttccacgctgtggaagctttgttctctcgctcttcacaataaatcttgctgctgctcactctttgggttcgtgccacctttaagagctataacactcaccgaaagctccacggcttcattcttgaagtcagcaagaccaagaacccactggaaggaaccaactccggacacacttctaggagactacttccagtcaaatggaatgcgcttcctctgatcaagaaatgaatcctaccataagttcaaacatatctatacatacctatacagagtcccatccttttaaattggaagaacttcatgaaattttagagctagttctaaagtgtgcagagagagaactagagatatactaaggttaaaaggtatttgattcccacccctgcttcatcctctccccagcctcataatatatgccttctgtgtatgagggtggacttaatgactttatctttttttaattaaaaaatggatctaatactaacctactttctccaaggatacagtagttctcttggtaataagatcttagatgttcatgcttttgacaatcatggttaacttgcagctggagaacacagcagcatgcctgggaactgaactacaattcccagagtgcatctctaggaggattctgggaagtgtggcagaagcagcaatggtccctccagggaacggaagccgttgaacgtgaacatttggagtttcctcttttgtgctgattcctgaggactaggaaggtgccccgaaaagaattcagagtgagtacagtgaaacagaaacctgctcagcttctaagtgcaggaaggacttcacagggaggcatgatcagaacttgaaaaaag

SEQ ID NO: 5317 - DNA, 2300 bp, Homo sapien
atacttctctgctgaagcaggagaatcacttgaacccaggaggcggaggttgcagtgagccgagatcgcgccactgcactccaggctgggcgacagagtaagactccgtctcaaaaaaaataaaataaaataaattgtctcgtgattgacatatatgcaagggagaatggagattatttgcttcctttactaggttgcaaattccttgagggcataaatcatatttaattaaattaattaattaatttactttcaagatgcattctcaccctgttgcccaggctggagtgcagtagcgcgacctcagctcactgcaacctccacctcccaggttcaagcgattctcctgcctcagcctcccaaatagctgggactacaggcacctgccaccatgccgagccaatttttgtatttttagttgaaatgaggtttcactatcttggccaggctggtcttgaactcctgacctcgtgatccgcccacctcagcctcccaaagtgctgggattacaggcatgagccatcgcacccggccttaatttttgtatttttagtagagatggagttttgccatgttggccaggctggtcttgaactcctgacctcaagtgatccgcccacatcagcctcccaaagtgttgggattacaggcatgagccaccgtgctcagccctaaatcatattttacacatgtttatgtaatctagatgatgctggactagacaagtgcttaataagtacttgctgatgagcaggttggatgaagcaaaagaaatatcacagtataagggaagatgagaacttacttctgtctgccctggtttcacagttgcatggcaagcaatcatgagtgagccactagggaagggccaatgctgggatgcatagtactgcaggctttccacctccaatcccacctcttctgcaacttctcggcggatggtctcttccacactttcacctacaagcactcagattaattcaggacagccctgtaggctagaagggtgatacagacagcccatttgagaaaggtgcacaacactggctccaaagtttcaatgaaatgctcttgggagtgtcctaaaactctgagtcattccaacaataagaatcaggtccagagctgtgtgttgaaccacagtgcttaagtctgctaggtctaaagtaagtgtgacagtaggagggactactgcactcagctttcataaaattccacttttcaccatttgcaaatttgaccccaatagactagagaaaaaaaccaacctgtaaataaatactgaattctagcaaatgttacgcatgctgaaataggaagaagtgtactaatatcttcaatctatgcatcaaaaaataagatagattaatggatagatggacagctttgtgataaagtaagtgtagtaaaaattcatggaatctaggggtgtgctcagagcagggggcctaaagaatggctcctctgtttataacacacccaacaggaatctggggtcaatgtgatgagaggcacaaagcttgtggcctccctacaaacaaatgcctacatgtgaagaggaaaaaaaattatagaatctgggtagtgggtgtatgggtgttcactgtataattctttcaacaatctcctatgtttgaaaatttgcttaaaaaaatagtgtggctcacacctgtaatcccaacactttgggaggtcaaggcaggtaggtcacttgaagccaggagttcaggactggcctaggcaacacggcgagaccctgtctctacaaaaaattttaaaaattagccgggcatggtagcctgtgcctgtagtcctagctattcaggaggctgaggtgggaggattgcttgaacccagaaggttgaggctgtaatgagccatgattgcaccactgcactccagcctgagcaacagggtgagactcccatctcaaaaaaaaggaaaggaaaaaattttatatatatatatatatatatatataaaatgccagaaagcagttttcttgacatgatagaaaagaatgtgcttgggaattcaagctctatagcaacaagacagagaagattgtattagtaagattgtatatcttccagtgtcacctgtatatcccctaaactcctcacctatatcacaaaaacctgccaaggcagaatacattcccttgggaaaggagctttggcgggcaagcaggcatcgggtcccatctgacaccagcgtgatcgccacaggagccatctaggaaaggggaatggaaactgagatgctggcactttgggccctgccaatgagctaaagcagtg

SEQ ID NO: 5318 - DNA, 2300 bp, Homo sapien
agtaatttgcctaaaagtcacgtggctagaagacagcctagccagaaacccaagaatgattcaaaatagcatgcttgcaattatcatgtatgtgcataattaatatttaataaattaaatagttaataattaatattaatagttaatatatttatggttgctaaaattacatagctaaatgaaaggaaaagttaatatttaattaataaatttatggttgctaaaattatatagctccatgaaggaaaaaaaattggaatttggggttaaagcccaagctcaactcctgactttttggctatataatcttaaaatatgtaacatttctgatataatttcatcttctgaaagactgaagataatcatacccactttacagagttgttaagatcaaaaagtgaagtgagctgggcatggtggctcacgccaacactttgggaggccaaagtgggagaaccgcttgagtccaggagtttgagaccagcctgggcaacatagtgggaccctgtctctaccaaaaaaaaatttttttttaattagccagttgtggtggtgtgcacctgtagtctcagctactcaagaggctacattgtgaggatcacctgagcccataggtggaggctgcagtgagcaaggattgcactactgccctccagcctggacaactgagcaagaccctgtctccaaaaaaaaaaaaaaagtgaaggcccttttggaagtgtaaagcattaataaatgtatgacactattattactttctaaattattatacaccacttcggtcagggtagggggcagctctttttatttttttattatttatttatttattttgagacggagtttcactcttgtcacccagactggagtgcgatggcgtgacctctgctcactgcaacctctgcctcccgggttcaagtgattctcctgcctcatcctcccaagtagctgggtttacaggcccccgcctccatgcccggccatttttttttttttttttgcatttttagtagagatggggtttcgccatgttggccaggctggtctcgaactcctggcctcaagtgatccgcccgcctcagcctcccaaagtgctgggattacaagcgtgagccaccacggccggccgtgagggtggatctttttaaagccagaaatatttgctctttaaagtctcaaaagcaaaactgatctttatggattctggtgcttaattgcagaggtggggaggcagtatgtgtgatggttatgaccacaggcttcggaatcagatcgacatcaggtttgtacctctcagctctaccaccttcaagctgtgtgatctttggcatgctacaatctttaattctgggatctttatctgtagaatgtgcaaaataatgttcccaatctgatatcattgataggaatgagcaaatgtatgtaaatagctttgcacagtgtcaagtgagcactttcctggagccctcagttagctattaataacttctcgagctaccatggccattaacaatgggacctgaagcactgcggatgctacaaatgcttcagcagacccagtgcttgatttcaggaatttcagacgaagggcgacacgccctcagctggagatggaggaagaaggggcagggtccagcagggctgagaggagagaattccgaagaaaaatctctccccagccctgggaaaggaaaggaacgaaggactggtcaaggagggtccccagagcgcccgccgcccgccccggctggggtggctgagcagtccactcacagctccaagctctgtggcaccgccttccgagtgtatctggagatcatcctcctcctcctcctcctcctcctcctcctcagccgcggccggggcaggcacgccagggtgggggcctccgggcctggccctcccgccggctccggcccggcccctcccgccacctaccggccccgtctcgccccgtcacctagactccgagcagccacctccccagggtccccacctctccagtcctccgacctccctgctttgccgcgggggcggaagtgacgaaggcccccggacactcgcaaaatgctcccgccgacgcacagcagtgacgacacacaaggtttcggggactgagtgggtttcagactttctctcaggatttccgctggcttcaggttccggtcaggcgtcgggacagagcctgatccaggcttcggcggccggtggcagctctcgatcagctctcgcagtcggagaggcggctaaggaaaggtgccacagcagagacgcgaaggagaggccctagaaccgtaaga

SEQ ID NO: 5319 - DNA, 2300 bp, Homo sapien
cctgaatgtatttgactacagagttttgtgaggaaagtctaccgcagattactaggaacatatattgattgaccccatagattactggaacatataatgattgaccccatagcttaatccagtgcatacattggagtctctagagcagcaatattcaatacaaatatgatataagccacatatgtaatttaaaattttcaggtggtcacattaaaaaagaaaggtgaaattggccgagtgcagtggctcatgtcttgaatcccagtactttgggaggctgaggtaggaggatcatttgaggccaggagttagagacagcctgagcaacataacaagatcccaatctctacaaaaaaaaaaaaaattaaagattaaataattagccaagtgtggtggtgagtacctgtagtctcagatacacaggaggctgagacagaagaatcccttgagcccaggaggtcaaggctgcagtgagctatgaccacaccactgtactccagcttggacaacacagcaagaccccatctcaaaaaataaaataaaagtgaaatttttttacctttttattttgaaataattatagactcacaggaagttgtaaaaatagtaccaagaatcccatgaacttttcactcagcttcccccaatgatgacatcttatgtaactgtggtataatttaaaagccaggaaaatgacgttggtacaatactgttaactagacctacagaccttatccagtttttacatccactcctgtgtgtgtgtatgtgtgtatatagttctttctatgcaatttggtcccatttacagattactgcaaatacgactataaatcaagatagctgtttcatccccaccaaggaacttcactgggtatccctatccctttatagttatatccactcttgtctccatccctggcaaccattaatctgttctctaccactatagttttgtccaatgtaccattatataaatggcccttaaacaatgcaggggttaggggtattgaccccctgtacagtaaaacatccatgttcaacttttgactccccagaacttaaccactaatagcctactgttgactggaagccttaccaataacatagtcaacacaaaaatagactggtagttacatatattttacacattcatgacatacctttttcttaaattttttcgatatttctaggctacatggttcatctgttgagtttcttcaaattgttgcaaatctccaaaaaattttccaatatatttattgaaaaaaatctgcatataaatgggctcacacagtttaaacctgtgttgttcaaggtcaactgtagtagttaatggtttttctattggctttggctttttgcactaaaaagcatggtgcttttgagatccatccaagttgttgcatgtatcaatagtttatttctctttattgctgaataatatttcattatgtggaaatatcaatgttaaaggacatttgagttgttttcagttatttttttcaactgtaaataaagctgctgtgaacatttgtatacagatttttgtatgaatgtaagttttcatttctctaggcataatgcccaagagtgcaactgctagggctctgggtaaatgcatatgtttagttttattagaaactgtcaaactattccagaatggctataccatttgacattcctgccagcaatgtatgagacatccggtttctccacatccatgcctgcattttgtgttatcattatttttaattttagctgttctaattggtgtgtggtgatatctactatattttcaacttgtagtgacattaattttaagaatatattttaacaacccaatatatccaaaatattatcattttaatatgtaatcaagataataaatgaagtattgcaaattcttcttgaaatccaatgtgttttacacttaaaacacaattctgactagccagattttaatcactggtggctaccatatcagacagtgcagttccagagcagaggaagtaggtgactaacttctagattaaattattgaattgtatgtatttttttatacaggaaatataactttgttttgtctttcacaggaaaggaataacaaaacatgctcttaaccatcatccccctccagagaagctggaggaaatttcccccaccagtgacagtcatgagaaagacacaagttcccaaaggtaataacacaaagtgtacttgtttacttattgcacttgctcatggcagaggttttgttttttggcttaagattggtgtcaagccttgtgctaatgaaa

SEQ ID NO: 5320 - DNA, 2300 bp, Homo sapien
aagaacatggactcaggaggagttcaacatctgatttttaatcctggtcctacaacttattagctgagtaacattgggaaaattacttaactgataatagtgtatcttatagcagcagtccccaacctttttggcaccagggaccagttttgtggaagacagtttttccatggactgtgcagtggggtgagggatggtttcaggatgattcaagtgcattacatttattatacactttatttctattatttttacattgtaatatatgatgaaataattatacaactcaccataatgtagaatcagtgggagccttgagcttgttttcctgcaactagatggttccatccggggatgatgggagacagtgacagatgatcaggcattagattcccataaggaatgcacaacctagatcccttgcatgcgcagtttgtgctcctgtgagaatctgatgccaccactgatctgacagaaggcagagctcaggtggtaatgcgagccatggggagctgctgtaaatacagatgaagcttcatgcactcacctgccacttacctcctgctctgcagcccagttcctaacaggccacagaccagcaccggtctgtgaccccggggttcgggacccctgtctcataggatgttgcaaatattaatgagataatgtatgtaaaacttggcacgatgcttggcatgtagtaaatgctgagtaaatattagctgtagttattttaagtaatagaacagggaagatggttcttcagtctctcagaacttctattagtgtctgagatgcaatgtgtgattaaaaaaaatattgtataatcataggccgggcgtgatggctcacatctgtagtctcagcactttgggagcccaagacaggtggatcacttgagctcaggagttcaagaccagcctgggcaatatggcaaaactctgtctctaccaaaaatacaaaaaaaagaaaaggctgggcacggtggctcatgcctgtagtcccagcactttgggaggccgatgtaggcggatcacttgaggtcaggagttcaagaccagcctggccaacatggcaaaaccccgtctctactaaaaatacaaaaattggctgggggtggtggcgcacacctgtagtcccagctaccaaggaggctgaggcaggagaatcacttgaacccgagaggaggaggttgcagtgagccgagatcacgccactgcactcagtctgggcaacagagcgagactccatctcaaaaaaacaaaacaaaagtacaaacaaaattagccagtcatggtggcacacacctgtagtcccagctacttgggaagctaaagtgggagaatcacttgaacccaggaggcggaggttgcagtgagctgatttcgcaccactgcattccagcctgggtgacagagcgagaccccatctcaaaaaataaaaaataaaaagtgccatacaagatcagatactactattagcatttctgaaatgtctttagttgtcaagagtatgttataggctgggtgcggtggcttatgcctgtaaatcctagcactttgggaggctgaggtgggcagattgcctgagctcaggagttcaagaccagcctgggcaacatggtgaaaccccttctctactaaaatgcaaaaatgagctgggtgtggtggtgcacacctgtagtcccagctacttgggagactaaggcaagagaatcatttgaatccaggaggccgaggttgcaatgagtcaatatcgtgccactgcactgtagcctgggcgacagcatgagattctgtctccaaaaaaaaaagagtatgtcataggtgagatgttgaagtattcattgtaaactatgactagaattatttggaatgactgccatcaattctgtaggaattaggacttttccataatgctcaaatttcaagttcttcatttatttttgcctatgtggatatatttgtacacatgttaatcacctagtaagttgctgagtagttaatgccacagaaacttgaggacatatgaaaaattttcttttttctctcctcctcccaaattgtgcctttagcaagtctgacatcacaagagaatcatcttttacatcagccgacactgggaattcactgtctgcttttccaagttatacaggcgcagggatatctactgaaggaagctcggacttctcctggggatatggtgtgagttatatgttatcagtctgatagagtgcttgggagatgattctgggaattaggatttgtcagtatatttcattccttcactctcctgcattg

SEQ ID NO: 5321 - DNA, 2300 bp, Homo sapien
attttcaaacatagatatgacttttctcccactggaacactggaatgtaaaaggatgtgtaaatttagatgtagtagaggataagcaaggaatctgaagaaaatgatcagatttgcattttgtaaccatccctctgactgctttttttttttttttttaagagatgaggtctcacttggttacccaggctagcagtagcacaatcatagctcactacagcctcgaactctagggctcaagtagtcctcccacctcagcctcctgagtagctgggactataggcacagaccaccatgcctggctaattttttattttttttagagatggcagtcttgtgatgttgcccaggctggtctcaaacttctggcctcaagtgatcctccccactcagcctcctgagttgctgagattacaggtgtgaacctccatgcccagccctctgactattctggtttttggcttttgttttcttttttgagacggagttttgcttttgttgcccaggctggagtgcaatggcacgatcttggctcaccacaacctccgcctcccgggttcaagagattctcctgcctcagcctcccaagtagctgggattactggcgtgagccgtgacgcccagctaattttgtatttttagtacaggcagggtttctccatgtcggtcaggctggtctcgaactcctgacttcaggatctcccgcctcggcctcccaaattgctgggattacaggcatgagtcacccgccttggcctttttttttttttttttgagacggagtttcattcttgttgcccaggcaggagtgcaatagcacaatctcggctcaccgcaacctccgcctcccaggttcaggcgattctcctgcctcagcctctcaagtaactgggattacaggcacccgccatcacacccagctaattttttttatttttagtagagacagggtttcatcatgtaggccaggctggtctggaactcctgacctcaggtgatccaccccaccttggcctcgcaaagtgctgggattacaggtgtgagccactgtgcctggcctgactattcttaaaggctggattacagaggtcaaggacataagttgtcaattgtcaagtgaaagatgcagtataaaaagtaatatacacagggttttccatctaaaaaatagtgaaaccaagcaactgtactaaaattagcaatctatctttgaacggtggaattacaggtaatttttattttttctttatacttttctgtatttttcaaagtgtttacaattaatactgtatataagaatatgttacttttaaaaatatagactttttttttttgagacacagtctagctctgtcacccaggctagaatagagtgcaatggcacaatcttggcttgctacaacctgtgcctcccaggtcaagcaattcttgtgccttagcctcccaagtagctaggattactggtgtgtactaccacgcctggctaatttttgtgtttttagtacagatggagtttcactatgttggccaggctggtcttgaactcctggcctcaagtgatccacccaccttggtctcccaaagtgctgggtttacaggcgtgagctaccacgcctggccttttttttttttttttttttttttttaggctaatcaagtgaagcagtaggagtggagaggaaacaaagaaatccataaagtggttgtgatcaattagctgtaaacaccactgtacttggaccagcctaaaaaacagacatttatctaaattttctttaaatatgaatggagaagatacctgaaaattccgagatctgaaaactcactaatttaacttttctttcgtggaaacacagcagtatttcaagtagactaaatatgtaaacaaaacaagtcttactgcttttaatctttataatttttaacagagagtgaatcagctcacctaaatatttggggggaatattttcttctaggaactcgatcaaaatgccactgaaaaagtccagacaatgttcacagccattgatgaactcttgtatgagcagaagttgagtgtgcataccaagagtctacaagaagagtgccaacagtggacagctagctttcctcacctcaggtactgaagccctccagttgacttgtattcatggctaatactaaaatttaaaaagtagatttaaaaaaaaagcttgtattctgaaatctttatgagcatgactttaatgaatgtaaataaggccatgtggtataaagccttggctaagagaaaacttaagttggtagaagtttcttagagtt

SEQ ID NO: 5322 - DNA, 2300 bp, Homo sapien
gggcagcatcccttcaaagtcctccaagcacggtgccatgttttgcactagaggacaccaaagtggcctgaaaggttgaggaacttgctgaaagctataggagcaaatggcagagcttagctgcgttattctttcacttctcttccatttaattgtgcggatactcttagatgtcttaaaatagtcaaatgtcctctcacttgctttaaaagaaaaaaaaatacacacctgaatctgtagggcagtatttaagctactgaactgtttaggtgtggtattattttatttattggacgacttacagaaaagggttgtatttcagttatttatgcaaatagggctactgtggtcccaacagctctggctctgggcagcacaagaccctttgcccactcccagctttccaaagaacccaaacccaaatccctgccagctccaacttgctcagcactttaattgctacagtgggagccacactggtgccacaactgctcccaagcagcaatatttgtctttcagttgtctttctggtgacaatctttcagcacaaaagaatgcctcaaacagagtaggaatcagcccctgtggcaaatttttgggaagcactttggagtaggtgtccttcaggcttgccttcactggtgactaaaaaagtgactgtgatggcaggtggataatggacttgctttgccaaatgtccattctagtaaattatgtttatgattgaaataatgtcccacttttaagaacagattctcatgcctgagctagagtaccatctggaaactagtgttacttattgaaaggtttttatttttgctttatttccccctaaatgtagtttctagtctaaggctttttaccccgttagtcttgtcttccttgacatactgatctttacttcattgtgggtttctgatttggctactagagatcttgatgacaagctacttatgaggcctgggtccagtaccatcctttcaactcgaaattggccaaatcgagctgtggagtttagtacatcatctctgtcatacacagtgcagtccaccaggagacgcaatccaccaccacgaactcttcatccgatcagcacgagccattcatgtgctgaaacaccaagatctgtggaagaaatcctcagaggagcccgagtgtaggtttcaaaagcagaacttctggaaaccgtggtaaaactaacacattttacatacagaattaatttaaatataagactgaaatctatgcctagaaactaatcattaagtagtcttatgacagattgcccatgggtttagatccaacacaaaattttttaatgtggttaaattttattttattttatttttttagatacagtctcactcctgtcgcccaggctggagtgcagtggatgatcatggctcactgcagcctcaacttctgggctcaagtggttctcccaccccagcctctcaagtagccgggaccacaggcgggtggtgccaccatgccaggttaactttttgtgtttttagtagagacaggggtcttgtcatgttgcccaggctggtttcaaattcctgagctcaagcaatctgcctgcctcagtctcctaaagtgctgagattacaggtgtgaaccaccgcacccagcaggggttaaataattttaatgaaatagatattgaatctttctgttgatctagctaaagagttctatttgtaaaaataaaatgttggctagaatactatattggggttacaaaaggaataaagaacctatttatttaatcaaacattttccgtgctgggaacatattcagtgaaattcactccaaaataatagttaattcccctttaaggttcttctgtaccattgggatctgcttattccattgacaatgaaaacttcataaacctcagataagtagttgcttacataccagcaaaaatatcccttagcacttcctaggaagtgacactaaaagtaatcgcctttcccacccttcattcactacacactctgagcctcatcatgcaaaaatacctaggagccaattttaaacatagaattcttttagctgttgattcacaaaatgtcttaggatgattaatttctaaaaatatcctcaaaggtatgagataataaggccacagcagtgttttcaatgcggcttccaagttaagcattattatgtggatgtagctatatctataccaacagagctataaatgcattcatttggggatgagtagtcttgatgtataattaatctctcattccttctgacagtactttttttcaaagttgaaaagtaa

SEQ ID NO: 5323 - DNA, 2300 bp, Homo sapien
gatttgctttaactttgggaattttactttaaataaaacgtacgttagtaaaactagagttgggtgttgaattgctgcaatacaacagttgcttgagttgaaattattgaaccagattttctatgcctaagcttctccggagtcctcctttttaaatccaatcttcattaactgctaactagggaccagggaagggaaatttaagtgaaatttccaagagtgagaggtgatccggaatcaggacttacatttggatatgtaaaataaagcgcatccggcaaaaaaaataaatcggcccttttcagtgcaacaatcacattaacaggaaatttaaagcccgtttcagtaagcgtgcgtgtatctgtatttcaaggccaaactcaaaattcctaattcctacaaaattaacacaaaatacaagatcttagaggcagtcaataaaggtttgttgattgaatgatggtaacagtcacaaagaaacctccagagtcctttacctttttaaagagtagccgccaatacgcctcccagtctcggtcttgggtgagcacaggagagtcctcgtccactgttccctgctcatcgtacactgctctctgttctctgtcactgagaacggaatagacttttcccaggatctgagggcaaagagtatccgtaaatcacccctgctcctcccaccgaaacggcggcgcgagaaataaagatcagaaggcgccaagcggagctcagcgcgctcccccggggcggggcccggtagccaaaaggctagggggaggcccgcgcagccggtcggcttcggggcgggaccctgcatacctggaagcggcgggtggcgtcctccttgtcgccctcacccacccggtccgggtgtacctgcagggacaccttgtggtagcctcgtcggacctcgccgtcggaggcctcgcgtcgcacgcccagcacccggtaaaggtcggcggtgccgaacacttcctcgcaaaggtccagcagccccatgccgggcggagatacgaccccggaggaagcagccgctcccagctgcgccgggtacaacccaggactgcttctttttcgcgcccaaaaagcccagggcgcctgcgtcacaagcactgaaggggcgtggccacgccgcgcatccgcgctttacggcggccgcaaaatgaggtgtggcgagtcaggcgcgggcccgggtaagtaacgccggcatgtggagtcacagtccccggccgcgcgcaggagctaggtcttcagggaagtgatgttgctcgggtctctcctccccttgctctggaaatctggcgtccgtcttaccttttagtgtccaagaacaactttttcaaaaagttcatatattagcttgaatttacaaactgctggcctatttttttaagtagaaaacggccaaacatcagcattcagcagttacacatggttcaacttaacagatgtgttttttcaaaaatgttcttgaaaggaataggtaaagctgtagacccaaataattttgcaccccactggttggaaatgctggggtactttccctctagccctgtaggaaaaaaccctatactgaaacccaaaaagcacaaaacacgggtcttccaaaaactcttacctaataggactttcaccttacacattggtggagagagataacatgacccaagcctccgtcttaataacataaactgctgaagcaaaggctctttcttttaatactctgtgaagttcacagctgggtttgaacatgttggatcccaggtggcagcagagtgggctggagcaatcatccaagagatggtgagaaacttgggcctggagacccaaagcaaggttgaggctggggataaaactttgttagtagggtaaactcacagaggaagtatgtgtatacatatcttaaaggataaacaatgctaagtgaatacccgagttggcagaaaataccttatcaaatatcccctcactgatgtagcatttttcagaatcattctgctctgccaataagtttctgcaaagcctcaaactctccaggatacattaatatcttttaaacttcccagagttgccgtgattttcaaagcatttctctttcccagatccaagatcaaactcagctgaagtcagttcctctcaacctgccctggcatcaaagtctcaaagcaagtgggggccaaccagcaacaaccccaggggagctttgacaaccacagaatttgagatggctggtaatcgttctcagaacataaaacacaaagtaagtcggcacattgatagaacctcctctataaatttcc

SEQ ID NO: 5324 - DNA, 2300 bp, Homo sapien
tcagtatactttagttctacttttttatttgactcacaaccattcttaggtctcaagtattcccatgtgttttaaaagcctgaagtcagtgagatgaaattcaacatcaagaatttgaagtaacttgtaaggaaaaataatataaagataccattggggcagtggctcacacctgtaatctcagcactttgggaggctgaggtggaaggatcacttgaagccagagtttgagaccagcctgtgcaacacagcaagaccccgtctctacaaaaacttaaaaaattagctggctgtggtgttgctcacccatagttccagctactcgggaagctgaggcagtaagatcacttgagcccaggaggccgatgctgcagtgaactgtgattgttccactacagtccagcctgggtgacagagaaaagaaaaagaaaacattacataatttggctagagcataataatttgattttctggtttttgaaaatttgagttgcaataaaaggatatttcagtgtgcgatttcaattttccgtagcaaatgtatatatagaaaaatgttaaaatagatgtatttgaataccttaaaaaatacaagaaactggaagaaagataatattgcaaagcatctacatatatcctaggccttttgtgtacaaggttatttgtgacaattgtaaggtattatgaaggcaggtaggattatctccgttttacagatagggaagctgaggcctagaggtggaaacttgcccagtgatgtaagattcatctcccggttatgccctcctggaaagcccttcccaacatattatgttgtccatagagggaaaaatgagcaaagacagatggcttaactctggtgtgtgactaagatataggaaatttatagaggaggttctatcaatgtgccgacttactttgtgttttatgttctgagaacgattaccagccatctcaaattctgtggttgtcaaagctcccctggggttgttgctggttggcccccacttgctttgagactttgatgccagggcaggttgagaggaactgacttcagctgagtttgatcttggatctgggaaagagaaatgctttgaaaatcacggcaactctgggaagtttaaaagatattaatgtatcctggagagtttgaggctttgcagaaacttattggcagagcagaatgattctgaaaaatgctacatcagtgaggggatatttgataaggtattttctgccaactcgggtattcacttagcattgtttatcctttaagatatgtatacacatacttcctctgtgagtttaccctactaacaaagttttatccccagcctcaaccttgctttgggtctccaggcccaagtttctcaccatctcttggatgattgctccagcccactctgctgccacctgggatccaacatgttcaaacccagctgtgaacttcacagagtattaaaagaaagagcctttgcttcagcagtttatgttattaagacggaggcttgggtcatgttatctctctccaccaatgtgtaaggtgaaagtcctattaggtaagagtttttggaagacccgtgttttgtgctttttgggtttcagtatagggttttttcctacagggctagagggaaagtaccccagcatttccaaccagtggggtgcaaaattatttgggtctacagctttacctattcctttcaagaacatttttgaaaaaacacatctgttaagttgaaccatgtgtaactgctgaatgctgatgtttggccgttttctacttaaaaaaataggccagcagtttgtaaattcaagctaatatatgaactttttgaaaaagttgttcttggacactaaaaggtaagacggacgccagatttccagagcaaggggaggagagacccgagcaacatcacttccctgaagacctagctcctgcgcgcggccggggactgtgactccacatgccggcgttacttacccgggcccgcgcctgactcgccacacctcattttgcggccgccgtaaagcgcggatgcgcggcgtggccacgccccttcagtgcttgtgacgcaggcgccctgggctttttgggcgcgaaaaagaagcagtcctgggttgtacccggcgcagctgggagcggctgcttcctccggggtcgtatctccgcccggcatggggctgctggacctttgcgaggaagtgttcggcaccgccgacctttaccgggtgctgggcgtgcgacgcgaggcctccgacggcgaggtccgacgaggctaccacaaggtgtccctgca

SEQ ID NO: 5325 - DNA, 2300 bp, Homo sapien
atgatgatcacaaatgctgagagactgcgaaggaaacgggcacgtgaagtcctgttagcttctcagaaaacagatgcagaagctacagatacagaggctacagaaacataaatgagctgactttagtgagcatagcagtgggaacaaggtcaaggtccttttgaaacactgcagcgatcttaattttgttagatttggagttcaataaatggagtatcctgagttgcccttgctcttctggcctggcctgcacagggcccagggagagatttgttcttgtgtgacttagagctgggtgtgggtactaattagcttttttcgactttgtcttgggatagacagtggctatgggaggattggacttttgagttgggctctgggtctcttggacaactttacaatttactggcttccaagacttcctgcttcaaaacccccagccagactattcatggcccattcagatcttcatgttcatcccacaagtgcaagaacagttaacctttcttaattgatttttgtaattggaggtttatattgtcttgcctaatgcatattctctttttttttttttttttgagacggagtcttgttctgttgccaggctggagtgcggtggtgcaatctcagctcactgcaatctccacctcctgggttcaagaggttctcctgcctcagcctcctgagtagccggggagctacaagcatgcaccaccacacccagctaattttttttttttttttgagaggagtctcgctctgtcgcccaggcttgagtgcagtggcgcgatctcggctcactgcaagctctgtctcctgggttcatgccattctcctgcttcagcctcccgagtagtcccaggagtagctgggactacaggtgcccaccaccacacccagctaatttttttgtatttttagtagagatggggtttcaccatgttatccaggatggttttgatctcctgacctcgtgatccgcccgccttggcctcccaaaagtgctgggattataggcgtgagccaccgcccgggcaaatttttgtatttttagtagagatggggtttcaccgtgttggccaggatggtctcaatctgaccttgtgatctgcccacctcggcctcccaaagtgctaggattactggcgtgagccaccactcctagccttaatgcatattcttaaatatacaaaggtagatttgttatgaaaattgctttggggctctaataacctaccttttaagaatgagaaactgctgggcttaagggagttcagtatgaatcaagattgaaccattcaaatgtggctgtgatttctgcatatatcatagatgggatccttctgagaatactggaatagggaattaggacaccaagccaattcagctgtgaaccttattcttgtacttttctttcttgctggtaattttatggagcaggttaagaaggctgctctgtgttaggataaactgtataccaataatgttgacaacctgtaatgagtgttgcattttacttcttgtatcttttccttcctaccttgatgccagtaatctataagggatctttatagtttgaatgtatttgaataacttcagtatactttagttctacttttttatttgactcacaaccattcttaggtctcaagtattcccatgtgttttaaaagcctgaagtcagtgagatgaaattcaacatcaagaatttgaagtaacttgtaaggaaaaataatataaagataccattggggcagtggctcacacctgtaatctcagcactttgggaggctgaggtggaaggatcacttgaagccagagtttgagaccagcctgtgcaacacagcaagaccccgtctctacaaaaacttaaaaaattagctggctgtggtgttgctcacccatagttccagctactcgggaagctgaggcagtaagatcacttgagcccaggaggccgatgctgcagtgaactgtgattgttccactacagtccagcctgggtgacagagaaaagaaaaagaaaacattacataatttggctagagcataataatttgattttctggtttttgaaaatttgagttgcaataaaaggatatttcagtgtgcgatttcaattttccgtagcaaatgtatatatagaaaaatgttaaaatagatgtatttgaataccttaaaaaatacaagaaactggaagaaagataatattgcaaagcatctacatatatcctaggccttttgtgtacaaggttatttgtgacaattgtaaggtattatgaaggcaggtaggattatct

SEQ ID NO: 5326 - DNA, 2300 bp, Homo sapien
cccatagccactgtctatcccaagacaaagtcgaaaaaagctaattagtacccacacccagctctaagtcacacaagaacaaatctctccctgggccctgtgcaggccaggccagaagagcaagggcaactcaggatactccatttattgaactccaaatctaacaaaattaagatcgctgcagtgtttcaaaaggaccttgaccttgttcccactgctatgctcactaaagtcagctcatttatgtttctgtagcctctgtatctgtagcttctgcatctgttttctgagaagctaacaggacttcacgtgcccgtttccttcgcagtctctcagcatttgtgatcatcataggatgcagagggaaaaagccagcaagacctaaaagtaacagatttttcacttattataacacagtataagccaatgcttccctaggaactctgtctcacagaactgaggtctgagatctgacccagtgcatggatgcaaaccatgctcctcacttgccaaactctgtactacttctccccggcaaggagacagtggatgtctacttccctaacaatattccccttactttaaaaaacgtaaactgacagatggccattcaaaacatactattcctatttttagcataaaataccagtcacccaaagtcttacaaaggagtccacaaaaggggcctccagattcaaaatgccaattagatcacaacttcagctcccacttcagtcctgaacagcctagagggaatgaaataactcttttttttttttctttgagatggaatcgccctctgttgcccagactggagtgcagtgacgcgatcttggctcactgcaacctccgcctcctgggttcaagcgattctcctgcctcagcctccccagtagctgagactacaggtgcgtgtcaccacgcccaactaattttttttttttatttttagtagagacagcgtttcaccatgttggccactctggtctcaaactcttgacctcaggtgatccgcccgcctcggcctcccaaagcgctgagattacaggcgtgagccaccgtgcccagccgaaaatcattcttacacctactgtcctggagctgacttcagtttaaaatcccctcaataaggtaagaccagagctgagttacccagaagcttttccataggcttagagaggtgggccccgcagccaatccaatgacggatcctgtctaggttgagggcaacgagtttttctccatgactgttgggcaatggatcataggagcccagctgctctacgaaacggccatccctgggacacttgttgtgagcagccacaatgcggtagaacggccgattggtgcagccacccagggcaaggcggatggttaagtggcccccacggtaggccttgcagaggagagtagctgtagaaaagcagctggttaggacacaaaaaacagcacaaaaaggacaaaatgacacagacggcacaattcccttttcccactgaaatgtctcacttccaatccattcctgtcaatccagtttagatgctactcttctttgtgaaacccctcttggccagtccagccagcaatgacctcctcctcatacccaaacccaccccgcatgggcttgccattcactaggctctgtgaccttgtcggagccttagctgcttcaatggggtggaaatttttcagcggtgattaagtggggaaaaaactgagagaaggatcaaatgtaaggcagtgtggctgcttcaggttcgggttgcctccatcgcgcctgggagagctctccccacccggccccgaactcccgagccccgtgaccgcccggaacgtctcgcggtggcccgatgactcactgaggtggaccatggtgccgccggcgtgcggctcctcggagagccccgctacccgcacgcaccagctctacggccttggcagggcagagaacaaacacagaaagaacctgcaagccgacaccaggccgcaccgccaagcggtacaagcccgaaaacctcgactccggaagcggatgatccgctcgccacgcctcctccgcttgccgccctatacttcccacaatgcaacacggtgacccctaacgtaccttaaactgctgcaaaagaggcgtttctcgtggtgtcttgtgggagtggcggtgcgatccctctcagacttgtgagtccctgctggagtcagaagttttaggcgaatcccaggcgcgccaaggaaagtgctacaaaagccatccatcttgcaagcgttggtgccgaggcgcaacgctgagaacgcaaatacta

SEQ ID NO: 5327 - DNA, 2300 bp, Homo sapien
acagccagcgtagcttactatcatattcatgtttcaggcaagataaagaacaataaggggaaaaggaaaaaggggccatgctacttcagttccctttaaaggactttccctaaataaagggcttctccaggtgtcctacccaatgactttagtttacatttcattgggtggcaattggtcatgactacctctagctgcatgggaagcaggaaaatgtggctttttagctgactgcattactgccttgaaaagaaattaagattttgttagtaagaaaaaataggtattctgtaggctcctagatgtctctactacatatctagattctaaaactaaaaccagatctaatataagcctatgatttctgtctctgattccctgatatcacttgccagatgggaatactatgcattagccaagagatgctggtaataatgtgaacactttttaaaaataaaaaaagtaaattttaatgaagttatcttacaaaaaaatgtacaaatcatgaccgtgcatagtgcttgatgaattttcacaaagtaaacatatccatgtaaccaggacaaggttctaaggtcttctactggagttttcatgaagtagggaaataggaagagccaattccatcccagggaactatgttctttagccgtagccccacaaaagaggggtcttcaaagccacataaagtatatcacgtatgacatatatctttccctttcttcctctttcatgtagctgaaattgaaagatgaggctctgcttgcagagatccacacactacaggaaacagttggctttggaaatccatctttctgatacccctccagctgaacaattttctgcatgggactctgagttcctttccttcccagagagttttaccgtatgaagcctggagctggagaacgaaagaatcttcactataaacagagacccattcatttatttccattggctgtgttactggatgttttactggttgacgagaaactgggtcacaataaaaaaatggagatatgaaactcaaaattcatcagcatggttctggagttaacgtatactgagttacatgtaggtatttagttatataaataactatagtgtaattgctataataattatatggcatatatatacatacaataaaattaaggtatagtggggtcattattagggtttctgatgaaagcttattggatcactcctggaggaagtcaggtgctaaggtttctggacaggttcagttaactgaaatacaggaattaaggcatcattttcaaaggtggccctggaggaagactgctatgctgggtcactgtattagggcaaagagcatgctagccctttggaactaacagtaaacgaaaaagctgaacagagaggtctttgctgaaggtggagctattgacaccttctcaccaaacacaggcatcttcatggatctaaaccactagggctccaaggagacaccgttaccctcatcaccgaggtcatattctagggctacagataaaaaaaaaaaaaatcatacttcacctctgccctggatcacagcacggcaaaagcaggaataacccctccttttttttttaaggtgtgactgcctcgataggggtgggacgacaacaggagaaaaggtgagaggtaaattaattttggttaacgagaaggataaagtaaaatctagtcacttacaatccttctcctagtctcggccctgacactacctcctctgtgaagtcttccttagcaagcactaggtttgccttctctgctcgctgtccttgcgctgagtactactgatcgcgctagtttctctgctgtcatctcacggtctccccagcggactgtgagctccacgaggaaagaacagcgccctttagtatttgcgttctcagcgttgcgcctcggcaccaacgcttgcaagatggatggcttttgtagcactttccttggcgcgcctgggattcgcctaaaacttctgactccagcagggactcacaagtctgagagggatcgcaccgccactcccacaagacaccacgagaaacgcctcttttgcagcagtttaaggtacgttaggggtcaccgtgttgcattgtgggaagtatagggcggcaagcggaggaggcgtggcgagcggatcatccgcttccggagtcgaggttttcgggcttgtaccgcttggcggtgcggcctggtgtcggcttgcaggttctttctgtgtttgttctctgccctgccaaggccgtagagctggtgcgtgcgggtagcggggctctccgaggagccgcacg

SEQ ID NO: 5328 - DNA, 2300 bp, Homo sapien
caaacaaacaaactaataaagtatcatggaacataaaaccaaatccagttttagacttccaatccatgctcttgacctctctgaggcgtctaccagatgttttgtattttcttaggcagtgagtgactaccacatacagatcaagaatatttctagagccattctagatgaatactacagaatgtttggaaaacaggtggccaaactggagagtgatatggatagtgaaaccttggaggagcagaagtgccagctcagctatgaacttaattgctctggaaaatactttgctttcaaagaacaactcaaggtaaaacattcacttgtttaattactccatgggtgtttatggagcaagttctccacatacccacatcacattttctcctctgattatgttcagctatactcttacctttcttggtggggcaaagagctaagttctctatgatagagtgtcaggagaagctccattctttcagtcttggaataaattattacatatattctgaacgggagcttttaagaaactaattattcacttgaggctgggccagattttgtaccagatttcattgtcactgtaggaggcagaaactctgtctggtactgactccataattaattcttcttgcctctcattcaaatctctctaaaagaattaattttagttttaaaattgaagacgaaacagttatcagaaaggaggccttaatcattaggactagagtagcatgtcttgagttaggatacatttaattactggcattacattttactttttaaaattcagaatgtataaacaaaaacaaaaaactccaaatctttccctaatctatagaatcactaaaatttgagaaatagttaacttaataatcatttcttgaataataatggctaacatttattacatgtttgctgttttccaggccaatttatcaatgcttcatattttactaatttaatccttataacaatcctataaagtaggtgttgctcattttatagatgggaaaatgcaatattagttggctaaggaatttgtccaaagtcacagagatagtaaagatcaatgttgggatttaaattcaggcagtctggatccagaactcacattcttaactgctacactacactgcctttgtacacacatttactatgtgtcctgtactgtactaaacagatataaagaaagaacatggaagtcatagagtgaaaaacaacaaatgtccatggaagcaagagggtattctcagcaggtggtgtcgtcatgtctcagtttgactcttggttccacatttactagttgggtgaccttgaaacgtgactttatctctctgtgcctcagtttctttacctaacaacagggatgaggttaatattatcacataaggtcatatgagaattaaataatataatgcatggattataaaacctggcaataatgttaccttagtggggaaaaaaggagaagctgtcctggctatagcaacatgctgtgtttatatttgtacagcattttaagcttctatacttgtctctctttggcttctcaatcatcttctaaagtaaaataataataccagaactacatatcctcttaacaaatgaggaagctgaggtaccaaagtgtaaaataatttatgaagttgtacagtggcagcattagaaccagaattccattctctggattctcagcccagccctttctccctttcccctttgaaccatatggccaccatgagagacataatgcctaaacctaatgctcagattttcttcagctttatgattctcttcatatagtatgagctctgcattgcttcaattagtaatgatggtgatgttaaggaaagaagaaatcatacagagtatgttgattgggggaaatttggagagctgatagtctaccacccaccaagggagaaatcaatcgctttctgaaattttgatcagctttagaccagaaagccctagagagacccgtgctctcagcatggtgctggactgtattatcagatgggtgatctgtgtgtcttgcagcatgctgtggtaaagattgtgagagataaatacttgaagacaacatcatttgaaagccaggaggaacttcagacatttatcagtgagctctatgtgttcttagtagatcagatgcatgtagccctaaaccaggtaagtgtcaagaactgagagcactttcttttctctgtagagcatcagagtcttctatgaataattccttcctttgtttattcaacgaatatttattgaagtgtctgctctgtgctaggcactga

SEQ ID NO: 5329 - DNA, 2300 bp, Homo sapien
tggagattaattatgtttaaggaggtgacatctgttatttatccttgcttgcctaagaccttgaagcaaagtactaagtagaccaagatcatgagcgatttctggaagaacagctccctattaaagacttggcctaacccagcttattatgtagaaagagtctgtcatttgcaagtgggatagctgtctcagtgcaaattcacccaaaactctcacttgggaaaaaaaatccagagagaaatccttactcagtagtgccacagtagttttattttgagaacctttattacctgtaacactgcaactttcaaaaaatatttctcaatatttataatgtttctttattcatataaataaaaattttaaaatttgactctggtaactatttcctaagcaaagggcttcccagggagagtggttatgcgtgtgtatatattttaattgttttgaaatgatctcgaatgtatagaaaagttgcccaaatcgtgtaaggaagtcccatgtcccctgcactcagattcccaaatagttaacactttattgcacttgttccattgctcactgtgtgtgtatgtgtgcaggtgtgcatgcatgtgcatatgtgtgtgtacatgtgtatgtatcccttgttagtctttttctggaccttttgaaagtcaagagagcaaattgaagagatggtgtctcatcactcctaaacacactagtgtttattttcccctaaacagggacactctcctacctaacaacaaacaaacttccacatcaggaaatcaatattggtacaacactaccatccaattcagatgagattgggcatgttcggggtggtatgcgattcacagagctaattcacatttttcccaccgtcctaacaatgttgttttcctttctggtccagaatgctatacagagatacatattgaatttagttgtcatataacctcagtcagagacagttcccagtctttcttgtccttggatggtctacaacctgagttcctttcatggtaggaaaaccaaaaaggatgctttgtgtgtgtgtgtgtgtttttttttagtgtgtttcaccaggaggctcacaatgtagactcctcccaacactggtgatgttaaccatgatcacctgatcatgttggttgcgtccattcactgtttccccctctgtaatcaagtagtattccatggaagcattccaaaatcacgccagtattctatgcctcatagaacatctacccaccagccttagcgtccattgaagactcctgcctgagtcatcctcctcagtagttgtcaaatggtagttctctatttccatccttctcgctacacttctgggttggcatcctactttgaaagagttttcctttttctctgtatcaacacggacttgcatattcctattttattcaatgggttgtaatccgttatcgtcgttgtttacttcatgctcaaattgtcccttatttggcccatgggagtcccttcaagctggctcttaacactgcaacaatttaaagtatatatactgctaaaattcatccgtgttgtgtgtatggctgcagttcattaactttgactgcttgtaatatgccattttgtgaatatgccacagtttattggtccactcatccactattccttcgacgggcacttgggttgtttccaggttattgctattgtgttttgctattctagctctttaatgttaaattttgaatattaaaaatttgtattaacatcataaacttcaggtctgtttattgtacaaatattgagcacctagaagcagggtcattttgcactctcatcaacagggcgtgacgggctcatttaaaaaatattgcatatttcacggagaaatatttaaatgatgttttcaaatcagtttaataaaggcctttttctttaaacttccttttgcttttttccctcctattatagagaaatattgaaatcaaagagtcgagaaagcaaaatgtaaaggtggaaacctatgcacttaaacccaactcttggcaaggtaaagcatccgcggaaacagcaggctctcgaagtgaggaggctgcagccggcgctagggcgcaggcgcagaagctcagcgtctcgctccctgctcccggccccagagggttatcgcgagtcttggaataaacttgctcgtgcgatggccaaaagtaagttctcgcgagaggtagttggttgctatagttgtcaaaaacataactgaggctgctgcaggtaagacagtgatccctcctgaagaaactctctcttcccggcctccccacctcagccct

SEQ ID NO: 5330 - DNA, 2300 bp, Homo sapien
tcaacatcagactcactattctcacaaagatattttccatgttatgaattttttatctagtctgcacaatgctgtctcaagtttttttatatattgctttagaattaaaactaacaatctaatttccgtaccactagccacctcttttcttaacttcctaattagtaaaacactgtttttctagcctgctatagtcatctttgagtccatgtttttcttttatcatagggagtattctgtatgctttgtcctagcagttggttatttactagtttttattgatctaatctataaaatggccctttaaaatgtttcttttgtctactttgttccttctcatttccattgttaccattcaagtccaagactttattacctcttaactaaatattccagtagcctaaatgttttcatctatagcttctttgtcaccatcatccattctgaatattgttgctacatcagtgccattttcttgcatgaaaagtttccagtggttcctcccagcaaacagaatcaagtccatattctttagcttggcattcagtgtaataatccaagatttagttacaactttgttttaactcatctattatgaaaaccttcctctgtagcaaaaccggttgtcttattgttccattgaacaagctttgctcattcttggctctatacgagtaattctcaaccttaactgaacatcgtaatttcctttaaaacttaaaaatacacagaatctctgagtcttagtcctggacatcaatgtttttctttttttttttaaagctccacaatgaatgtaatgaagagtcaaggctgggaaccccttctctgttccttggtggtgttccttcttacctgaaatacctttctccttcgtctttgcatgctaatttttacatttttctctgagctctccagctgactttgaactttttctgtttcaactttctctattacttatttctatgctacttacccagtgctagagtacaggttaccttacattattttttttttagatgtgtatctttccaaataagaacaatatcggctgggcacagtggttcatgtgtgtaatgccagcacttcgggaggccaaggcgggtgtatcacttggggtcaggcattcaagaccagcctggccaacatgtgaaaccccatctctactaaaaatacaaaaattagcctggcgtggtgggatgtgcctgtagtcccagctactcagggggctgaggaaggagaagcgcttgaacccaggaggcagaggttgcagttagccgagatcacaccactgcattccagcctgggccacagagcgagactctgtctcaaaaaaaataacaacaaaaaacaaataagaacaagatgataatggtttctacttcctcatagaaccaagaacagttccttttactaagtaaatatctgtttatcattttgtcagtttgaataattctttgtttcatatatcccttgtttttgtacctggtagagtggaataagattttattaaatgtttattgatagaatgaataaaatagatctgcttgagtgtaataaatgtgtaagtgtaacagactttaaatttatttacttcttttttatttctatttatttatttttttttttgagacggagtcttgctctgtcgcccaggctggagtgcagtggtgcgatctcagctcactgcaagctctgcctcccaggttcacgctgttctcttgtgtcagcctcccgaggacctgggactacaggtgcctgccaccactcccggttaattttttgtgtttttagtagagacagggtttcaccgtgttaaccaggatggtcttgatctcctgacctcatgatcctcctgccttgacctcccaaagtgctgggattacaggcatgagccaccgcgcctggcctttatttacttcttagtatattaacattcagctttcaaatttaggtttttataaagcaattccatttctttttttgtattttccttaaaagatttaagtgacaaaatttggagaacacatatacttagcttgtatttgtgattaaataggatttaatcaaagatctcaaatcagagttaagtggaaatatggaagaactgatcctggccctcttcatgcctcctacgtattacgatgcctggagcttacggaaagcaatgcaggtactactatatgtcatttattatgaatattttgtcctatttcatatgtaaaaccgtacaaattatgacagttctgaatttacagtggtaattaaagcaattctttatttcacatcatccatctgaa

SEQ ID NO: 5331 - DNA, 2300 bp, Homo sapien
gtgagactctgtctcaaaaaaaaaaaaaaaaaaaaaaaaaaaaaaagctgggcgtggtggcggatgcctgtaatcccagctacttgggaggctgaggcaggagaattcgttgaacctgggaagcagaggttgcaatgagctgagattgtgccattgcactccagcctgggcaacagaatgagaccctgtctcaaaactacaaaaacaaacaaaaaaaaaccagactctgatacagtgggatgttcacattagaagcatgatggctcttatttcacatgaactctggaacataccatggccttcagagatgttgaccaggtatggtggctcatgcctgtaatacatccagcactttgggaggctgaggcaggtggatcgcttgaggccaggagttcgagaccagcctggccaacatggcgaaaccccatctgtactaaaaatacaaaaaaattagctgggcgtggtgacatgcctcccagctacacgggaggctgaggcatgagaatcgcttgaaccccggaggcagaggttgcagtgagcctagatcgcaccacagcactccagcctgggtgacagagcaagactctgtctccaaaaaaattaaaaaattaaaatggtccagttgagtacaaaaaagaagatcaggaagagtttattggagcaagacggagatgagcaaccttgaaaacaagtctaattaagatgagtaattgttaaaagatgagcagtgctttctaagcagaggtagcaggaggaaagggtctccgatcctgtaacgccttttatgccaggaagaaaggatgaattgaaaggatgaaatggcaaatgtcgtagtagactattggactattcctgcagctcaggaaagtgggctggaaataagaggtttggcaaataccctgttatggtggtatttaaggcagagggagggtttggaacgagctcacaaagggaactctagaatgaacagagtaggcttctcagggaaggcttaaatcctggaggtctctggggtaggtaggacagaaagtcctgttattttccaggtagacagactgttgggcgccggggaattaatgctggtcacctagagagttgtgcattttgtctaccattgttaaatgaggcaatgacctgcctcaaatacttttcactccacacacctatttggaagccacgtatattttgcttgctcttcccatttaaaatcgtaatccactctattccacccccatgaggaagcttttgggtagaaaagtgtgtagaggaataagtaagttgatgtgcatcagatgtgcaaactttagtgtgcatcagaaccacctggaaggcttgttaaaacaggttgctgggcaccacccggggagtttgattcagtaggtctaaggtggagttcaataatctgcgttactaacacgtttccaggtgatgctgctgttcgggggaccacacccagaagctaccttttaccactctaaaaggtagctgattggttttctctgtaatataaattccttaacgagtttaaaatattgatctgagccctcgtaattgcctcaaatgtttaatgctaatgtgtgttcaatgctgtagccacgaggggagcctaaaatcacctaacaactcctttcgggagtgattttgattagttcatctacagttccaactaagatttcccacaaatattactttcacaggaggctaacaaaaaacgccgtctttgtccccagaaaatacctggaggacggtatttcagaggcggggaggctgcaccagcctcccagtctcagcccttctctaccgcccgccactgaaggggccccggatacccccaggactgctgcaacttcctaggtgacttgaggcagccttaaaagggattggtgcagggtccttgcgacagataaatgtgattaaaaatccgctgggccacccgaagggagagtctttttccctcaggtggcgcctaggggcgggactgagggacagcccgctccccgcagcgccctctccggctccgggggtgttcccggctgcagccgcgatcctaacgggctcgcgagacgccccgcccaccctgggcccgcccccggctccatcttgcgggagaccgggttgggctgtgacgctgctgctggggtcaggtgaggagcggcgcccccctccctttcccacctcgtctgcctcggtggtcttgccctcggccagctctgggcgctgctgtcccggtgctagtggggcgcggctggagggcagtgtgggcctcccggatggcggcgactcggtttgcgcgtctcgta

SEQ ID NO: 5332 - DNA, 2300 bp, Homo sapien
gggaattctttatatattttgaatactaaccccttatcagatatatggtgtgcaaatattttcttccattcttggggtgtcatttgactctgttgttagtttagcatcctttgatgcacaaaagtttttaattttgctgtccaatttatctattttggtggtggtggtgttgcctgtgcttttggtgtcatatcctagaaattattgccaaacctatgtcatgaacctttccccatagacttttatagttttacttcttaagtttaggtctttatactttaaacattcaaactcgagtcattctatttcattaatttgcagaatgtttctgtctatatttctgtgtttattctctcctctgtgcttagaatttattttttccctatttccaagtattcaaagtattcccatctttcaaggtctattccaactgccacctgcttcatgaagaaagccactgaagagattctcgcccactgaagagattttcttcttctgatctcccattagtgctttagttgcacttttctggttggatttatatagtaccttatagtctacatctaatctccctgcaagacatttagatatatatttctcatatttgcttctatatatagtgtttcgcaaatgatttcatctgtttatcagtaaatatatattacatgaatggacattttaatttttctcatatggtcctttctgtttactcagctcttatggaaggcatggcagaagatgagacagggaaagaggacagcacagagtcacagccagatcgtgactgagtgtaggcttacttctacctcaaaacttaccactttaggaaatttttctgacttgcttgactacataactcttagtgcacgttttgtattacatttaatttttacttcttggcttattgcttatacatgtgataataggtctttcaaaataaatgttttatctctctatattaaactgtctaactctccaattggatggtcactttggagaattaaaacttctattgctttttcttcttttaaattgagttttaaaatacattaaagctatattaatattttctccttattaaaaaagtcaaacattacaggtaagtatacagttccatttgatcagcccagttcctatttaactgccttcttaaactattcagagttaatcactgttaccagttttcttttttttttgagacagagttttgctcttgttgcccaggctggagtgcaatggtgcgatctcggctcaccgcaacctccgcctcctgggttcaagcagttctcctgcctcagcctcccaagtagctgggattataggcacccaccaccacgtccagctaattttttgtatttttagtacagatggggtttcaccatgttggccaggctggtcttgaactcctgacctcaggtgatccgcccgcctcagcctcccaaagtgctgggattacaggcgtgagccaccacgcccagctgttaccagttttctatgggccctgccaaatcttttttgatgcatttacttatatatatatatgtgtgtgtatatatatatataatgtataggacttactatgtgtaaattatattcatataaaattacttcttcttggctgggtgcggtggctcaagcctgtaatcctggcattttgggaggccaaggtgggtggatcacctgaggtcaggagtttgagaccagcctgaccaacatggtgaaaccccatctctactaaaaaatacaaaaattagccgggcctggtggcgcctgcccgtagtcccagctactcgggaggctgaggcaggagaatcgcttgaacctaggaggtggagtgagctgagattatgctgctgtactccagcctgggcggcagagcaagactctgtctcaaaaaacaacaacaacaacaaattacttcttccctattttccacagctgcctatggtgatcaataaccagtaaatactgaataaatcttactgataacctgggtctgagagactggaatgagaaatgaaaggtcaagcatatgaaaatacttcacaagtgtccagcttgtaaaattccattccatgtctattctgcatataatctccaggtatcactggacaggccatggctccacggtcccggcgacgaaggcacaagaaacctccctcatcagtggctcccatcatcatggccccaaccacaattgtgacccctgtgcctctgaccccctcaaaacctggccctagcattgacacacttggcttcttctccttggatgataatgttcctggcctatcgcagctgat

SEQ ID NO: 5333 - DNA, 2300 bp, Homo sapien
cgcccacctcagcctcccaaagtgctgggatttcaggcgtcagccactgcacccggccacaaattgttaattattataactctctgcttgccaaaatattaacttacaaagcagtccatgagttggctctaaagttattatgcattgcataccttaaagattgttgtctatgttgtttatgaaagttgcataccttaaagattgttgtcgatgttgttttatgaaagctattcagtaaagagtttatctggctaaaatagacccaatagaaaaattaaaaagtaagtaagagtttaactagtatattaggtgccaggaactttcctagcccttaggtacataactagcattatatagtgtttgtgggaatcatgggtgagcattaagtagtattagcaaaaaaactatggattgatggtaaaaattaagaggaaaataagagaaaggaaccaaactcaggaaaagcaaaatacctgaagagtgataaagtatcacatagtgcctcacagaccacttcctacatgttgaataggaacctctttctagtctttcttcataattcatttcacagcataccatttattaagattttttaaatgcaactcatgatgaatacaaattgtgaaaagttcagacttcgtaactttaaatgtttaccagagcaagtcatagtgatagtaaaatataagtattcaacatcaaagtttttctatattactattctcctttatattcattgacaacttctgaattagaaaagtcaatctctgatgtcttgtatcttctgcagttcagccattattaacagaactcaaaacatttgaggttctcagataaattttgaagcctgttaaatttgaagttggcctgaaacttttgcacaaagtgaattacccctattttatttagggtttttgcctattgcaactgattttcctttatccacagctattctacataatgttatgcagtgtttggttgaatccttaacacttttcttccaccttccctgcatgtagtttgtactttttacagtttggggttcctgtgtggatttgatttgccacattccgggacctcattgcgagtgattctgttccccagtttgatgatgttcaaagaagcaggtaagtgagagctggggtcagatataagcagaaagtcagaacttttttatttaaaaattttaaaaaaattttttgagggtaagaaagatcttgcagtcttttaggaccactgccctaacaacttcagataggctagctgtaagtagaaagaagctaggactgtggaattgaatttcctggatcagctgcaattacaaggaggataagagaatggttgagctgattcttttctattttcttttcctagaaatagtatgtatttttagtcattaactagtattttggttttgtttaatatcccagaagcatttattcctctcttaatacaggtaaagtgctcctgatgactctctcactcagagagttatcttacccttctttcagggaaagtgaattttacaagttaattctgcatgtttcccctacaactgatttcattctgtaccattaaatggccatttattttctcccttctacttaatccaagattggacattgttgagttttgtttgaacaatgtttgttatgctgaaaaaggacaccaggcctgggggaactcatcctgtgtctagatcaacaaacagaactccagagggtcctctggttcctcccacttggttggaaaggtgcttaccctttccaatcaaatattgacttctgcactaatccaaagggttttcttctgaagctgtaaactgagaacagaaatattgccttgagtgagagaagtctaggaagcagcaggtttcattttttgtcagcctgcctggcctttacttggctaacacttgggagtgttgacagtcctgagcccccttggcagagaacaaaggttagagagaagccctcaggcagggggacagatccctctttgcctcattagggagaattcagccttgtctgtctggttggcagggcacacttaatcactgagactcagcatttcagcagtttgcaaaggaaagtgatatgaagggacagctgcaagtaagccacaacctagatctgaagagatcaagcactcatttcacttggaggaaagagagaaggaaggaagctgaggacttagcagggtaagtttttttttccgtcaacctgtctgcttgcttagtttataattgagtaaagtatttatcaccccaggcagtgttaatcactgattaaacagctgaa

SEQ ID NO: 5334 - DNA, 2300 bp, Homo sapien
aaacttaagctgaactcacatcatttatcatcaggcaaccagtattctctaatatcaggtatcacattatagtataattactgaataaaagacaaggaagaatcctgaagatgaaatttaaaagtgaatttctggatctgtaagaaaggtgaatttcccagtaaatgcaggagactccatgagcagtgcaaattagtctgttacacaccattttaaaacatataatccatacaggaattccaactggttaacaaattccataaagaaatgaaagttgtctctatgaagagggcacaatgaagcaccagaaatatgataaccataagctttatttaactataattttctatattaacaagctcctttcctatttatctaaatcaaatggcttttattccacaccaataacctgcaaatatgactgccttggactcacaactcacccctaaggaatctgccttatgtttggaatcttattttcactgcattaaagcagtacagaaaaaacattaccatatatatgacaaggaataagaagattcacaaacgtaaggatagcataaactcattgttcaggaatgtgattggttaccccatctaacagtctggtgaaaagtgcccagggaaatgaacacacaacacagaaatacagtcagaaaatgaagaggtagccaatgtcccgttcccacccccacaaaactccaggatttcttgatagaatgaatgtctgcattactattttttttttaagatttctctgtattaaggattccataaactcgttattcagctcattccaatgcctggcccaactggatatactactaacttaagcctaggtgcaaatcagtgttttgtttttgtttttgtttttgtttttggagacagggtctggctctgtcgtccaggttggagcacactggcgcaaatctcggctcactgcaacttctgcctctcgggctccagtgattctcgtgcctcagcctcccgatccgctgggactacaggggcgcgccaccatgcccggctaatttttattttttgtatttttggtagagaaaaggtttcgccatgttgcccaggctggtctccaactcctgagttcaagcgatccgcctgcctcagcatccgaaagtgctgggattacagatgtgagccaccacgccaggccaaattagtattattcttttaagaaccgaagaaggctcaggttgaaaatttttaattaaaaaaaaaaaagaaaaaaggtttccttgtttttaaatattttaatggaaacatatgagtcagatttcaaaaagtaggctaacggtgtttaaatactgtgccagtgtatttgagaagctgaatgaaaacaaaagtacctatattttaaaaataaatacaatacaaataaggaaaagttcattctacgatttcaatttatcaatcaagctacatggtaaagagaatcatttcaattgtttttcacctccacagcagtgtttgaggttggtaggctctcccaggaagcttggaatcttaagcaactctcaattagccctcaatttctctattttaaattaatctgctgacctgttgtgggtaaacatccataaattctgccctggctgagaaacatttaactttttcgtctaggatgaatgtgtgggtgtgtgtttgtaagggaggggtaactccttttgaccaaagtgttgatggttttctaagtaaatacttgctatccacaagaattttttttttcgtttatgctgctttttctccctttctgcactataaaggctggccttccaattcctgccccgacccttcaccgtgatccaatcccacaaggttcccctaatttctgctccgggtggcacctgacggccaaaagtgaacccctgcggttgtcgccagctagacgcggatagggcggacgactgtcaccggggagcaggcgtgggccaaagccgaggtgatttctgactgctcactggcgggcctcgcgtggctgaaggtctccgagcccctcggttcgccccggcaagccagaagtgcagctgtcgcggggcaggaagctaatcgcggcccctgcgccgctttgacaggccgagtgaagagaaaacgggctcactgcagctaacagcctcaccccttgggctaggaagccacggaagcaaaacctccgccccggcctgaaagcaaccgggagaccgcggaaccactgccaccgactcagccctgcccagcaggggcccgcccaggggccactccccaagggaggcagccagtcactcgcccgcccttccgggcccact

SEQ ID NO: 5335 - DNA, 2300 bp, Homo sapien
aggaagcagctgctgtttaagggttttatctgagccactttaaagatgaatccatggtattactctggatactagccattccttaggattttaaggtcacattttattcctggatgctttatgtccccacctccacctgagccctcatcctctgttccctactatactcccaacttctactctttgttttatccacctatccctattacctgaccctttgtcttccctgtctcccatccttggggggacatgtagccctgtggtcatggttctgatgacatcatcagggcagcccccctgcccaggtattatggcctgtcagcattccctgtgccctccaaaccttaggcctagaatgcggagctgccaacataacattcacccttttgaacagatggagtcaggcacactaacacagccttctgtcctcaataacacagccattattgccacttgctcagtcgtcaatgtaaaccctcagagtcagctgaactattttaggccaaacatactgtttttgtaaagtatttttcattaataaatctataagacagttctatttaattccttgtcattcttccctttgtatgctcttgctttctttgtattggggctggaagtctggataaatatatgaagtggcttttgactgagtggaagtgaggagccagagacgagttgaaggatatacaatcaaggtgggaatcaatgggtcctaaaatagggtgcctttcctttctagtattgctgctaggatgtttcccatccctttcctgacagagcattcagtactcagtacattatacacttccttcctcccctccttaggaagattttctggggattcaagctcttcttacagactcactcctgatcaatgtactccaggtgccttccctctatcttataagtttgtgacgtgcctcctgtcccttccttcctctccttccgtgggggcctctccctttcccttcccctgtggtgttatggcccttccatgccagaaagatccattttcacctgtgcctcactcccgagactcttccctctaaaaaatagcttgtgggttccctttttggaaaaaatccattgttgggtctttcccttcctcttttcctggggtctcaggatagaaattgacacaaagaagaggtagaaaggtactccttggaccttcggactactacttacttaccaccatgcattatgaacagattctgagcacatgtattattgagcaggaggatgggcaggaattggttgttccatcccacttggatcctgcaccatcaagatatatagagcttagtggatatgctggtccctgtccatgattcaacatatctcctggtgtcgtggacacactcatctaataatttttgatgaacagtcagttcttgcccctctaccccctttcccatgagtgtcagtcaccgtggtctctataaaggttccataagtcacctgggcccagattctgtgcatgtgcagaaataaggaattaatttccaattccctatttactcctctgccttccaggaggaggttgtatccttttcaggtgaattcttcagattctttgcacatctcttggtgtcatcccctttattccccttacctgttttgacaaactatggcgcctaaattgctctagctgcagtcttattctgtgctttcagactcttgacaattccagactctaaacacaaaggccagaattctctttcaaactccattttggatggtcccttctccactctagaacctacaatgcttcctctattctctggtcccctaccaacccttcagtattcagatctggtagctaaatcgttatacatttctctattagtaggagatcctgaggtttaatcacgtcttctcagtttactgggaatgccatgagagcgggtgtgtttcctcgcagtcgttcgatcgcagcacctcctcattcttcattctgcatgcaaagaattttaacctgatcccttggcctcgtcctgtttctctcctagcttcagtaattttgcccaagtccctagagcctaccccgcccccacccccgcacgcgcagtgcatgccggtcttagcccctctgtagggaaagagggtccgccatgttccccggcggcgccgccgcttggctctggtagccgccgcccccgcccccaaccccgcccggcccagagcctagccgagccccgggcccagcatggccgccccggagccggcccgggctgcaccgcccccacccccgcccccgccgccccctcccggggctgaccgcgtcgtcaaaggtg

SEQ ID NO: 5336 - DNA, 2300 bp, Homo sapien
gattgggcttcccatattagtaaatcatattctccataatgttataagggtgactgggtgactatatcctcaaaagttgatagtatattttcattcaaatttaggggcttgttttgaatataagcaatttagataggtaaaccgtttccagaaaacgtatacatcctgatgtatgtgagtgatcgaggctttatttaagtccttgtaacattaagtttttaaagtcagaaatacaaaacaattagtgagaaaccaactaaatacagttaatccctactcctactcctaaatctcaagagagtcatattgctttggggaaacatctcagtgactaatagaacaaaatccagattataaaaacatatttgaaatggttaatttctgtgtattcccatgagcccaaatcaccctgtattttgtaaatgtggcctcatagttcctttggccgggctgcctctcaggaccccaggtaggacttgcctccctgtatagcatcctggatttttgctgtttggtatgagtgattttcaggctttgcttaccttccatgtcatctgcatgtgagactagctgattttgtttcctaatttgcaagtagaatgtgattggaatgcgacttcacaggtagtgaagaatattggcaagggctccacttaatgttactgtgcaactttggtgagggtgtttaataaagaggattaacgttacctatttacctgagtgtgagctgaccatgtgccttttcttttgtgatcctctgaactactgactctacttgtgcttgtctttctgtttatttttaccattccctgtgtgaatagctagaaatgggaatggaatgttgagttctttctgtaagtgttcctgtcagtcaaggcagcttatgactagctctctccatttgtttcagtgaacagcctatcccgctccaagtattgttaagccaagaggcccaactggaatccggcatggatacagagtttggggccagttctttcttccattcacctgcttcctgccatgagtcacactcatcactatctccagagtcatctgccccacagcacagctcccccagtagatctgccttgaagcttctgacttcggttgaagtagacaacattgaaccctctgcattccacaggcaaggtttacctaaagcaccagggtggactgagaagaattctcatcatagttgggagccattggatgccccagagggtaagctgcaaggctctaggtgtgacaacagcagttgcagcaagctccctccacaagaaggaagaggcattgctcaagaacagctgttccaagaaaagaaggatcctgctaacccctccccggtgatgcctggaatagccacctctgagaggggtgatgaacacagcctaggctgtagtccttcaaattcatcagctcagcccagccttcccctgtatagaacctgccaccccataatgcctgttgcttcttcatttgtgcttcactgtcctgatcctgtgcagaaaactaaccaatgcctccaaggccaaagcctcaaaacttcattgactttaaaagtggacagaggcagtgaggagacctataggccagagtttcccagcacaaaggggcttgtccgttctctggctgagcagttccagaggatgcagggtgtctccatgagggatagtacaggtttcaaggatagaagtttgtcaggtagtctaaggaagaactcttccccttctgattctaagcctcctttctcacagggtcaagagaaaggccactggccatgggcaaagcaacaatcctctctggagggtggggatagaccactttcctgggaagagtccactgaacattcttctcttgccttaaactctgggctgcctaatggtgaaacttctagcggaggacagcccaggttggcagagccagacatataccaagagaagctgtcccaagtgagagatgttaggtctaaggatctgggcagcagtactgacttggggacttccttgcctttggattcctgggtgaatatcacaaggttctgtgattctcagcttaagcatggggcacctaggccaggaatgaagtcctcccctcatgattcccatacgtgtgtaacctatccagagagaaatcacatccttttgcatccacattggaaccaagacacagagcaggagacctcagaattggagtctctgtatcaggccagtcttcaggcttctcaagctggctgttctggatgggggcagcaggataccgcctggcacccacttagccaaacaggtaagaatgcaaccagg

SEQ ID NO: 5337 - DNA, 2300 bp, Homo sapien
tgtactgctggtccttatcttaataattcctaggatgcaaaaagtacagcataataagaccatttgtccacatttcccatgggtaactttagccctggacttgtgtaataacgcgattattatatttgtatatattatgttcttagacatggcaatccaggctacatttcatgttgtagtagctaccatgtgatttattttgggatttcagtgcttcctatccttatggaagcagagaaagcagtctttcttgctctgattgcaccatagagaagagacacaaagattccctttgctttgcttctttatggtcaggactaggaaagaagttccagtagtcattgttgtagttctcacatcttagccctggaatttggcttttacttagaatagatgaatttaaataaacattaatttggaccgttaataattctgagtagttttcaaaatataaattagtaaaagcagttaacattttttttttttttttttttttggagacaggatcttgctttttcacccaggctggagtgcagtggcacgatcacagcttactgcagcctcaacctcctgggttcaatgttcaaaaggcaaatgttcaaaaatagttaactgctaggcatggtagctcacgcctgtaatcccagaattttgggaggccgaggagggcagattatttgagtcaaggagtttgagaccagcctgggcaacacggtaaaaccctgtctctacaaaaaacacaaaaaatttagctgggcatggtggtgcatacctgtggtcccagctacttaggaggcttgggtggaagaatcggttagcccggcaggtcaaggctgcagtgagccgtgatggcactgccacactccagcctgggtgacagagcaagaccttgtctcaaaaaaaaaaaaaaaaaaaaaattgcaggtctatttgatgctaaagcacatgtccttaaccattatgtaatattgccttgtatgattgggcttcccatattagtaaatcatattctccataatgttataagggtgactgggtgactatatcctcaaaagttgatagtatattttcattcaaatttaggggcttgttttgaatataagcaatttagataggtaaaccgtttccagaaaacgtatacatcctgatgtatgtgagtgatcgaggctttatttaagtccttgtaacattaagtttttaaagtcagaaatacaaaacaattagtgagaaaccaactaaatacagttaatccctactcctactcctaaatctcaagagagtcatattgctttggggaaacatctcagtgactaatagaacaaaatccagattataaaaacatatttgaaatggttaatttctgtgtattcccatgagcccaaatcaccctgtattttgtaaatgtggcctcatagttcctttggccgggctgcctctcaggaccccaggtaggacttgcctccctgtatagcatcctggatttttgctgtttggtatgagtgattttcaggctttgcttaccttccatgtcatctgcatgtgagactagctgattttgtttcctaatttgcaagtagaatgtgattggaatgcgacttcacaggtagtgaagaatattggcaagggctccacttaatgttactgtgcaactttggtgagggtgtttaataaagaggattaacgttacctatttacctgagtgtgagctgaccatgtgccttttcttttgtgatcctctgaactactgactctacttgtgcttgtctttctgtttatttttaccattccctgtgtgaatagctagaaatgggaatggaatgttgagttctttctgtaagtgttcctgtcagtcaaggcagcttatgactagctctctccatttgtttcagtgaacagcctatcccgctccaagtattgttaagccaagaggcccaactggaatccggcatggatacagagtttggggccagttctttcttccattcacctgcttcctgccatgagtcacactcatcactatctccagagtcatctgccccacagcacagctcccccagtagatctgccttgaagcttctgacttcggttgaagtagacaacattgaaccctctgcattccacaggcaaggtttacctaaagcaccagggtggactgagaagaattctcatcatagttgggagccattggatgccccagagggtaagctgcaaggctctaggtgtgacaacagcagttgcagcaagctccctccacaagaaggaagaggcattgctcaagaacagctgttccaagaaaagaa

SEQ ID NO: 5338 - DNA, 2300 bp, Homo sapien
tttgttagctctccatgcatttgacctaggttttttttttctaagcatatcttcaaacttaatttacctgcttaattcatctctggcttctagcaatttagttgcttatatcctttagaatctgacttttgctgtcatcaaatcatgctcatgtatttgcatactatgggcatgaagcagggcaagttacataaaagagcccagctctcctggttttcccagtgattagtattaaggaactatgaagtgtaatctctggatggagccaagtttcgtgaagatgggttggggataggaatgagaatcaaagttgaaatgccctttaaatgatccacaattaaggaaagcttggaactgggtcttaaagccatataaaatcagacctcttgtgggcaaagtctggagtatccaggataataccagatgtactgaaaatcagactttatttgatatgtgttgctaaataaataaaaggaaaactctgtcttcaatttatgagagtgaaagtatatggctacctgacatttttatataatctttaaaacttttgcctttaaaaagttacctagaaacatgtcattagtccttctgggtcactggggaagattaggagtgggattgagattggtcattgctcaggagacattgtaaatttggatgctcccagcttctctgcatttatcttttttttttttttttgagacagtcttgctctgtcgtccaggctggagtgcagtggcgtgatctcggctcactgcaacctcctgggttcaagtgattctaatgccttagcctctcagtagctgggactacaggcacatgccaccatgccggactaatttttgtatttttagtagagacagggttttgccatgttggtcagtctggtctcgaactcctggcctcaagtgatctgcccgccttagcctcccaaagtgctgcaattataggtgtgagtcactgcacctggcccttctctgcatttatctactgggaggttcctacactgaaatcagatagcctatgccctacagcttctgttccatgggtactctaaatttgtggcactcccaaagggagattaggtaggttctcaggagggtggaggttagtctcagataccagcttaccccaatttccttgttttttcaggacacctgactgatagtgaatgtaatcagaaacacacatccaagaaagggtcactgatagagcgcaagaggagctctggtcgggttaggaggaaaggcgatgagccccaggcctcgggataccacagtgaaggcaagcccttctgcactgcttctctttctccttcattcactctatcaaacttctgtcatgctccagactgttggcttctcctttctgttcagagggcttttctttgctttttcgacattggggtctagtatccatgatcactttaaacatctatatttctttcattctttgtgtttttaggagaaacactgaaagagaagcaggctcctagaaatgcctccaaaccatccagcagcaccaacaggctgagagattttaaagagacagtcagcaatatgatccataacagaccatccctggcttctcagaccaatgtaggctctcactgcaggggcagaggaggagaccagcctgacaaaaaacctcctaggaccctgcctttacactctcgtgactgggaaatagagagtaccagcagtgagtcaaaatccagttcttccagcaagtatcgtcccacatggagacccaaacgagaatctctgaatattgacagtatctttagtaaggacaaaaggaagcactgtggctatacccagcttagccccttttctgaggattcaggtgaggagataattagggaagaattgggcttttgaataaagttgatttatgtctttttaaaacctgggttttttggtacatctggcaaggggcacttttactctgatgtcgggtgttttagggatatgagttcagtgaataagtagctagagggaggagctagttaggtcttgattttaggcaaatgctaaatctacctcattttccatacctgtcttttgattgggatagctaaagaatttataccagatgaaccaagcaagccaccttcttacgacattaaatttggtggaccaagcccccagtacaagcgctggggcccagcacggccaggctctcaccttttagagcagcacccccgactaatccagcgaatggaatctggctatgaaagcagtgagaggaacagcagcagccctgtcagcctggatgcagccctgcctgagagctcaaat

SEQ ID NO: 5339 - DNA, 2300 bp, Homo sapien
tcataatattttcatggtttatgtgtttgactcagcatctaaatgaggtctatgcattctgatgagttgataagtcctttgcatttcttttaatctactgttttttcctctattttttttccttgcaatttattgctagaactaggtattttgtcctgtagatttcccacattctgaattttgctgattttattcctatggtatactttaacacgtttctgtgtcctatatttcttgtaaattggtagttggacctagaggttttgtcagacttgtgctggctttcttttgatgactactgcattgattgtgtcaggtgtgagttttttagacccactttttgaagctgtgaaccagagagaagccaagccacaggataaactaagcatattttccagtagaggcagatttgtgttaatggtttgaacatgcccattggtttaacatttgtaagacttagttgcggccgggcacagtggctcacgcctgtaatcccagcactttgggaggccgaggtgggtggatcacgaggtcaggagatcgagaccatcctggctaacatggtgaaaccccgtctctactaaaaaaaatacaaaaagttagctgggtgtggtggcaggcgtctgtagtcccagctactcaggaggctgaggcaggagaatggcgtgaacccggaaggcggagcttgcagtgagttgagatcgcaccactgcactccagcctgggtgacagagcgagactccgtctcaaaaaaaaaaaaagacttagttgttccaagttatttcctcctctcttaaatctttcttgtgggcacagaggtagcaaacgaccaaataaaagcaatacaagattccaaggggcaactgattgaaaatatgtatccatatcactacactggtgatacttgaatatgcataaggattctcatatgctatcatgtgaaaacaaatttttgttagctctccatgcatttgacctaggttttttttttctaagcatatcttcaaacttaatttacctgcttaattcatctctggcttctagcaatttagttgcttatatcctttagaatctgacttttgctgtcatcaaatcatgctcatgtatttgcatactatgggcatgaagcagggcaagttacataaaagagcccagctctcctggttttcccagtgattagtattaaggaactatgaagtgtaatctctggatggagccaagtttcgtgaagatgggttggggataggaatgagaatcaaagttgaaatgccctttaaatgatccacaattaaggaaagcttggaactgggtcttaaagccatataaaatcagacctcttgtgggcaaagtctggagtatccaggataataccagatgtactgaaaatcagactttatttgatatgtgttgctaaataaataaaaggaaaactctgtcttcaatttatgagagtgaaagtatatggctacctgacatttttatataatctttaaaacttttgcctttaaaaagttacctagaaacatgtcattagtccttctgggtcactggggaagattaggagtgggattgagattggtcattgctcaggagacattgtaaatttggatgctcccagcttctctgcatttatcttttttttttttttttgagacagtcttgctctgtcgtccaggctggagtgcagtggcgtgatctcggctcactgcaacctcctgggttcaagtgattctaatgccttagcctctcagtagctgggactacaggcacatgccaccatgccggactaatttttgtatttttagtagagacagggttttgccatgttggtcagtctggtctcgaactcctggcctcaagtgatctgcccgccttagcctcccaaagtgctgcaattataggtgtgagtcactgcacctggcccttctctgcatttatctactgggaggttcctacactgaaatcagatagcctatgccctacagcttctgttccatgggtactctaaatttgtggcactcccaaagggagattaggtaggttctcaggagggtggaggttagtctcagataccagcttaccccaatttccttgttttttcaggacacctgactgatagtgaatgtaatcagaaacacacatccaagaaagggtcactgatagagcgcaagaggagctctggtcgggttaggaggaaaggcgatgagccccaggcctcgggataccacagtgaaggcaagcccttctgcactgcttctctttctccttcattcactctatcaaacttctgtcatgctcca

SEQ ID NO: 5340 - DNA, 2300 bp, Homo sapien
ggaactggtctatatcttgataaaatggcatagagctatacatacacacacacaaatgaatgcatgtaaaactggtgaaatctgaataaagtctggatcctatcaatgtccatttcctgatacagttatcaaagttgtgccgggtgcggtggctcacgcctgtaatcccagcactttgggagcctggggcgggcggatcacgaggtcaggagatcgagaccatcctggctaacacggtgaaacctcgtctctactaaaaatacaaaaaattagccgggcgtggtggcgggcgcctgtagtcccagctactcgggaggctgaggcaggagaatggcgtgaacccgggaggtggagcttgcagtgagccaagattgagccactgcactccagcctgggtgacagagcgagactccatctcaaaaaacaaaaaaacaaacaaaaaaaacacagatgttactgttggaggaagctgggtgaagggtacaggggatctcctatacatttttgaaacttgctatgaatttataatttttttaaactaaaaatttttaaaaatcaaaatattcctaccttccagaagggttgctgtttctatgggtaagctgcttaccaatttatgtatttgtctattaaatattgttggtatactgcttttgttctttccctgtcaggaaaacctcctgatgagaattcacttccacattgctgatgaaaccaaagaggatatatgtactgcccaacactgcatttcccatcagaaatttgcaatgacattgtttgagcaggtgaactctagctccatctttttttagacatttcttccagaacactttatcctgggatgtggggtgttaaatgggtgccaaaacagttcctgattatggttgcttggttttgcctttttctcttttgcccagtgtgtatgtactagctgtggtgccacttctgatccgctgcctttcatccagatggtacattatatctccaccacttccctttggtgagtcttacaagattttctgttgtgcgtttaggcattcctccagttgattggacttttttttttttttttgagacagagtctcgctctgttgcccaggctgcagtgcagtggcacaatctcggcttactgcaacctccgcctcctgggttcaagcgattctcctgcctccatctcccaagtagctgagacttccagctacttacaaatagtacacactgcgctaatttttttgtgtttttagcaggacggtgtttcatcatgttggtcaggctggtcttgaactcgtgacctcaaatgatctacctgccttggcctcccaaagtgctgggattacaggcgtgagccacagtgcctggcctattggactttaattggagacattcaaatagttttatatcttggccgggcatggtggctcatgcctataatcctagcactttgggaggcccaggtgggcggatcacttgaggctaagagttcgagaccagcctggccaacatgacaaaaccctgtctctactaaaaatgtcaagaattagccaggcatggttgcgcgtgcctgtaatcccagctattctgaaggctgaggcatgagaattgcttgaacccaggaggcggaggtttctgtgagctgagattgagcccctgcactccagccaggtaacagagcgagaccctgtctcaaaaaaaccaccaccaacaacaataaaaacacaaatagttttatatccttattgctgaatctgtgctatattgtaggaatgcagaacagtaatttaaaaataatttttgttctccttctttcctctcccatccctccccttttcttaggctcagtactggccagcaaagtgggaggaggagtggggattctatgagctttggatctggggacaggtagaggtacttactgtgtttatgggacactgagcctggtcaggggctttggtatagggggcagaggaagaaagtcaaatgtgtgagttaggaatgtacattaatgtttgatttagcagtaactaaatacaaaccatcatcccccttctattccccatcttgaagcaatcaggctatttgtatgctggaaagacgagagaaaccttcaccaagcatgtttggtgagctgctgcagaatgccagcaccatgggggatctgcggaactgtccagtgagttaaatcaggggtggggtttggagtgggaaagggaaccatcgatcagtggaattgatgcaaagccagtgggaaacatgttgaactagccttatatatgtatttcagagcaactgtggagagagga

SEQ ID NO: 5341 - DNA, 2300 bp, Homo sapien
gtagcttatgattgtctttaacctcaccattgcaagtccaaaatattgttatgaacagaatgcaaataaagtcttaaagttatgaggtgatatggtattgataattgactttaatttaaagagactggtaaaggataggtatgtgcttttctaattgagagtccagaaggtagatatatggttagagaatctcaagggagaaactagccagctcttctctgccttccccaaagttagatcaagagttcgtattaaattacatatgtgatgatattaagacattaataacttttggggtgtgtgtgataatgatattattatttatttagttatttattgagacagggtcttgctctgtcacccaggctgaagtgcagtggtgcaattatagctcactgtagcctggaactcttgggcttaaatgatcttcccacctcagccaactgtgtagctgaaactacaggcatatgccactgtacccagttaatttttttttgtagagacaaggtcttgccttgttgcccaggctggtctcaaactcctggctttaagccatcctcccaaagtgctgggattataggcatgagccacagtgcccagccttatggtcatgtttcagagaaaaagttattattttttagagatatattttgaaatatttacaaatgaaaaatgtttggcacttgtttcaaaatgatctgagagtaagttaagtggatgggtggtatagatgaaataagattggccacaggttgataattgttgaagttgaatgataaataaagggagttgatttagctcttctgtctactcttgtatgtttgaaattttttacaataaaatgttaaaatcctatgttattatttttgagtgccaaaagggtaaaatgtttttcccctcttaaaagacaactttcaacattcttttgaatacagaaaaccaagtgaacgtctcttttccagtagtcagtgatcctcaaggactagctcctttaacttacttacagagggtagtgtttacaaagaagccagactggccaattaagttctatgattcccaggagatgtagcgaaagcagtgattatgagagccaaaattgggaagtccaggttgagaagagaaaccctaagaattgagttaatggcagggtgtaaagtttgtcacacctttgcagaaggtattgcagggatgaagtgggctgcccactggagcactttccaaagaccttgagctcaaaaagcaccaaaattagtgacaacctttctccttaatcctcaccttctctactcatgacttcttttagatataagactgggaaatcctgagagagaaaaaaacagctgttccccacttaaagacaagagtctgttttaggggaaaaatacttaagcaacagctgcatttgtagatgtcgaagcataaagactttctgtttttatggcacttctatcttatttacatggtttttactaatccaaataattatgtgctcatgtggatagaattgtttgctgcttaatcaagagagatgggtggggaagcacctgcttttagtcgttaaaatcttgttgcttttgtactgcatccaagaaactagttaacagacaaaaagtgatttgccttttcctgagaatgaaaaggaagacctctttggtttcaccctgtgaagaagagcagagagaaactccaaggtggattttctctacttgttgaaatggaaccatcagggacctcacaggaaaagtgattcttgggttttggttcttcctgccctttctctctgcctgtcatagaactcagcaattggaagaataccagtttttgttccttattggtgctgccacctgttcttactgctgaactaaatgttcttggctttctttggtgtgaacaggatctccctctgggaaaggtgggaggagggtgaaaaagagaatgggaggaggcccattccagtccctgtgctcatgtgagagggacacacagaggttagtgtgctgctctaacagaggggctttgtgctacagcttcttccagagctccacagatgcatgctgggcgggctcagtcagctttacccctaatacacttgcttcttcctaacaatagcagagcaagactgacaacaataattaaaataagagaataaagaagatgtagtcagaggccattctgaatgcattcagattctcagtgtgtatgaggaaggctgcctgtaattaagaggtgagaaaagattatattgtggagacgttgataccactgaactggggagccagatctattgttacagacccact

SEQ ID NO: 5342 - DNA, 2300 bp, Homo sapien
tgcctcagaaacaaaacaaaacaaaacaaaacaaaacccaaaaaacaaaactaggtagtgagagccatacagataaaactataattcccctcctcacatatcttcagtaaatggtattggagaaggattacattgtttaatgctatatctacaatttaagtgaaatgtttttggtgttagtatttctctggaccacttgttactgcctctcttgtctggtcctttatgctctcacttctagttggtgacacatctagaacaggtctgagaacttactgctttaccctacataatactgccattcagagcctgagaatcttttctctgctactgcgtttttctccttttgctccctgtactcaggagtgtgtgtcatagggcaggctgagtttcagttagctcctaatgtggatattggaaaccccacctgcctgccaagtccttttggctgtgagcaaagtggaggcttggtacttgtcattcctttgcagcagttgagctgaaggaatgctgcatggcttgttggaagttgcttagtggccttgagtggggtgtgtatgagggtgtgtgtagaaaggtgagggtcttatagtctgtgtgggagatatgggttcttttctagtgtcatgttaatcatcaggcagtatttattgactgccttcttatgactggcactgtaataggagcttttggaatagaataataaaatatataattaagtcattgtttaatagtcaaacatttctagatctgccacttaccagtgttgaattgggcaagttaatgtctttaagcctctctttacttttctgtaaaatggaactattaatagctatctgataggactgttgtgaatattaaataaaggacataagtatcgtgtttagcacatacctgactgtagctactatttcatttcatgtagtcatattatgacggatacgatataaaacagagagtaataaaaatagagaataatgtgacagtaggctgtataatcaaatactttaattgggacatgtagattataaatagtctgggaatttacagaagggaaagaacagtcttatgcaaccatttaatattcctgtacctcagtttttccattggacatgctgtagacaatgctaggtgatctcccagagaatgattaagatgttaaagcatttttgtgtttttagatggtgcatatgatggtgagaaggaagggagaatgaggaattgttgatgttggcaaatttaacacttaacatttaaaaatttttccttatgtagatggacatggcagccttataggaaaacttaaagctggagatgtggtgatttccttccagggaacatacttgctttggtattactctctgttgcctcactggcattttaattagttgaaaactaaagttggtcaatggattgcctctgattgtgagcccttggatataatctggagattaaatgatttgtaacccaaattatctctctgatcctctggcaaaaatgaaacaaacaaacaaacagggcaggagaagatttagttctcttggactgcatgttaaggacatgtggtttactcgccatcagtgtttctctggatggaacatctttactcagaacagatcttagactgctaacatggccttcccacctttaagcacgttttcataagcatattcatggaaaacaccttttaaaaagtgctttattcacaatgtccaaaaggaactttcagttcctagtttgtgtgtgcttacttggtgatttgttttgtgttagcctgatactggaaagtttgtattttgtttttatttctatccagatcaactttcttctgcttcaagaaaatttcagagaattttcccctgaaagtaaagctgttcatacctttttttccttctctttagtttgggtgtctctctcttttttttttttttctttttttctttttttttggcattgtttgccaaggtttcaagtttatagtgagaagtgaggcaacgttgatcttggcagaacagtccaaagccagtagagtcattaagtgacgcaagcttttgattttttttatttctgttaaagctctctgacacagctggctattctagtcccagaagaaagaggagagacttgctgaagatctggatgggacaatagaagtttggggcacattaaaaagaagcagcaagaacatcaacaaaaacctcagatgattcaaacaggcttcttcttggctttgtggaaccttttgcagttgctcagaatttgagtttttgcttcagaggatgatgagacaaggcaataga

SEQ ID NO: 5343 - DNA, 2300 bp, Homo sapien
agtgctgtgattacaggcatgagccaccacgcccggcctattttatcttctaattgcttccttgggttgggaggggatggaggaggacaaaagatgaggggtctggaggcataactagcctgggcagaagccaactgtgaggggataccttttagggtctccacaggatggaaaaaggacatggtcaggaagagtaaagagctcagaaggggacaaaggaagttacaaaagccacttcctggtgcgtgcctgtagtcccagctactcagaggctgaggtaggaggatcacttgtgcccaggtgttcaagtccagcctgggcaacatagtgagacccccatctctaaaataaagaaagaaataattttttaaaaagccagctaggcacagtggctcacgcctataatcctagcactttgggaggctaagacaggaggattgcttgagcccaggtgtttgagaccagcctgggaaacatagtgaaaccctgtctctacaaaacatatgaaaattagctgggcgtggtggcatgtaccagcagccctagctacctgggaggctgaggtcgaaggattacctgagcctggggaggctgaggttgcagtgagccaaaattgtgccactgcacttcagcacaggcaacagagtgagaccctgtctcaaataaataaataaataaataaagccacttcctcaggtagcagcaacagggttgtggtggctgcagcagaagtgctgcagcaactggttccagaatctaagcagaaggtggaggaagatcatgcagctactgaagaagggcctggggaaatgataggctttccccaaaggggctttcaagcctgtggccctgcccagagactccgctggaacagtacaaatggcacagtccagatcctatgtggtatgtgctccctttgcaggaaatctcaagtagaaacctcagagagcctgtaatcccagcacttcgggaggctgagatggatggatcacgaggtcaggagatcgagactatcctggctaacacggtgaaaccccatctctactaaaaatacaaaaaaaaatttagccgggcgtgttggtgggcgcctgtagtcccagctactcgggaggctgaggcaggagaatggcgtgaacctgggaggtggagcttgcagtgagccgagattgcgccactgcactccagcctgggcaacagagcgagactccgtctcaaaaaaaaaaaaaaaaaagaagaagaaaagaaacctcagagagcctatatgtgcttctcagggagacatcgatgtctatcccgcacagcaggttgaactgagcatctcaacagcaaatggaggttaaaaggcagatcctggctgggcgtggtggctagagaataactccttagagaccagatcctggcggtggctcacgcctgtaattccaacattttgcgaggccaatgtgggtggatcacctgaggtcaggagtttgagaccagcctggccaacgtggtgaaaccccgtctctactaaaaatacaacaattagccgggcatggtggtggacacctgtaatcccagctactcagtaggctgaggcaggagaattgcttgaacccaggaggtggaggttgcagtgagccgagatcgcaccactgcactccagcctgggcaaaaagagcgaaactccatctcaaaaaaaaaaaaaaaaaaatgcagatccaagtgtttgtcttttattaaaactgccagagctcaagaggaaagaatagggagtgaggcagacagaataattgtcaagtcttccccacatcattcctttgtaggaggtactgggtttagttaatttggtcccttaacctgccaagatctagcccttaccgagaaaagaccaacctatccaggaactttaaaagagcagttccactgtgaagacttccctttttgtccccaaatatagcactttaagccctccctgctccaaatacacccacaggtctctccactctgccctggattggctctgtgtggccctcagggcatgttccccagactctctctctctgactgaattcctatccaatacttgctgtctacttcctgtctccctctcagtcttcagtttctccctaagtgcttctttggatctcaggctctaggtgcaatgtgaaggggagtccctgggcagactgatccctggctcagacagttcagtgggagaatcccaaaggccttttccctccttcctgagcctccgggcaaggagggagggatcttggttccagggtctcagtaccccctgtgccatttgagctgcttgc

SEQ ID NO: 5344 - DNA, 2300 bp, Homo sapien
tgaaccccttttccccagccaggatccttcaatctgagccttaaatccagccttctatagccgtacattctccctaccttgggacccttggatacagtcttggggacaggaggggtaatgagtagaaggggagcataattattctcatggccaccattatttttgctgtttgaaccaatgtggcaaaagggtaaggtgattcagttcaacccaggaacagggtaagtagggaaattggaaagggacacaaatagatgaagggtttggtggtggtgataattgttattgtgtgtcatgattgggtgaaagcagagtacagacacaggacaggggagtatttaaaagcaggttgaaggcggggcaaggtggctcatacctgtaatccaagcactttgggaggctgaggtgggaggatagcatgaacgcaggatttttgttttgttttgttttttgtttttttgagatggagtttggctcttgtgcctaggctggaatgcaatggcgtgatcttggctcattgcaacctccgcctcccgggttcaagcgattctccagcctctgcctcccgagtagctgggattataggcacccgccaccacacctggctaattttttgtatttttagtagagatggggtttcaccatactggtcaggctggtctcgaactcctgacctcaggtgatatgcctacctcggcctcccaaagtgctgggattacaggcgtgagccaccatgcccggcagaagccaggagtttgagaccagcctggacaacatcgtgagacttcgtctccagtaaaaattttaaaattagccaaacactgtggcacatgtctatggtcccagctacttgggaggctgaggcaagaggattgcttgagcctgagaggtttgggctgcagtgagccatgtttgcgccactgcactccagcgtgagcaacagaccaagaccctgtcttaaaaataaataaataaataaataataaaaattaataaataaaagtgggtcaaagctacaggggttcttttttttttctggttttttttttttttttttttttttgagatagagtcttgcactgtcacccgggctggagtgcaatcttggttcactgcaccctccacctcctgggttcaagcaattctcctgcctcagcctcccgagtagctgggattacaggtgcccgccactacacctggctaattttttgtatttttagtagagacggcgtttcactatgttggccaggctggtctcgaactcctgaccttgtgatccacccgcctcggcctcccaaagtgctgggattgcaggcgtgagccattggccaaaggattctttatagtattaatagcaggcacctttgacatttgcaagttcagttcggattcctggggactgagaggctatgggatgatcatgagatcccgaggaagtggcagagggagggagctttggctccttatctcaggcaagaatgttggcctgggcagaaaaagcccattccacttatctcaggctttgctatttttgatgtgagctacagaacaaggtctaagggtaaacgttctccctgctctatgcctcccgtgctttcccacagagaccgttcttgttacctccaaaatctcatgattccccctctagttatatttcttccctctcctccaccattttgattcctgatctatagaactttgtgtctctcagtttggagtggaggctaaggacatgagagttgagagtctgacatccctgagtgtccaatatcccaggaattccagatgcgtgcctaggatcctatgctttcctcaattctccacttatctccccctcccttcccataatgctggatgagactgtagctactggctcagagatatttttagtcaagcagacctcattgtctactggggtggggttgggggaagggaaggcaggtgcccacatccatcacaccggcacttgtggggcagcccagagaagggagagggccaggctccaaaaatagcacagtgagctcattcagctgccagctctggggacaagacaaaggggctttaaaaggcgtggggggtggctcaagctggtcctgctccagccaacaccgcctttctcagcatggagacctttgagcccatcagccaagagcccctcagccaagccagctatgacaaagccccagacccagttcctgagctccaagactcgttctatgcaggtactaccctcccatatctatgagagtctggggtctagaatggaggggaagatgtcaatagtttaggaagggtagtct

SEQ ID NO: 5345 - DNA, 2300 bp, Homo sapien
ccgaggtgggcggatcacctgaggtcaggagttcgagaccagcctggccaaaatggtgaaaccccgtctctactaaaaatacaaaaattagccgggcatggtggcgggtgcctgtagtgtcagctacttgggaggctgagacgggagaatcgcttgaacctgggaggtggaggtagcagtaagctgagaccatgccattgcactccagcctgggcaacaagagcgaaactcggtctaaaaaaaaaaaagggggtggccgggtgcagtggctttcacctgtaatcccagcactttgggaagctgagatgggcggatcacgaggtcaggagtttgagaccagcctggccaacatggcgaaaccccgtctctactaaaaatacaaaaagctaactaagtgtggtggcacatgcctgtagccccagctactcagggggctgaggcaggagaattgtttgaacctgggaagcagaggtggcagtgagccaagatctccattgcactccagcctgggcgacagggcgagactccatctcaaaaaaaagaacccaagttcaattcttctgaccccaaaatcccaactattttcttcttggagatcaggtctccctctgttgcctccaatgttttctcccctttttcttttttttttttggagacagggtctcactatgtcacccaggctacagtgcagtggcaggatcacgactcactgcagcttcgacctccagggctcaagcaaccctcccacgtcaatatcccaagtagctgggactataggagcatgtgaccaggcaggcctggctaaatttttttgtatttttttgtagaaacagggtctcaccatgttatccaggctggtcttgaactcctgggctcaagcaatccacctgcctcagcctctcaaagtgctgggattataggcatgagccactgcacccagcccaagtgtttctaggacatagaggcatatgccaaggcaaacggtatttagcatacactaggtgggcagctattttatgaaactctgtagcctttgataatcacagttatagcaccataatgttatgccttgtaacagagacattctcgtaatggaaacctagagacaagtagagattgtattaacatgggttggtatgtttatgcacacctacacacctttccatgaccacgtatgtattgcaataggtaatttgtttttttatagttttttgtttgtttgtttgttttttttttttttttgagacggagtctcgctctgtcacccaggctggagtgcagtggcacgacctcggctcaccacaagctctgcctcgcgggttcacgccattctcctgcctcagcctccagagtagctgggactacaggcgtctgccaccaagcccagctaattttttgtatttgtagtagagacggggtttcctcgtgttagccaggatggtctcaatctcctgacctcgtgatccgcccaccttggtcccaaagtgctgggtttacaggtgtgagccaccgtgcccagcctatagttttttggtttttttttttaactttttttaataataagaaaatagagatggggggccatctcacgatgttgcccaggctggtctcaaattcctggactcaagcaatccacccaccttggcctcccaaagtgctaggattacaggcgtgagccaccatgcctggcccaccatttattaattaacagataaatttatatagcgagagtgcattctttcctgggatcttggagcaagcccagccattctttgccagctatggaattgaagcccctgctgctgccactttgaaagggtctttggaggaaagcagttgagattagcccatggtcctattagagaaggcacagttcctgaaagggtgtacattggttatagagcccagagagtttgtattctgagtcctgaataaaaggcccatgcaggagaattgggaacatggagggcagaagtttgtactataattagctctaggagtaacacagaagggggagggaggggagtacaagcggcatctattttgagcacatctgcgattgacgggacatgtgtgctggactgtaatgatcccagggccaagttgcctgcctgtggtgtgtggtgtgggggggaggcctggggcagcaggagcaggacagccggacaggaagcccagacggggttcgagcacctcaacttctctcctggggacactgttcaaactccgggggccataggccaagctgagcgatgggtgctgaggaggaggtgctggtcacactatcagggggagccccc

SEQ ID NO: 5346 - DNA, 2300 bp, Homo sapien
agcacaatggctgacatgtagctaacactcaataaatgtttgaatagtgaatgaatagatatttagatcctctttttttttttttttttttttgagacagagtttcgctcttgttgcccaggctggagtgcaatggcgtgatctcagcttactgctacctccacctcccaggttcaagcgattctcccgtctcagcctcccaagtagctgacactacaggcacccgccaccatgcccggctaatttttgtatttttaatagagacggggtttctccatgttgatcaggctggtcttgaactcctgacctcaggtgatccacccaccttggcctcccaatgtgctgggattacaggcgtgagccaccgagcctggcctaaatcctctttttactggtgaggccaagtgactgccctgcctgaggtcacacagctagtaagttattgaggaacccaaattcaagctgggtacggtggctcatgcctgtaatcccagcattttgggaggccgaggtgggcggatcacctgaggtcaggagttcgagaccagcctggccaaaatggtgaaaccccgtctctactaaaaatacaaaaattagccgggcatggtggcgggtgcctgtagtgtcagctacttgggaggctgagacgggagaatcgcttgaacctgggaggtggaggtagcagtaagctgagaccatgccattgcactccagcctgggcaacaagagcgaaactcggtctaaaaaaaaaaaagggggtggccgggtgcagtggctttcacctgtaatcccagcactttgggaagctgagatgggcggatcacgaggtcaggagtttgagaccagcctggccaacatggcgaaaccccgtctctactaaaaatacaaaaagctaactaagtgtggtggcacatgcctgtagccccagctactcagggggctgaggcaggagaattgtttgaacctgggaagcagaggtggcagtgagccaagatctccattgcactccagcctgggcgacagggcgagactccatctcaaaaaaaagaacccaagttcaattcttctgaccccaaaatcccaactattttcttcttggagatcaggtctccctctgttgcctccaatgttttctcccctttttcttttttttttttggagacagggtctcactatgtcacccaggctacagtgcagtggcaggatcacgactcactgcagcttcgacctccagggctcaagcaaccctcccacgtcaatatcccaagtagctgggactataggagcatgtgaccaggcaggcctggctaaatttttttgtatttttttgtagaaacagggtctcaccatgttatccaggctggtcttgaactcctgggctcaagcaatccacctgcctcagcctctcaaagtgctgggattataggcatgagccactgcacccagcccaagtgtttctaggacatagaggcatatgccaaggcaaacggtatttagcatacactaggtgggcagctattttatgaaactctgtagcctttgataatcacagttatagcaccataatgttatgccttgtaacagagacattctcgtaatggaaacctagagacaagtagagattgtattaacatgggttggtatgtttatgcacacctacacacctttccatgaccacgtatgtattgcaataggtaatttgtttttttatagttttttgtttgtttgtttgttttttttttttttttgagacggagtctcgctctgtcacccaggctggagtgcagtggcacgacctcggctcaccacaagctctgcctcgcgggttcacgccattctcctgcctcagcctccagagtagctgggactacaggcgtctgccaccaagcccagctaattttttgtatttgtagtagagacggggtttcctcgtgttagccaggatggtctcaatctcctgacctcgtgatccgcccaccttggtcccaaagtgctgggtttacaggtgtgagccaccgtgcccagcctatagttttttggtttttttttttaactttttttaataataagaaaatagagatggggggccatctcacgatgttgcccaggctggtctcaaattcctggactcaagcaatccacccaccttggcctcccaaagtgctaggattacaggcgtgagccaccatgcctggcccaccatttattaattaacagataaatttatatagcgagagtgcattctttcctgggatcttggagcaagcccagccattctttgccagctatggaattgaagc

SEQ ID NO: 5347 - DNA, 2300 bp, Homo sapien
caaattctataaattcttgtatcttgggcaagaaacaccaaccagtgtgcagatgctggaggcaaggcagcttctatagcaaagcctctcatgttttggtaaaagccacacagcatgcatctccatgtcctttggagctggactagacttgtgaatccaaatgtcacctgtgagaggctcctactatttaaaaagaatcaatggaagaagcatcagactgtagctaaacatacctgtgaaaggatcgagccatccacacagcagactgaaatgcaaaagctttgggatttctcttccaggcatcttcttcgtctcctagctggagatcctgcagatgccgcttctttttctttgcagctttgggtccactatttttctttctttgtttcttctggtccttagtctccatagtggctatttaccaataacaagtaattctaatctacaaggaagaaggttggggtaaggaggtgggagaagcattttacaatccaggcaatacccagggcaaaaacattaaattttatttatttctttatgaagagatgatatatttgttcactgaacaagggtagaaactgcttaaccctccccaatttcatttatctctgttatgctataaattagatgagttacctctgctaagggtacattttatggttaagttactttttattcatcttaagtgtcaacatcagcagtatccatttctgcaaggatggaaacattctatatctgtacttttcagccatttagccattagccacatgtggttacttaaaatgtacttagagaaactgaaaaaatgaatttttaattaattttattccaactctaaatagtcacatgtggctaccatactggacagctcagacctagatatcaactggactaatgaagtggtttcctaacttaaactaaaacttaaattttaataaaaaatttaaaatgcttttatgaacttccaacatgatcacagtattacttttagtacctgttgactctgcaaaactcctaaattacaactcttctacatacatttgaaaaatagcaatatctagaggccgggcacggtggctcacgcctgtaatcccagcactttgggaggccgaggcgggtggatcacgaggtcaggagatcgagaccatcctggctaacacggtgaaaccccgtctctactaaaaatataaaaaaaaaattagctgggcgtagtggcgggcgcctgtagtcccagctactcgggaggctgaggcaggagactggcgtgaaccccggaggcggagcttgcagcgagccaagattgcgccactgcattccagcctgggcgacagagcgagactccgtctcaaaaaaaaaaaaaaaaaaaaaaaaaaaaaaaaaaaaaaaaagaaagaaaaatagcaatatctgtatgtgtgagacatgactagttctagatgatgcctggagaccccatggacttacagagacccttccagtgatttctgaggtacctgggaatctgtggccaataaattggtaatcactgaattagtgagttttttaaggatatccagctgcataaaatctgacagcttgattggaaaaaagcggggcagggtgccatttcattcaattaaggtcctgtattcattccgtttagtaaatgtttgtgtctgtctatgatgtgctagccactgtgccagtaaatggatatagctatgatctgacttgcagaggaaatccaaactagtatcttccgtgccatgcaataagggctacattgcaaggctgcacagggtgctactggggcacagaagtgagtcagaggcttcccacagacacacacacgagcggaaacagaaagtctttatatatcaccatatgtcaaggaacactggccgggagttaggagagctgggcactaggaacgctttgaaaccgaacagctgtgtgatttccgaggttatgttgcttctctactatattttagttccgaacttgtactaatgtttctctcccttttcttcttggtgggaaaagcacaatttggggtcaacagattcggctcaggtctaagtcgccggccgggaccacgtcgccaggaaacgacgtctccccgacaccttccctccccgtccgggctctctgcagcaattcatcccgtcactctcccaacgaccccgggcacacctccggcagatgcgaaatatgctgctcctcaggaggaaagatgacccggaggaccgcgggaggaccttcccactcgcgatcttcccagtgccccaaagccagggaccccactgccgcctaccccagcc

SEQ ID NO: 5348 - DNA, 2300 bp, Homo sapien
tggtggcagagtgggagataccgaccagacagtggacgatgacttggcagctggacagcttgcctttacagatgaactccatagacttgtccagccagggcagcagcttttcacagtagttgtcgttgatggggacccgcatgaagcggctctcgcagatgaagtcaggcttggggcaggagttgctggcattgaggacgtagcttattccattctgtgtcgtcagatccttgttcagaacgtctttctgcgagcccaggtagaggtgaggcaggatgagggtcaggctcacgctaggcacgggcaggcagggctgggagaggctcatgggtagcagggcagcaggcttgccctggcagaggctggggaagcaggaggagaaggtggcgaagccccccgtgaggatggccacgctgtcgaagcagctgtccagcttgctcagcaggatggagaggaagcggtctgcggccagcacactggcgtcccgtgtgctctggtcatagaccaccatatcctgtggctcagtggcctccatttggctgcgtgtggccagccagatgaactctgcaatggtcaccttgcccttctgcagccggcacttcaccagcttggagcagcagatgttgacggagctgagcacatgccagctgttgtactccaggaaggagcggctgtagatgaccaggcaccctaggcccgccccgcagcaggctggccagcttcttggcgtccatcatcttcctcgggagccggtctccggccatggtggggcaatgggtggtggggagggtgacccctgacgtgaggaggggttgctcggatggcccaagtgtggccttgcactgggagtgacctagcacatggtgccggacctcgttagcgctcgcctcggggggcgttccgggggacccgcgctgccctcgccagctcggctgcgccgaccatgggccctttggcgggggcccgcgcagccaaggcaggggcggggtctctaatatagagttaatcagtgctctttacaacttctaaaagataatagcttatttactatccttctactataatttggtcttatttatagaatatgttgaggaattgaaaacaaagatctagacttaaaattcaataagctcctataaaaaaaatccctcacataaaaaaaggctatatattaatttagactaattgaaaaatgatgcaggtcttaaagaggacaacttaaaaaaaatcagttctgataaggtatatttctatagcatcttaacagtaaccatgtgagtaaacatatttccccagagttctcattaggtagcaagaaaggcgatcacttaccaaccactgcacacttgtatgtcatcagggaagccaaagtttttacttcatctacactcacatcaatgctgtaatggatatttggtggtgttttttttaaaaatgtgttggggtaggtgagaaagaaggggatatatttagaacaaacttcagtaagtttcaaaaaagaaagctacaaattgaaaatatccactttttacattttacacccaagctatgtccaaaaacacttgaagcagctcatatgtcagaacaccataaaaaatgaatataaaacgtttaaaaaactgctaataacagtaactatgatttcacaagacaaaaatcactgtgcaatgaatttttttacactttccagaaggcttttttatgttccttttaccttttggtttgggtgactccggggtggccaggaccaaatgtgtctccttctggctttttgcaccacaccaagtaacccgcgccaggccgcacagctgccctggccttggggaggactaaggcaagggcggtgtacgctgctccggagtcccaccgcaggagttgaggcagcgagttccgagggcggggtggggcggaatcgggagggatacggacccggtggaacgcactgcgtagacggcgccggcgcccgcactcagctgttgacagtctttcttccagctctcccctgaaagtcgtccaggcgccggtctcttttttctgcctttttgtttccctccggagagtcggcgcgacggtgaatttccgtttccggtggtgtccaatccgacctgaggagtcacagttgtgagcaagttcggtgccgcgggctggggtaggcggcagtggggtccctggctttggggcactgggaagatcgcgagtgggaaggtcctcccgcggtcctccgggtcatctttcctcctgaggagcagcatatttcgcatctgccggaggtgtgcccggggtcgttgggagagtgacgg

SEQ ID NO: 5349 - DNA, 2300 bp, Homo sapien
ccctagctactcaactacccagctactcctactgaggtaggaggaccacttgagcccagcctgagcaacatagcaaaatcgtctctaaaacaaaacaggctgggcgcagtggctcacacctgtaatcccagcactttgggaggccaaggggggcggatcacaacgtcaggagatcaagaccatcctggccaatatagtgaaaccctgtctataccaaacatacaaagattagctggggtggtggcgcatgcctgtaatcccagctactcgggagtctgaggcataagaatcgcttgaaaccaggaggcggaagttgcagtgagccaagattgggccactgcactccggcctggagacagagcaagactgtcacaaaacaaaacagaggacaagaacaatctgcttgtttagtaaagcatgctcaatgcctaatatatagtttccagcacagcctaaagtgcaaatttttcagtgaataaaccactctgtgcctcagaataactgatatttactgtcaataatatgagaacaaacacttttgttcactgctctatttccagacccaagaacatggcttggcacacaatgtcagcgctcagtgggttcaccctgcctgctgccttgacaaagctgatttatcaagaccagggaattgcaatggagaaagagtaattcacgcagagccagctgtgtgggagaccagagttttattattacacaaattagtctccctgagcatttgaggatcagagttcttaaagataatttggcgagtaggagcttgggaagcggggagtgctgattggtcaggttgaagacggaatcacagggagtcaaagtgaggttttcttgctgttttctgttcctgggtggaatggcagaactgattgagccaggttactggtctaggtagtcagctgatccaatgagtgcagggtctgcaaaacatctcaagcactaatcttaggttttacaatagttatgttattcctaaaagcaatttggggaggttcagactcttggagcgagaggctgcatgtcccctaaactgtaatttgtaatcttgtagctaatttgttagtcctgtaaagacagactggtccccaggcaagaagggggtcttttcgggaaggggctattatcaattttgtttcaaaccataaactgaattcctccccaaagttagttccacctacacccaggaatgaataaggacagcttaaaggttagaagcaagatggagtcggttaagtctgatttcttccactatcataatttcctcagttgtaattttgcaaaggcagtttcaacagcagtgctcgaaaaattatgaaatcaacaaatagtactgaaaagttcaaatgaagtcatatatgaaaaagaaatcctagcactgttagctataattacttagccattaaatggggtactaataattactgcaggaactatcttttccaacagagcgcagagatcttttggctctgataaagctctgcacctaaacaaaggcgctgtataaaaatggttaataacaattgacctttactgagtgcttactatgatgccaagcggcctatgtggcctaatttcatcctctgggcattattatttccattttacaagctgtagagccagacctcagacccccacatgcaggttgacaacagttggtgccctttaccaccaccacacgttccgcaaatctcataaccagcaaacgccatgggtgagagcaacctagcggacggaaatcaacggggtcaggggtcaccaggaagtgactacaagactctagctcagaggtcactaatacgtcacaggcagagtgaaggggcattattaaagatagtttgacaaattctttttaatctcatttctgttggtgaggccataaagtgactggaacatctgaaaaaaaatgtcaggagggaaatacatacgactcagcagaggcgcacaggcggcggccatgatgggaagatgaaagaggcgcatgcgcggcatccgggtccccgaaatgcagacgtggcagaagaagtggcccggccctaaagcgtggaggaggaacttccgggggtgacgggacggccccctcggaaccggaagtggagcctgggagccttgacgttaggaacgaagtctaacctggatctggagccgggtgaggagtggcatcgggaggttggcgggtaggaaagcaaaggagaggtcagggtattactggccagattggggtccggtttcagaaagaagggaggagcctgggggcggggcctgggtagagaccctcacctcac

SEQ ID NO: 5350 - DNA, 2300 bp, Homo sapien
gatccagtgatccttctgtcacctgttttgggacctgatctgtcaccccagtacctgataccagcatgaagagagcgagccaggcagctgctccaccaggccttggtaggatactcatattcagccttgcttatcttacgatagggttctctgttactagaagccaaaggctcagtttatattctgcttatctctccgtctttctctgtgtgtttgtctatttctatctgggtcccattggggatagttgggcactggtctcttatgtgtagggtgacatttgcctggggcatcagtaactggcacagaatcccagggatacgggaggaggtgttacagatatttggttagggaaggagctggaatcaagattcttagagcaagagtgaagggcattagagatggggccagaaaggagaatcctagataatcttggctttctccctcatatgcccatggcagcccctagtctgatatggccggttttgcatttcctcttctctttcagtgagaaatgcagctctgggggtgggatgtaggaagagggaactatataatttttactcatagggacattttcctgtgatttgtctttactccctttcatcattgtgctccctactccctctgcagacagaatatctgcgccatgcgccttcttcctccggttgttcttcctcatctcctggctgaacctactgtggttttcctttatgtctgatcccttcccctttgcgccttaggcttcaccgtatgttgtggaccatggggaatctggccctttgcgctgcaaccgctgcaaagcatacatgtgtcccttcatgcagttcattgaaggagggaggcgtttccagtgctgtttttgcagctgtatcaatgatggtatgttcatggaagctgggatttgggggaaggtcttgattgtatcttccttgttctctattaaatagttagagagatgagggtccatctttcaggagctggggaagtagggcacatgggaatgagggatagtggtgtgagctcagctagggccagaatactaagattgaaactggatcttcgagtaacacactgccatgcttcccacagttcccccccagtattttcagcacctggatcataccggcaaacgtgtggatgcttatgaccgccctgagctatccctgggctcttatgaattcttggccactgtagattactgcaaggtgagggaaggtagcatgggaggagcagtgagtggaggataatgagacagctgagaatggctgttatcatttccctcaccccttttttgtccctttttgatgctgacttctctatagtcaactggcctgcttaccattccccctctccccaacattttcttcctctgcagaacaataagttccccagccctcctgcctttatcttcatgattgacgtctcctacaatgccatcaggactggtcttgttaggctcctctgtgaggagctcaagtcactgttagactttctacctaggtgagagttacagaactgaggtgtttcctgaggttaatgatagggtgtctgggttgactgaagaaatgtagcttggtgtcatgaagttgtgggtggtggaaaaggtggcaagtctaggtaacaatgtcaccttctacagggagggtggggcagaagagtcagcaatccgcgttggctttgtcacctacaataaggtgctccacttctataatgtgaagagctcattggcccagccacagatgatggttgtgtctgatgtggctgacatgtttgtgccactgctggatggcttcctggtcaacgtcaatgagtctcgggcagttatcaccaggtaagagccagattgtggaggtaaaggttgggggtggcatgggtaccaccatagaaggtcatggagttgaacagaggtattggacagtagatggaaaggggttgtggcccaggagttgtcagattctagaggcttgatgactcttcagggaatcgagaactgaggtatctggaatctgtatagcaattttggttgttttccgtcacctatctctttagcttattggatcagattccagaaatgtttgcagacacaagggaaacagagacagtatttgtaccagttatccaggctggaatggaggctctgaaggtaaggctggagtatcgggcaacctcctctaactccattttcctctgaccatcttatcccctgggatacaacctctctttcttcagtagtgggtgactgtccagtgtgttagactgtctgacatagctggtgcttaataaatgacaagggaaga

SEQ ID NO: 5351 - DNA, 2300 bp, Homo sapien
acttagctttcaaaattttgtgtgtggtgcgggggggcagacttgtcttatggtccttggtaaccttttgctcccttccttttgtctagacaaagtctcccgttgagagtactaccgaaccaccagcagttcgagcctctgaagagcgtctaagcaatggggatatatatttactggagaatgggctcaacctcttcctctgggtgggagcaagcgtccaacagggtgttgtccagagccttttcagcgtctcctccttcagtcagatcaccagtggtttggtgagggcagggagtcaaggagaatatgggtgtggaagtatactttgtgaaacaattgggagccaatatagttagtgtgctagtaccctcaaatatcagggaacacttggggacaagggcagttgctgtcattcttcccaggtttgcctgtttcagatgatgcatacatgtatgctgccccaccttgactgaactcagagtgccttaccataaggataaatgaattttgtgttctagagtgttctgccagttctggataatccactgtccaagaaggttcgaggcctcattgatagcttacgggcacagagatcccggtacatgaaggtaacactgatctgaaccctggatttcttaccttgtcaagtcctcacctagaagtgggggttgggtggggaatgagtaagtgactgcctaatgagatttctgggcatgtttaatttcctttggccttgccttatgaaccctgaattctggccgtagcttaccgtggtgaaacaggaagacaagatggagatgctgttcaagcacttcctggtggaagacaagagtctgagtgggggagcatcttatgtggactttctctgtcatatgcacaaggagattcggcagctactgagctaaagcaagtgggtaaatggcatagggcccaggctagcttccagaaagcaccccaggatgtcagagaaattgggacagtaacatatcttatgtaagctgacctcagtctctctggggggagggggagatataaggagacaccttctttctgggctcaagtatcctgccactctgtcatgtcctgctgatggaaggtgcccctgttccctcattctaccctctttttcctgctaatcctgtcataatgaatgtagcttctcagttcactgtatatgattcggtattgggggtttggaggcacccagaccctggcaatattatgtgtccctttggaccagtctcccaagaggagaggggcaggcaggaaagagtggggatcctaaggttactacagggggctcagtgtcatccacaacttcctatattagggataaaacatataggtgcacaagagctggggtatagcccataggtggtggagagaaaagtggtcagtccttcttgggcctggaggttagcagtcaagtttctctgctttcactgctcgctcgctctctcctgcaatgattgatgatcactccgtggatagagaggcacactgtcagaggtgaccggagaactgagttgcaaaatatattaagatctggtagaggtaccagcttcctttccagctggagaggccccaacactggatggttctgtagggagcctagggagcctggtcatcaacttgcaatacctcacagagccagttcacatcccactctgagctcccacgagaaacactgcttctccaggcccggggttgttggggagagaggcagaggcagctggagcgccgttctctcctgctgggacaccgcttgggctttggtattgactgagtggctgacagttatcttccaaccccaactggcttgggggcaggacaagggctaggcttgatggtggccaggcttgcctgctccccacctgggatgcccctgctctggacctctcatttctcttcattggtttatttttcaatgcatctttaatttgtaaagaaataaaataaattaagatgtaaccattagcctcatctttactcccgaaagctcactttgcttttagtcctggccgtcggctgagcgagctgcgcatgcgccacgtgcccccgtggcgtagggcctcgtccggtcacgactatccgctgggcggggtcggtgctggccgagggggcgccggctgccggagtggacatggcggccggccccattagggtggtgttggtccttctaggggtgctcagtgtctgtgcagccagcggccatgggtccgtagcggagagggaggccggcggggaggcggagtgggcggaaccgtgggatggcgcggttttccggccgccctcggcgc

SEQ ID NO: 5352 - DNA, 2300 bp, Homo sapien
attttttcatacttttcctctagtaaatcatattatgttcagatacaaacaatttgtaattagatacaaattacttggtgaaggattccaaccatcaggacaaaactgccagcagcatctgttaataaatggccttctgctgccatccactgtccaagtcggtttctataggccattctagcagccttacttcagcttaataatcttatcacctctcccccaataggtgtggcttgctacaagtggtttcaacattttcccaccccacaccacacgctggccttgtttcccagtaccaccaccttttgccacctactacagtagcctattcgcttcccttctgatgcgcattgtgcattgttttgtgtgtgtgtgtgtgtgtgacagggtcttactccaacccaggctggaatgcagtggcacgatcctagctcactacagcattgaactcctaggttcaagcaatccacctgccacagcctcccaagtagccaggactacaggtatgtgccaccaccccaggcttttagtttttaaattgtacagagaggctcttattatattgtccaggctggtcaatatattatattatatattatattgtctctggcctcaagtgttcctccccccttgacctcccaaagtgctgggattacaggtgtgagccaccgtgcccggccatgcctagtttttctagttacacaggcagtgtgtccccacctgcaccaactacatggggctcatcctcagcacagccgcttaaaaaaaaaaattatggctggttaacaggtgtaacccctgactactgcagaaaagcctctctaaaagtgctcttctctactgcccaaccccatttccactctataaaaggtgctcaaatagctgagttgatttttagtgcagtgcaaactcctgaacctggtattaatgatatttatagccttgtccctatttatttgccccattttctctctcccctgtctgcacaggccctgtactctggttcaatctttttgaaccactactggaaacattgttcacataagctgattttcatacgttgccttgaattatattttacatctattcagctttttcagcttgtcttatccccccaactagactgttgacaccttaaatacagaatgagcccatgtgataatttcctcctgcacctgctcagcacctagtgctacttaattgcccacagtaagcaagtaagtaaatgatttgatagctgcaggggaccccagcactcttacctgtcattctcaggaatctcttccacattgccaaagccaggtgtgggcactgggcagtccatgtgtgagggctgggcaatgtggggctcaaagacggggctgtccccgggagaggccgcgtgggctttctcggcatccagccgagccagttcgtagtcacagacgaaacactcgaagccgttgaggtagttaggcagcaaaggatcattcactccccactcccgatgcttcagactatccagaagaaattggttggtgatgcccccaggttgcttgtatgccaggtatttcatatactcctcatcattcttgtccagaaagtcaataaactctgccagcttctgaggagactcaaaatcatcaatcaggatgacggagtgattgttcggcatccagtccctcacagagggagaaccgcggtacacgggcacagcgcccaggtgcatgggacgccacagtttttctgtcatgtagtcgttacagatggcattttccagggccaagtggaacttatagcgggacaagaaagccaagagctctggatcctcggtggtggccgtggctgtgtcctgtagccgcgcggtaggcagctcccgattctgcaggcatttcccgtaggagtctacctagaccgggtacagtaaggctgtcatgagggtgcggccctggaggcctggacacctggagtcctggacacctggagtcctggacacctggagtcctggcctcaacccgccctctccttttccttccctccggcccgccctcactcaccgggatgtggcgcatgagctcgcgcacgtagcggtcccggtccgctggcacgtcgcagtgtgactgcagatagagcagcggcgcgtagccgcggcggcgccactccgcgcgttccatgggcggaggcaccgggcggcgcagataggcggtcccgggcagccactgcagcgacagcgggtaatccgagtggcgactgaaggtggaggtaagattgaagaggcggatgcccgggccgtggctcagcaagaagttgttgaggggcga

SEQ ID NO: 5353 - DNA, 2300 bp, Homo sapien
agccacacctattgggggagaggtgataagattattaagctgaagtaaggctgctagaatggcctatagaaaccgacttggacagtggatggcagcagaaggccatttattaacagatgctgctggcagttttgtcctgatggttggaatccttcaccaagtaatttgtatctaattacaaattgtttgtatctgaacataatatgatttactagaggaaaagtatgaaaaaatatgaaacattaagaaaataaatattcaggttatgtcttttctagatactggatgctacttcattttgatgcaccttcattttgattattggcataaaggtgaaacttaaaagataatcatctaaagacccctgcccccttgctttccttatggagactgccacttccagtctggcctctgctttgcctgcctctgaaccccctccacatttgggagccagaagcaggcaagtcaggaatcgtaattgattgggtagtctgtgtgatgtctttgtgtttgtgacttactgcctgtcgcttgggcttatattggatttacttcactttgtcttcctttcacagcagtcttgtccaagttagagaccactgtatctgcttaagatttctttggccccactcggaaaaaggcaggactcataactatgctgcagttccataatccaacccccattttgatatttcagttggaaagagatgtggctgcaagattattggcaaggtctggaccagggggaagctctcactgccatgatccacaacaatgaaacagagcagacgaaattttgggattacctacatgaaatcttcatgaagaggcaacatctctaagtgcccttgcaagagcctttaacttggcggagctaaggagatcttattctaccatgggacataaggagcatccactgcacaaacccttaatgaacactgtcttttcatggattcaaggaattccagttttatctattaagattttatcttaatgatgagtagccaaggtctaacatagggcctctcctcaaggagagatggagggatacaattcttggttcagtgggaaacagaaccctaaaacatccatttgattcaaggtgctggtccaacagagtttttaaactactcacttctttatttcatcctttcgactgtacttgattaccagtgaagtaagatgggtcaggttacgacttacaacttttgttctattccccagactcctcattattcagtacatttcccaataatctctttttctcatctcttgctttataaattgttacgttggtggagaagcaaaacatttggtgagttgtattctggttttccggagttggatttttttatattatatactttcatgtcaaacttctattttacttatttatttatttttttaaaatattttttgtagagatgaggttttgccacattgcccaggttggtctccaactcctggatcaagcaatccatccgccttgacctcccagagtgctgggtttacaggcatcagccacctcacccagccctaattttttttttttttttggctttttctggccaggcgtagtggcttatgcctgtaatcccaacactttgggaggccgaggagaggcgactgcttgaagccaggagtttgagaccatcctagcaagaccttgtctctaaaaaataaaagaattagcagggcatggtggtgcacacctgtagccctagatacttgggaggttgaggcaggaggatcacttgagtccaggaatttaaggctgcaatgagctatgatcatgatcactgcactccagcctgggtgacagagcgagacaccgtctcaaattatatatatatattaagatggagtcttgctttgtcaccagctggagtgcagtggcatgatctcgggtcactgcaacctccacctccctggttcaagcgattctcctgcctcagcctcctgagtagctgggactacaggcatgcaccaccacgcccagctaattttttgtatttctagtagagacagggtttcgccatgttggcaaggatagtctcgatttcttgacttcgtgatccgcccgccttggcctcccaaagtgctgggattacaggtgtcagccaccgcacccggcctcaaatacatttttttaatggccttgtctttcctggttttaggcccttttccacaatttctgatggaaatacagaaaccttgccatcattcttactgctggtttgcatctcatttatggtgtatctgggatttcttctcatgaacagaaagattcagtggctgtt

SEQ ID NO: 5354 - DNA, 2300 bp, Homo sapien
agcagtgtaaaccaggtattacatttccacaagggaaagtagaaccaggaatagccacatgatacttaccgaaagcttcactttccctatagagaaagcaagcaacatgaatcttctgatttggggcccagcctgctgctgtatacagaggttggcattattggtgatagaaatgtctgataggagtcttttaattatactctggagtgtggaggtggagtgcaaggctgcttcctttattactgcaagtgttattttctattatctcaggtttcgttttgtgtaataaactgcttcttgttaaacaatgtcttctgcttcattatttttttgggggtgggtgtaataaagttggagatttgtaaaaaagtttcaggttgggtgtggtggctcatgcctgtaatccctgcactttgggaggccaaggagggaagctcacgtgagcccaggagttcaagagtagtctgcgcaacatactgagaccccatctctacaaaaaataaaaccaagccagccgggtttggtggtgtgagcctgtggtcgcagctactccagcagctgaggcaggaggatcactggagtgaggccaaggctgcagtgagctaatattccactgcactccaacctgggtgacagaacaagaccccaaatccaaaaataaataaataaataaaacatttgctcatttaacaagtatttattggtactattctaggcactggggattcagcaatgaacaagatagacaacgttccttctttcatgcttacatttttaaatgggtgttagggataggtaaggccataataagacaattcagactgtgataggtgctatggagaaaacaggttgatggtggtgaggtgtgagaggtcagggaagccctctgtgacatgaactgagacttaagggaagaaaaataagcagccatgcagaaatcagtgggaagattccaaacatctgtgataagtgatttttttaacacactaaatttacaaatccaaatgttcttcctccaaagtagtcatgagctacaggcttgttttctgcttccattaccaaaaacatttcttggagcttatttggaaatgctttgagaatatgctgcacatctttggaatgagttgtgaaaatggccagaagaagtcacttgagaaacaagtctggctgggcgcggaggctcagtcatgtaaagcactttgggagggcgaggcaggaagatcgcttgaacccaggagttcgagaccagcccgggcaacatgacaaaaccccgtctctacaaaaaataattagctgggcgtggtgtcttgcacctgtgttctcagctactcaggaggcagaggcgggaggatcgtttgagttcaggagtttaaagctgcagtgagctatgaacgtgccacttgcactccagtctgggcaaccaagagagaccctatctcaaaaaaaattctgattaagcatcacaactgaaggtccaagtctgtaagactggcgagaggactgaaaaagacgatgaatgccaagtgtttaagcttcatcctaccaactgagattgttataaatgagcaaacggtatctaactagtagcagtagtagcagttgttgttgttataaaatgaaacaagtctaatttttctttgcggctttgtagtggtcctataggcagtgaaaaacgacagttctttcaggtttattaaagtaaaacacgaatctttcccaacccaacatcttaaagtctcaaattttgattcgccacccccccccccaaccccgccctatgccaatcgcccctagaccaagccggctaccaccagaacagtgtccacttaccagggccctttcctgcatgtccccggccccgtactgcccccagacttcggggcccggagcccatcaaggagaagcctcagtcggcgtacgaacccagagtctcctcctaatctgctgacaagtatgaacccgccgctgttcgaacccagcgtcgccgcagccccggccaagtaaaagaaagaggtggctgccagcaagccaacgagccttccccgagctccgcgccgattcgtccagcccgtaggggtcacgcgaggtcacgcacggaaccgcaaagcctgccgggagcttggtgcgctatggcgacacccagcctgcggggtcgtctggcgcggtttgggaacccgcggaagcctgtgctgaagcccaataaacctctcattctagctaaccgcgtcggggagcggcgccgggagaagggcggtgagcagtcggagtcaggacggccccggagcggaagccggagcatg

SEQ ID NO: 5355 - DNA, 2300 bp, Homo sapien
cgttgtattgtctttccctgcatttgaagtcttttacaccatttagtgcccttgcttttggatgcaataaggaagttgaagttgccttcgtctgtaaatacttagtgattgcctattttgtgcgtagtccctgcaaggtgctctctgaataataaagttaacaaactggtgacctagaggttctgcagatatgttttatttgatccacgcagttaaaaaaagttttaaaattagctggtcacgttcaaaaataggaaaaaaagtcattaaaatttcacattttagctgtatttatttatttgtttaagacgcagtctcgctctgttgcccaggctggagtgcaatggcactatctcagctcactgcaacctccgcctccaaggttcaagtgattctcctgcctcagctttctgagtagctgggattacaggcacccaccatcatgacgggctaatttttctattttcagtagagacggggtttcaccatgttggccaggctggtctcgaactcctgacctcaagtggaccacccgccttggcctcccaaagtgctgggattacaggcatgagccactgtgcccagccacttattttttttaataaaaaaaattaaaagctctggcagccttattttcttatttccacctggcagtaattaggtagagctgattatcatttgtctgcattctccagtgacctcaccactggactctacaaaatggtgaaacagaattaacaaatgtctactttgtttattacctgtttccttctctcaagttagctgcctagttgctgaaggcattcgcttttgtgattcccctgatactaggaaaaattgcatagcattttatgtatactctgccctttcaggcataattcagttagctttttttttttttttgagatggagtctcgctctgtcgcccgcgctagtgcagtggcacgatcttggctcactgcaagctccgtttcccgggttcacgccattctcctgcctcagcctcccgagtagctgggactacaggcgcccaccaccacgcctggctaattctttgcattttcagtagagacggggtttcaccgtgttagccaggatggtctcgatctcctgacctcgtgatttgcccgcctcagcctcccaaagtgctaggattacaggcgtaagccaccgcgcctggccttaggagttcttaacctaggtcaatagactccagttaagacgtctgtgaacttgggggataatttatatttttaactccaactgaaatttagcatttcagtcagggctatggaaaacaaaccacagtaacattatcaaaacctatatgaaatcatggtattttcataccatgttacagttggttacaaatatctcaaaaagcatttatactcatcactagcttcaaaattatgatagttactacgcttcctcctagatcttgtcatttaatgtgtaaataaaggagcactattacgttacagatttgttctattaatagtttaataattgtatttaaacaactggtttcctttgtaattcttggtattttgtgcatttgtaaacgatctgagaagggggtccagaaacctacctagactgctaaagggtccatggcacaaaaaaaggttgagttactagatccaaaggccgtatggacaaacagtacaaccatttcctgaaatcaaatgcattcttttctgatgtttccccagttagaccctataaaaaggtcggctggattgcagacttctggactacgattcccagaaggtggtgcggccctggggcctatccagagttaagacaataactccatccaatagttgctgtcctctcctgacagcctacaattcccaacatgcatggcggctgtttatgccttggggacattatggactccgagttgttgctgggatctgtagttgcttcgtataacgttgggagttggcttcctcttatgatgtctgagggtgggctcgagggaaaaaaagcaaatgcagccattaaataaaaatgtcccctacatccgcccgtacccgatccggatcccgagcgcgcgagggcggaagtggtggtggcccgcgcggccggaagtccagatcagctgatgggggaggcggctccgcagccgcctagaggccccagccgccgagcgcttcgtcccggccctaagtctcggagactggccaagatcaccgcttgcaccgcgctgttgggcgaggcccggtcccgtctctttcccaggcctgagattctcgcccggcacggccgccctgagcgccccggccacccccagc

SEQ ID NO: 5356 - DNA, 2300 bp, Homo sapien
ctctctccccttgagggtttccagtgtgggaagttgtcatttaggcgcgccaaaagtggtctggcctctcgtgcttcttgagatcccttccgggctctggtctatcttgtctccttagctgggggcctacagtcatctagagtaaaagggatggttaaaaaaaaaaaaaaaaggcaatcggagacaagaatgccagaggagagacattaaccatgtaatttgaatttaaaatgctcatggaatatgggaaattcagtgctgagccatgtgagcagggttacttgctagggtcctggaacgcacctgtctggccaggagtttcttaagatatctctggtatcttctgttctagaccttaggtgtagccggctgtgggctggggattatccagctcccctttcccatatggagccttaagggttagtgtatcctgatagggggatccctaggactttcatccaggtctcttctttctttcatagtgaagatgaggcccaggatgttgtactggcatgagtgccaagagaccatggcccttttcatttcctattctctttcccctgatcccaaccattgtttgcaaagatggactggtgatcccattggtggagctgtcagcaaagcaggtggcatttcatatcccatttgaagtggtggagaaagtttacccaccagtgcctgagcagctacagctccgaattgctttttggagcttccctgagaatgaagaggacattcggtgaggccaaaggactgatggtggggagcggggtcctgatactccacactgtctgctgggtttcccatagaacaaaggagacattgtatttggggcagtggtaagaggaagacaagggagggattgcctgggattccactccctcccccccaccccccgccctggggaaggaatgaggctagggagagagtgcctagggcattgtggtctctgacagggtctgccaaaggttatttgctgagttgtggctgtgtcctcttcttcacccccaggctgtattcgtgcctggccaatggcagtgcggatgagtttcagcgaggggatcagctcttccgcatgcgggctgtgaaggacccattgcagataggtgagtgggccatcatgccatgtggcacatcctgctcctcccatcccctggcttatgaagtaagaacacaccgcaagaagctggagcatgttgtctgaataactgcagggccagggtcaagggcagagacccaggtcctgacagcactccctgaccatgcccccatttctccccagggttccacctgagtgctacagtggtgccacctcagatggtccctcctaaaggggcctacaacgtggctgtgatgtttgaccgctgccgggtcacttcctgcagctgtacctgtggggctggggccaaatggtgcacccacgtcgtggcactctgtctcttccgcatccacaacgtgaggccctcccaatttatcccggccctatcctacactccatcccccccttctctgctgcatgcctggctacaatgtgagccccctcgcctcgcctactctgcctctctgtcccccagctccagctccagcaaacctgttctcagattgttccatttttctctgtgtccccttcaggcttctgcagtctgcctgcgagccccagtctcagagtccctgtcccggctacagagggaccagctgcaaaagtttgctcagtacctcatcagtgagctccctcagcaggtgggtgaggtcggcaccccctcctgcaattagctccgggccaggccgcataacagccttcctgttaggcccaggcctccatgggttcacctaggccgtgttctgcctgcctccgtctctttctccctcagatcctccccacagctcagcgtctcctggacgaactcctgtcttcccagtcaacagccatcaatacagtgtgtggagctccgggtgagtgtggtgagaaagattggcagtaggaagaaagccagcttgtagtacagagcgccatttactcaaggcttgctgttgtcaggcaaatccaggcccctatctctagatgactgactgcctgtcatcctcagaccccacagcagggccctcagcatcggaccagagtacttggtatctggatgaatcgacactcactgacaacatcaaaaagacactgcacaagttctgtggcccctcccctgtggtcttcaggtaaatcggatctctgcatacctgtgtctgtggtggagggggagcgtccctcaggctgatgacagatcctttcttctattcatgcctgtgac

SEQ ID NO: 5357 - DNA, 2300 bp, Homo sapien
ctgagatcaggagttcgagaccagcctggccaacatggcgaatctccatctctactaaaaaaacaaaaattagccaggcgtggtggcgggcgcctgtaatctcagctacttgggaggctgaggcaggagaattgcttgaacccgggaggtggaggttgcagtgaggtgagatcgcgccattgcactcaagcctgggcgacagagcaagacttggtctcaaaaaaaaaaattttgttacagatgtctttttccctctatcttctgtattttggggccggaagcccttttaggtttcattcagccccgtcttactgtcatggttttctgttcctctgcttttacagtgatgtgaactccatgtatctgtcttccacggagccgccagccgctgctgaatgggcatgtctgctgcgccctctgaggggccgtgagccagagggcgtctggaacctgctaagcattgtgcgggagatgttcaagcggagggacagcaatgctgcccccttgttggaaatcctcactgaccagtgcctcacctatgaacaggtaatcactcagcgttggggagccccgtggtagctcattctttccctccccctgcctcatcctcctcttgctgaaatggactctgggagggctactctgcctttctctgagctctcaggtgcagctcacagccttctttgtctccagataacaggttggtggtatagcgtacgtacctcagcctcacacagcagtgccagtgggcacacgggccgtagcaacgggcagtcagaggtggcagcccatgcctgtgccagcatgtgtgacgagatggtcacactgtggaggctggccgtgctggaccctgcactcagcccccagcggtgagtctcccctgaggctcaccacagaactgagcctgggccagctcaggacagactgagccttcatctccttgtttgcagagacataccatgattttagtcctcgggaaacgggaggtgctgagcactggtgttagcagtgatttacgagtcctttttctgagaggctttcatccttccttcccctaaataacacccacttttcaaaattctccagtgtttcagtgatgcttatggggctgggtcaagaagtactttcctgtatcctttccccatgcctctctttggggtgtacacctactccatgcccatcctttcccagtagcccctcagcagcctcctgccccttgttcccacaggcgccgggaactgtgtacgcagctgcggcagtggcaactgaaggtgattgagaacgtcaagcggggccaacacaagaagacgctggagcggctcttccccggcttccggccagcggtggaggcctgctacttcaactgggaagaggcctacccacttcctggtgtcacctacagcggcactgacaggaagctggcactgtgctgggcccgggccctgccctctcggccaggtgcctcccgctctgggggcctggaggaatcccgggaccggccccgaccccttcctactgagccagctgtgcggcccaaggagcctgggaccaagcgaaagggcttgggtgagggggtcccctcatcacagcggggtccccgccgcctctcagctgaagggggagataaagctctacataagatgggtccaggtgggggcaaagccaaggcactgggtggggctggcagtgggagcaagggctcagcaggtggcggaagcaagcgacggctgagcagcgaagacagctccctggagccagacctggccgagatgagcctggatgacagcagcctggccctgggcgcagaggccagcaccttcgggggattccctgagagccctccaccctgtcctctccacggtggctcccgaggcccttccactttccttcctgagcccccagatacttatgaagaagatggtggtgtgtacttctcggaagggcctgagcctcccacagcctctgttggcccccctggcctactgcctggggatgtctgtacccaggacgacctcccttctacagatgagagtggcaatgggcttcccaaaaccaaagaggcagcccctgcagttggagaggaggatgatgactaccaggcgtactatctgaatgcccaggatggggctgggggcgaggaagagaaggccgagggcggggctggggaggagcacgacctgtttgctgggctgaagccactggaacaggagagtcgcatggaggtgaggggatggaaggagggagggctgggtgctccttagccacaactgggaggggctatctagctctagttgggagtg

SEQ ID NO: 5358 - DNA, 2300 bp, Homo sapien
tggcagtcgtggaggctataatggacggggatgggggtccccaggacggcctaagaagaagcacacaggtaggatagcctgtgggctagcatagagggaaggataatcctgaaggttggagtcttaacatctgggactcctgacttctgagactgacttctcttgggggttaggcatggccagcattgacagcagtgcccctgaaacaacatcggatagttcccccaccttaagccggagaccacttcgagggggctgggcccccacctcctggggtcgaggtcaggacagtgacagcattagcagctcttcttcggactccctgggctcctcatcctccagtggaagtcgccgggccagtgccagtggaggagcccgggcgaagactgttgaagttggcaggtcagtgggaagaactccccatcttccctgatctggcccaccctcagagccacacccctagtgcaatccaaccattgtctcccagcatcctcactttccctggtccttcccaacctacccggatgcccatttcaaagaaaccccaacccccgtccctaccccattgccccttcaggtacaagggccgccgccccgagagtcatgcccctcatgtacccaatcagccatcagaggcagctgcacacttctacttcgagctggcgaagacagtgctgatcaaggcagggggcaacagcagcacttccattttcacacatccatcttcctcagggggccaccagggtcctcaccgcaacctgcacctttgcgccttcgagattgggctttatgcccttggcctgcacaactttgtttctcccaactggctctcacgtacttattcttcccacgtttcctggattacaggtaaatcatttgacctgacttgggtatgggagggggattaattggtggggataagacccttatctttgtggggttactgatctgataaaaagacattattctcacaccccagtggtgcccacactaacccaactctgcccttctctcctttcccctaaggccaggccatggagataggcagcgcagccctgactatactggtagaatgctgggatgggcacctgacaccccctgaggttgcatccctggctgacagggcatcacgggcaagagactccaatatggtgagggcggcagcagagctggccctgagctgcctgcctcacgcccatgcattgaaccctaatgagatccagcgggccctggtgcagtgcaaggaacaggtatttctacgggcaatctgggaacctcttctggggcatctgggcagggaggttgggcatgggaaagctaagggcccagctcttgattcccgtatcctggagtttacagatgattgttggtcctctcatggcaacattttacccattaatgtgctttcacacccatctttcctttaccttacaactcaaaggttaggtttatttctattttacagataaggaaatggaggcctacggtttagggaccaagatgatcactcaggatagaaaacttagggaaggcctcatacatctaagacttgaatgggagggggctgttaaattagtttggaactgggactataacctgggtcttgactcattttggtcagtatttactcagtgtgtgaagcactcactgctctgataatggactctaagcattgacactgacctctgatgattccctgggaatgagacagctctgagggagacattggaatctcatctaacaccttccatgtggtaaaggcctttcccccttaacactctgtgcccctctcttccaggacaacctgatgttggagaaggcctgcatggcagtggaagaggcagctaagggtgggggcgtgtaccctgaagtgttgtttgaggttgctcaccagtggttctggctgtatgagcaaactgcaggtggctcatccacagcccgtgaaggggctacaagctgtagtgccagtgggatcagggcaggtggggaagctgggcggggtatgcctgagggtagagggggcccagggactgagccggttacagtggcagcggcagcagtgacagcagcagccacagtggtgcccgtcatatcggtggggtctagtttatacccgggtccaggactggggcatggccactcccctggcctgcacccctacactgctctacagccccacctgccctgtagccctcagtatctcactcacccagctcaccctgcccaccccatgcctcacatgccccggcctgccgtcttccctgtgcccagctctgcatacccacaggtgagaccagtgt

SEQ ID NO: 5359 - DNA, 2300 bp, Homo sapien
tcagggggccaccagggtcctcaccgcaacctgcacctttgcgccttcgagattgggctttatgcccttggcctgcacaactttgtttctcccaactggctctcacgtacttattcttcccacgtttcctggattacaggtaaatcatttgacctgacttgggtatgggagggggattaattggtggggataagacccttatctttgtggggttactgatctgataaaaagacattattctcacaccccagtggtgcccacactaacccaactctgcccttctctcctttcccctaaggccaggccatggagataggcagcgcagccctgactatactggtagaatgctgggatgggcacctgacaccccctgaggttgcatccctggctgacagggcatcacgggcaagagactccaatatggtgagggcggcagcagagctggccctgagctgcctgcctcacgcccatgcattgaaccctaatgagatccagcgggccctggtgcagtgcaaggaacaggtatttctacgggcaatctgggaacctcttctggggcatctgggcagggaggttgggcatgggaaagctaagggcccagctcttgattcccgtatcctggagtttacagatgattgttggtcctctcatggcaacattttacccattaatgtgctttcacacccatctttcctttaccttacaactcaaaggttaggtttatttctattttacagataaggaaatggaggcctacggtttagggaccaagatgatcactcaggatagaaaacttagggaaggcctcatacatctaagacttgaatgggagggggctgttaaattagtttggaactgggactataacctgggtcttgactcattttggtcagtatttactcagtgtgtgaagcactcactgctctgataatggactctaagcattgacactgacctctgatgattccctgggaatgagacagctctgagggagacattggaatctcatctaacaccttccatgtggtaaaggcctttcccccttaacactctgtgcccctctcttccaggacaacctgatgttggagaaggcctgcatggcagtggaagaggcagctaagggtgggggcgtgtaccctgaagtgttgtttgaggttgctcaccagtggttctggctgtatgagcaaactgcaggtggctcatccacagcccgtgaaggggctacaagctgtagtgccagtgggatcagggcaggtggggaagctgggcggggtatgcctgagggtagagggggcccagggactgagccggttacagtggcagcggcagcagtgacagcagcagccacagtggtgcccgtcatatcggtggggtctagtttatacccgggtccaggactggggcatggccactcccctggcctgcacccctacactgctctacagccccacctgccctgtagccctcagtatctcactcacccagctcaccctgcccaccccatgcctcacatgccccggcctgccgtcttccctgtgcccagctctgcatacccacaggtgagaccagtgttctgctggggggtaaggcatgggaaaatactgggaattcatagggggttggagtgggtactctgggagtataattggtcagtcggagagtcctggtgaggtggtgggagtctgggggacccagcccaactaaaataagaaatgacggccgggcatggtggctcatgcctgtaatcccagcactttgagaggccgatgtgggtggatcacttgaggtcaggagttcgagaccagcctggccaacatggggaaaccccgtctctactaaaaattagctgagtgcacgcctgtaatcccagcttcttgggaggctgagatgggaatcacttgaacctgggaggcagaggttgcagtgagccgatatcgtgccactgcactccagcctggaggacagagcgagactctatctcaaaaaaaacatgtcaggatagcagcttgtgggggtgaagcacgacagcaacatcctaatcaagtttggcatcttcccctttcttctccctgcccctagggtgtgcatcctgcattcctaggggctcagtacccttattcagtgactcctccctcacttgctgccactgctgtgtctttccccgttccttccatggcacccatcacagtacatccctaccacacagagccagggcttccactgcccaccagtgtggcctgtgagttgtggggccagggaacaggtgaatggaggggaggcacactgggcaggggaggtgg

SEQ ID NO: 5360 - DNA, 2300 bp, Homo sapien
gagcccggacgttgctgtactgtcttgtttagtgtagaagggaagagaattggtgctgcagaagtgtacccgccatgaagccgatgagaaacctcgtgttagtctgacatgcactcactcatccatttctataggatgcacaatgcatgtgggccctaatattgaggccttatccctgcagctaggagggggaggggttgttgctgctttgcttcgtgttttcttctaacctggcaaggagagagccaggccctggtcagggctcccgtgccgcctttggcggttctgtttctgtgctgatctggaccatctttgtcttgccttttcacggtagtggtccccatgctgaccctcatctgggcctgggccctctgccaagtgcccctgtgggatgggaggagtgaggcagtgggagaagaggtggtggtcgtttctatgcattcaggctgcctttggggctgcctcccttcttattcttccttgctgcacgtccatctcttttcctgtctttgagattgacctgactgctctggcaagaagaagaggtgtccttacagaggcctctttactgaccaactgaagtatagacttactgctggacaatctgcatgggcatcacccctccccgcatgtaacccaaaagaggtgtccagagccaaggcttctaccttcattgtccctctctgtgctcaaggagttccattccaggaggaagagatctataccctaagcagatagcaaagaagataatggaggagcaattggtcatggccttggtttccctcaaaacaacgctgcagatttatctgcacaaacatctccacttttgggggaaaggtgggtagattccagttccctggactaccttcaggaggcacgagagctgggagaagaggcaaagctacaggtttacttgggagccagctgagaagagagcagactcacaggtgctggtgcttggatttagccaggctcctccgagcacctcatgcatgtcccagcccctgggccctagccctttcctgccctgcagtctgcagtgccagcacgcaaatcccttcaccacagggtttcgttttgctggcttgaagacaaatggtcttagaattcattgagacccatagcttcatatggctgctccagccccacttcttagcattcttactcctcttctggggctaatgtcagcatctatagacaatagactattaaaaaatcaccttttaaacaagaaacggaaggcatttgatgcagaatttttgcatgacaacatagaaataatttaaaaatagtgtttgttctgaatgttggtagacccttcatagctttgttacaatgaaaccttgaactgaaaatatttaataaaataacctttaaacagtccattgtgttactgctgttggaggtttacggccagaggcgtagattttagcagcctggcttaccaggttggagagagtacctcctcctactccctttgggtacttttgagaataaaacttcctcatgcctgtaatcccagtactttgggaggccgacgcgggcgaatcacgaggtcaggagttcgagaccagcctggctaatatggtgaaaccccgtctctactaaaaaatacaaaaaatttagctgggcatagtggcgggcgcctgtaatcccagctgctcggaaggctgaggcaggagaatcgcttgaacctgggagggggaggttgcagtgagccgaggtcgcgccactgcactccagcccaggcgacagagtgagactccgtctcaaaaaaaaaaaaaaaaaaaaaaaaaaaaaaaaaaaacttctcataaacagcctccaaacagcgctcggtgctgcgcaggcgacgcggggcggggagggagggtgagtgccctgggagccggctgagggcctcgccccgcccctggtcccgcctccggttaggccgctccgcctcttactcctcccctcccccgagtgggccggcccggctccccctccgcggggctgagtggatgagcccaggcctgagcccgcccctgctccgaagtcgtggtccccgacgctcggccggcagtgccatcgcgcggagaggagggggtgcgcttccgcgggcggggcgcggagcccgccgtctcggaggccgcggctcggcccggcactgcggagggccgcttgatttcccggaacccaggtcgcgcggctgctagggccggagccggtggatccgagcgggtgccaccagcggcggcgcgccgcctcccccggtgggagcggtggttgggccaggctgcggcagagcgttcgctcgg

SEQ ID NO: 5361 - DNA, 2300 bp, Homo sapien
cttttgttctgctttgctcctctggcttccaagggatggagcatatagaaacatgttctttttggcctacagggctccacagagagctgcaacaccaccacagaagatgaggacctcaaaggtaggtgctggcccttggagggggaaggactccagcagtgacccaggtacctgggctccaatggggcacctgccttttctgtccccagaactgggaatgctggctcctatgcccctaggagagggcttggtataaaagctactttccacgagccaagatatgaggcccctgtctggtgttgctgagttgggcaagaggcttctcttctttgaccccaagtctaaaatagctaagctagagattctccaggggccagggctcagagaactgttcctgttgctgataatgatgtgccatccaagaacaggggtaccccaagtccctgccgaagtagcctgtaagtgctatgagtcataaatagagtgaccaatcactcctggttttcctcggacacagaacttttggttttaagactgtgatgggccaggagtgctggctcacacctgtaatacccagaactttgggagggccagggcagaaggattgcttgagaccaggagtttgagacaagcttgggcaacatagcaagaccttgtctctattaaaaaaaaaaaattaggaacaaataaataggccaggtgcggtgactcacacctgtaatccccacactttgggaggccgaggcaagtggatcacttgaggtcaggagttcaaaaccagcctggccaacatgatgaaaccccgtctctactaaaaatacaaaaaaaggccgggcgtagtggctcacgcctgtaatcccaacactttgggaggccaaggtgggtggatcacctgaaggtcagaagttcaagaccagcctggccaacatggtgaaactccatctctactaaaaatataaaaaattagccaggtgtggtggcaggtgcctgtaatcgtagctactcgggaggcggaggtgggagaatcgcttgaacctgggaggtggaggttgcagtgagccgagatcaccccattgcactccagcctgggcaacaagagcgaaacttcttctcaaaaaaaaaaaaaaaaaaaaaaaaaattagccgggtgtggtggcggggtcctgtaatcccagctactcgggagactgaggcatgaaaatggcttgaacccgggaggtggaggttgcagtgagctgagattgcaccactgcactccagcctgggtgacagagcgagactctgtctcaagaaaaaaaaaaaaaaaaaaatatatatatatatatatatatatatataaatataaaacccagatagtcctgggaacactgggatgagttggtcactctagtcctaagattttggcctgaatgatggagttggaactaatctgacaaccgtgaggccacatttggtcatgtcctggtgggcccgtaaggaccactagcctaagcttgggcctggctagagtgccagggcggtgggagggcatggcaggctggacccccgggaatctctgtcctgctctttgattgggcctcctggaattgctccctttgcctgaattcagtaagtgaccttgggccaggacatcagaaaagacagaggaacactctaggacagagctgggagagcatgccctgggtggcaagggggcaccaaaccttttggaaccaaaaaaaatagcagaaagctgcgaggaagtgaatcatagtagctccaggcccctgtgagtgaggtcagatcagttttgattccggcactgctggcaacataggaggcgctgtcactgctgggctctggaccctgtggcctggccccctggaacatcttccccgggatcaggggtccttggacaggctgttgtaaggctcgtctggaagccacagcccaggtctgggcacctgcctggtgccctcagctgggaggcctctctggcagaggcggcggcgtgggatgtcgtccagtgtccacagcagcctgaggcgaggcgtccccttgccccggctctgcagcgccatgggctcggggcctgtctggcttgctcgctcacctgccttgttctgtttgttttggctgctctgccttgccctgccctgccctgccctggctggctagctgccccgctccgcactgggaatggcagctcggtgcctgaaggacggagctcccgggacagaacagccccctctgcaggcatgcagccccagccttctctctgctcctcagccagtaagtgtgagggaggcacattctggctt

SEQ ID NO: 5362 - DNA, 2300 bp, Homo sapien
tccgtttcttccatcatctggaaatgtggacaatcatagcatttacctaatgggatcattgtgagggctgtgggaagatttacagaagctttttgctgtttagggtagaggcagggagacaggaatagcttggcagctatggatgtgaaggcccctgcccgggcctggataattcagggtgaactggactctcttccttttgcaccccctccaaagcctagagtcttaactcaactctcaccattctttatctggccataatagcacaggggtggagaaagagggctctaggctcagaccacctgcatcactgcctgttcgtgttaccttaggcagattactctatctttttaaacctgtttcctcggtaatataatagagctaatcagatccctacttcacagagtttctgtaggtatgaaatatggtaatccatgcctctgcctgacatgtagtcagtgcatagtaagcgattgttatggcgactactgttattagtaaacccttattaagcccctgtttacagaaagaactctagaaagcactacctggaaaggtacccccgcccttcgaagagcttgcaactgaaagataactgatgtaatatatgatgtgagaatcgtgagaagtgcattgggaaatcggggggggggggggtggagtaggagggagaagtcacagtctaccgagaggagcagggaagacttcatgaaggaggtgacttttggcaggatttcagcaagtagaaagagggaaggacagtgggggagggctgtgaggcctccgtgctgtgagtagcatcctctcttcccacgtactggagctctgccttcctgtggaaggaattgacccacgcagctcacttggatctggggacttgtggatttctggttattccaccaaaaccaagtaatcctggagtctgaatttgaagaggtcaaagcttacagccatggtggccaagaggactccggggagaagcaggatttgtgtcctggtttctctttctataaaatgggcatcatactaatgccaacctcctagagttgttatgaggataaattaaaagaggcagctgcctggtgtagaagtaagctctcaataaatgttagctattattattttaagtcatcattatcttgatcatcaacctctttattatcagcatcattatgtttcaggcttgccatcaggactatgtagagaatatatgcaaaacccctagccagtgccgagtatatattaggtgctcagtataacttagctattattagtgttcctaacaagaaagagattctgggccaggcgcggtggctcacgcctataatcccagcattttgggaggccgaggcgggtggatcacctgaggtcaggagttcgagaccaacctggccaacgtggtgaaaccccgtctctactaaaaatacaaaaattagccaggcgtggtggtgtgtgcctgtaatcccagctactcgggaggctgaggcaggagaattgcttgaacccaggaggcgaaggttgcagtgagctgagatcacaccactgcaccccagcctgggcaacagaacgagactccgtctcagaaagaaaaaaagagattctggacaccctggaccactgaaaccctgttgtggtggaaagagcaccagagttttagttgaatacctggattcaaatcccagctctgctgctcactggctcgaagtgtgcaaaccctcaagtcatttcctcatctggaaaaggtggtcataactatctatctggcccaggcctggtggctggtgcctatagttccagctattcaggaggctgaggtgggaggattgcttgagcccaggagtttgaggctgcgatcatgccactgcactcctgcctgagggacaaagtgagaccctaaaatgaaaggaaaacaagttgtctccaggattgccatgacttgctgcattacttcagcaaatcatcacaaatgcatagttagtacctgaactgaaggaatatgaataacaaggtgaccacaaggagaatggatggttgatggcttttgttttttctcttctgcttttagatcaccagaaactagaacgtgaggctcggatatgtcgacttctgaaacatccaaacatcggtgagtgcctgggcatggagcattttgtgggtattttgtagaagcagggataacagatatccactgcttttgtgtgtgggatcacctctgtctgtggaccttcacctggtgtctgtttttacatgagcaggatagcaactgtgtctcagaattctggggcattctagtttagaga

SEQ ID NO: 5363 - DNA, 2300 bp, Homo sapien
ggaagtggccttactctccactttacctcctgttgccctggggaggggtagggcatggtgctctggcactgctaccctttcccttggccctctctacccttctcccaagagaactgctaatgcttttcctttagggcttcatgccctcccattccctaatcacccctactgggcagtctggttcccaaagcagctctcagggctgttgggtcaggacaggaggggagcactcctggagagctctgccccacccacccctcagggaggcagcttgggaggctgggacacctctcagccccctcctctggcagagcgagcctgctggcgagggagacccgactcccagtgggcgtcctgctgtaatcaagactgagtggcagcctctggctgagctccaccctgcccagttggggctggcctcagcctcaggggacagctgcccaggcaggtcaggaacctgcccagcctgtttgtcccccatcaagacagttatgtgcctctgtcccaccaacttgtgatggtggggacaggagaagggatggtatctccctctgccatcccacaaatatttactgagggtcaggggctgagtgtacaatggtgaacaaaaggtgcagaggccccgctttattggagcctacaattcagcgggaagctagtttttgtatttttagtagagacaggatttcaccatgttggccaggctggtctcgaactcctgacctcatgatccacccgcctcagcctcccaaagtgctgggattacaggtatgagccaccacgcccggcccagcaaatgtagttctaattaggcaccaagtactattctaagtgccttagaccatttaatgctgacaggcctatgaggtaggtaatattattgttcccagccgggcgaggtggctcatgaagccacctctgtactacatacatacttcattacttcatgtatgtactacatacatacttcattactacaacataatgaagccccgtctgtactaaaaatacaaaaaaattagccgagcgtggtggcgcgcgcccataatcccagctactcgggaggctgaggcaggagaatcgcttgaacccaggaggtggaggctgcagtgagccaagatcgcaccactgcactccagcccgggcaacagcgcaagactccgtctcaaaaaaaagattcagtgacttaccccaggtcacagagctgatcagtgagttgcctagaaatccaatccaggcagtttgatgcaagttcacgcttagacagctatgagatagctctactgccccttataccagtcaatgcatcactacaaaatgtggtaggtgccagaaaataaaagtacgagggtgccttgcaagaaaatggggatttcccctttcttccactttctcttctagcccccactgcacaaagccttttcaagtcttcctacttcacccctttcatttctggccggatagagaatactctttcatctctgcagttatggtgcaggaaggcagagtcctacctgtatccttgcccctggcctggtctccctgatcaacccgcgcctgaagggtttctttctaataatggccctggtgcttgcgcaagtctagactgtcagctcccagagggaaggcggctggcagctggctctgcgcaggctgggggcgcctcccgggcgtgcagcctggcacaggctccttgaccttggctctctccccacgtgctaggagcccggttgggggctcgggacccgcgtgtaggacccgtccagagaggtcagtggtccagactcctacactcctaacacatgcaccctcgcatgcacgttcccgagcccgcgcggggtccgccccgggacaagcccataagtcgcgaaccttccagctccgtctgcccagacaggtggcccggagcggggaccccctcccctcggctgccccgcgcgcctggcccagcgagggcggctccggggcggggcggggccggcggcgggaggcccctccccgggggcgggccgggggccgggcggggggggggactggcggggcctgggggcggggcggggcgggcggcgcgggggtgtccctccctccctcgctctccccggtaaagtctcgcggtgctgccgggctcagccccgtctcctcctcttgctccctcggccgggcggcggtgactgtgcaccgacgtcggcgcgggctgcaccgccgcgtccgcccgcccgccagcatggccaccaccgccacctgcacccgtttcaccgacgactaccagctcttcgaggagcttggcaagtacggcccgc

SEQ ID NO: 5364 - DNA, 2300 bp, Homo sapien
tggataaggaagttctgtgaagagttgaagtgctaggtgaagaggtggcacgggggaggagggggcggaaggggagaaagggtgtcacgcttcataacggtctccaaacctctttgtccaggaggaaatgaagtcatctgctctcagcaatcagcatgacagcctccagccaagtaatctggagtcatgagagctgctaggggagcaacatgaatcatgacggtccctgggaatttcctgataactaacctgggagtttcggggtaagtcctcaggctgcagcatctctgtttatgttctggtcacgtttatttacaattaatgggttctcaaatccaaacaaaactgaccacagtcttctagaggaagtagcaaggttggctctgaagcctatagcatcgctgactcagtctgtcccctggaaggctggcagctcagcaagcacagaagtctctccagaagacagtgggtcacctgcctcccaaaagctgaaaggctaacttgtactttccccagcaggcagctggcaccctgagccctcggctggggcagagcaaaggagccttcctccttcctaccttcctggcactctccctgccttccttctgtcactctcaggtggacccagacccaaggtccagatttgcaaggcaggaaaatgctgcaggcctaggctgggaaagggcccaaagccgctagtggattgctgggactcagcctcctccttcccactaagagagcgagtcctactgggttcaaaatgaccccaagccctggttcctgacactaggggaaagagatgggggtgacagaatcacagaatccctgctatgttcctccaagtgtgcccagagatgcgtgtgtgtgtgtgtgtgtatacacaaatgtctgcttatcctcaggcaggaagggtggatgcagtcatttacacatggtctgtttttctggaggacaattttatttgataaacaattgtttctatctgaatagaataaacaaggctctatgatgaagtaaaacactaaatacacatgcattaaaaaatgcataattatctttttggaatgggctatacagagatgtgctttttaaaatgttaagagtgtaaaaggacaaacagtgaaaaataaatcttcctcttattttgtcctccagtctcccaattcctctactcagaggtgagaacagaacttccacaccctccagaacctccacagttagaactgtctacatgtttccattgtctttacttttattcttgcctgcacaaataaatgaattgctcattatggaaacttcccaaaagacccgttaacacttcaataggaagcaccaacagtttatgccctaggactttgttcccacaatcctgtaacatcatatcacgacacctaacccaatccttatcaagccctgtcaaaaacggactttaaaccaagctgcaaattttcagtaatctggccttgcctttccccctctgatagcaccatcaaacaaacccccttactgccgaaagcaataagcccggctttgttccatccactggttgtgttggtgatatctggggactgccactgaacagacgcacagagggagcccctacaggcaggggtttttctgtctgtgcttctgggagagtatgtctcgtacatttgtcgcgttgatgaagacttcacagctccatcagctgcgggcaagggggtctgaggcagtcttaggcaagttggggcccagcggggagaagttgcagaagaactgattagaggaccccaggaggcttcagagctgggcgaggtagagagtctcctgtgcgccttctctcctctctgcaattcggggactccttgcactggggcaggcccccggccaggtgcatgggaggaagcacggagaatttacaagcctctcgattcctcagtccagacgctgttgggtcccctccgctggagatcgcgcttcccccaaatctttgtgagcgttgcggaagcacgcggggtccgggtcgctgagcgctgcaagacaggggagggagccgggcgggagagggaggggcggcgccggggcgggccctgatatagagcaggcgccgcgggtcgcagcacagtgcggagaccgcagccccggagcccgggccagggtccacctgtccccgcagcgccggctcgcgccctcctgccgcagccaccggtgagtgccgcggtcctgagatccccgggccggatgcgcggcggccccagctcccgagcgtctgcctcccccgccctgggctgcccgggctccctgggctccccggcggctgc

SEQ ID NO: 5365 - DNA, 2300 bp, Homo sapien
tcaaatccccaggatttggtgatggaggggatgaaggaaaccaggagagaagcatcaggatggccccaggtttctggctttcataattgaatggatgtggtgctatcatctgagacagaaagtgatgggagatgtctccacactggggcatgaagactcggccagtttggggcaggttgactttgaggtcccctgtgagtgacaaccaaaaggggtgtcaagtagacaacagaaaataagagtctggagtgcagaagagaggtctggctagagatcagctttgtaagccatctgtttattggtggtcatttaagcctgggtgctaacaagatcctaagggagaaagcttagggtgggaataggaagtttaagatcaggctttaggaatcctaacatttaagaccgagtaaaagaggttgagattacaaaggaacccaagaagccagagatgttaacaatggctgtggaatgctatgaaagtattttacatttgtagctacttttacaattgaataaaaatgtttagtttaaaaagccaatttttttatggcttctagaacttaattcactttctggattttgaaaaatagtgcctgagggcaagaggtgatagtcaaaatatttaactatcaagataccccagtaggacactttcgcctgagccagctggaggagggaggatctcagaggcctttgctgtgccacaggcattaaccctgtggttgctggatcatgaagaagtggagagaggctgatggcaggggccacgcggagaggatctcaggacagcatctgtttagtcactgagcagaaccagtgcctgctgctgagaatcagtcctgcagcagggtcatcaccagctggatcccaccagatccttccccaccatctccacctactcattgccccccagagttctccaccacaatggactattcctcatttccttagaacacctcaccttttcatgcctccatgaacttccctacgcctacaatgcctttcttctagtttggcaaatttctgtgtgtatttgaatgtccaggtaaaatatcacctcttctgtaaagtcgtcattgacttcaccaggcagaatcaattgcttcttcattatttttccatgcattttatgcagacttagtatagcactttgcaaagtggtgagctccttgaggactaggactgcctcatttgtatctaaaataatgtcctgtgtatgggtactttaaaaaaatgacaaagggccgggcgcagtggctcatgcctgtaatcccagcactttgggaggccgaagcaggtggatcatgaggtcaggaatttaagatcggcctggccaagacggtgaaacctcgtctctactaaaaatagaaaaaaattagtggggcatggtggcaggcacctgtaatcccagctactcgggaggctgaggcagagaattgcttgaacctgggaggcagagattgcagtaagccgagattgcgccactgcactccagcctgggcgacagagcgagattccatctcaaaaaaaaaaagaaagaaagaaagaaatgacaaagattgttgaatgaatctcaatgtgactgaaacctcaaaaagagacctagaacatccttttttttttttttttttttttgagatggggcctctttatgttgcccaggctgttctggaactcctgaactcaagggatcctcccactttggtatcccaaagtgctggaatttacagatgtgagccactgcacctcgcctagaccatcttttccctcaatttgttattaaaactcagcaacctcactgacacatgctatgccatggataaaacttgaaaacatcatgttaagagtgaaagaggccagtcacaaagaaccacatattataggattctattgatatgaaatgcccagaattggcaaacccacagagaggacagaaagtagtaaattagtgattgcctagggctgagggggttggggagaaaaacggagtgattgtgagtgggtacaggatttctttgtgaggtgatgaagtgttctaaaattgattgtgatgtctcacaattctgtgaatctactaaaaaccattgcattgtacacttcaaatggtgccagacgtggtggtatgagcctgtaattccagccactcaggaggctgaggtgggaggatcactctggcctaggagtttgagatcagcctgggtgacagagcaagaccctgtctctagaaaagagaaagaataaatgggtaagttgtatgatatatgaattatatctcaataaaactgattttttttctttag

SEQ ID NO: 5366 - DNA, 2300 bp, Homo sapien
ggctgcaatgagctgtggtcacaccactgtttactccagcctgggtgacagagctagaccttgtctcaaaaaaagaaaaaaagaaatgcaatttttttttttacatatcttacaacattccctaacattagtggtctccaaactaattacatggtaaagagtaatgtcgagctagccacaatcaagagtaaatgtcatacagtcctttacctctgtagcttataatcctgtagcaatttcccttttcttccttatctttgagttgcatgaacattcacttcagtctgactaatcactgatctggaacattcgcccacctcctgccttgttcattctgaaatgtctgccctcttgcctgcctaaccaaacattattcttcctttgagggcagatttagttccactgtcccatagactctttcttacccttaggcccgtggggatctcctcctgcttggaatttgagcatcacaccttctttgccacatatttgcaacttagtttcatgatgattccttagtctagcccgtgcaatgaactgacctctctctttccatggtaacatttcagtccttaataatctgtgctatgtttagtgagactgaaaactttattatccccactttagacattagaaaccagatttgtaatttttcaagtgtcaaatgagaaccatgtggctaagtgcccacatacatctggggttctattactatggaggaaaagcagaacggatatattggaggacatctagcagcctgtatcataggagagaaatgtaaaatgatcatgtcagaaaaggacaattaaaaggattagtacaagcagctcatgccagggccttgctgtgggaaatcataaagaaagaactgaaagtggaccttgaaggtaggtatatcagtgatctattgttatgaacaaatcaccacaaacctagaggcttaaaacaacactcatttatttttatttattttattattattattattatttttgagatggagtctcgctctactgcccaggctggagtgcagtggcgcaatctccgctcactgcaagctccgcctcccaggttcacgccattctccttcctcagccgcccgagtagctgggactacaggtgcccgcaaccacatccagctaattttttgtatttttagtagagacggggtttcaccgtgttagccaggatggtctcgatctctcgacctcgtgatccacccgcctcggcctccgaaagtgctgggattacaggcgtgagccaccacgcccggccttattattactattttttgagacggagtctcgctctgtcaccaggctggagtacagtggcatgatctcagctcactgcaacctctgcctcccgggttcaagtgattctcctgcctcagcctcccaagtagctgggactacaggcacgcaccaccatgcccagctaatttttgtatttttagtagagacggagtttcaccatgttggccaggatggtctcgatcttttgacctcatgatccacccgccttagcctcccaaagtgctgggattacaggtgtgagccaccgcgcctggccacaacactcatttattatctcacaactgtgtaggtcagaagtcctgcatggtgtgactgggttctctgctcagtgtcgcaaagctgaaataaaggtgtctactggactgaaaacaaggtgtcccctggagctctcagctggaggaaaaatctgtttccaagatcattcttcttgttggtagagttcagctccttgtaactgtgcgaccaacttccccgtttccttgctagctgtcaggggccactctcagctcctaggggctgcccacataccttgacccatggcctcccacgtctttaatctagcaacagctcatcaaatcctcttgtgcttttgagttcatttgttgtaactggccagagaaaactctctgctttaaaagagctcatgtgattaggtcaagcccacttggataatctccctgttttaagaccaactgtgctatataatgtaatctgattatgaaagtaaaatcccttatagtcacagcctggggattatggagagtgtgtatattcggagtgagaaatcccgggggacatcttagaattctgtctaccacaataggtaagagttagacaagcactgatagctttctaggtgggaaagaaatgtggagaaaagctcaaaagtgaaactctaccaggaatttctggagactgtgaatatgtcagtttgtgactgctctaataatgataatggtttcttttactgaaggtctcctaggt

SEQ ID NO: 5367 - DNA, 2300 bp, Homo sapien
acatggcgaaaccttgtctctatcaaaaatacaaaaattagccgggcgtggtggcatgcacctgtggtcccagctacttgggatgctgaggtgggagaatcacctgagcctggggaggtcaaggctgcagtgagccgaaatcacaccactgcactccagcctggacaatcggagtgagaccctatctcaaaaaataaaaacataaataaaaataaataaaataaaataatttttaaaataaaaaaatcatatcgttccatcactcaacttttttttttttggacagggagtctcactctgttgctcaggctagagtgcaatggcacggtatcagctcactgcaacctccacctcccaggttcaagcaagtctcctgtctcagcctcccgattagctgggattacaggcacctgccaccacacctggctaatttttgtatttttagttgagacggggtttcaccaggttggccaggctggtcttgaacccctgacctcaggtgatctgcctgcctcagcctcccaaaatgctgggattacaggcgtgagccaccgtgcctggccccatcacccaaatatttatactattaacacaaagtaatgggcagagaaaacagctgtggtggttgtggtaggactagacaaaaattttcatttgatgtgagaatcttttgcttggaggcattactgaaagtgtttacctcagaatgggaaagcttgggcaaaagcgaatttgaagtaagtaagacgtttggaagatgtctttttttttttttttttttttttgagacagagtcttgctctgtcgcccaggatggagtgtagtggcgcgatctccgctcactgcaagctccgcctcccgggttcacgccattgtcctgcctcagcctcatgagtaactgggactacaggcgcccgccaccacgcctggctattttttttgtatttttagtagatacggggtttcaccgtgttagacaggatggcctagatctcctgacctcgtgatccgcccgcctcagcctcccaaagtgctgggattacaggcgtgagccatcgcgcccggcctggaagatgtcttatacaaagcgtgagggaactggataatttggtcttacctatcaaaatataaaatgcatatacttttgcgtttttctctttcctggtaggcatttgcgctagataaatacacagatgcacagcacaggggtaagtacaattcatgcagaattgttttttaatagtgaaaaccaggacccaacccaagtccatgagtaggaaattggttctgtaaatagttttatttcatgcaatggaatatcatgcagtcattaagaagaatgaggtagacctctaccagcagtgaaagataagggcattttaatcaagggcaatcatacctagttccaggaaaatgtttattaatctcatttagttagaaaatatatatgtagaagtgaatctatagacaagtctagaaggctacacacccagctgttaaacagaatgtctttgaggagggcagggggcggagtctgcgtttacgtgaatgggacgctgctgtttctcagtgcacctctgctgtttgaatcttttactaaaaaccttcccatgcattgctgggagggaatggaaggagtattttgagggtttcgtgtgaagggaaaagttgaggaggggacgtgggagaccccttggtctcatcaaactctagcgccgcttgaggtgaggagaccccgccccgctgaggtgattctgcagaggggcggagccccccagatccgaggcgggaggcggcccgggggcgggaccagccggctccagcggcccgctccgctcccaccatgcccttataaggagcgcccggcgttagggctcgggaatccggtagcaatcccggcggctcagccccaatcccaggcccctcccttaggaatgggggaggggcggggtttggcggcgcggtggctggggcggagcatctcgaaaagggaccagtaggagtggcggcccaggtctgagctgcgctgccattgggcgcggcgacgagagggggcggggagcccgtgaggctggttacgccgagggaagccccgactccgtagtcgctgcacagtctgtctcttcgccggttcccggccccgtggatcctacttctctgtcgcccgcggttcgccgccccgctcgccgccgcgatgccagtgtttcatacgcgcacgatcgagagcatcctggagccggtggcacagcagatctcccacctggtgataatgcacgaggagggcgaggtggacggcaaag

SEQ ID NO: 5368 - DNA, 2300 bp, Homo sapien
aagtaagtaagacgtttggaagatgtctttttttttttttttttttttttgagacagagtcttgctctgtcgcccaggatggagtgtagtggcgcgatctccgctcactgcaagctccgcctcccgggttcacgccattgtcctgcctcagcctcatgagtaactgggactacaggcgcccgccaccacgcctggctattttttttgtatttttagtagatacggggtttcaccgtgttagacaggatggcctagatctcctgacctcgtgatccgcccgcctcagcctcccaaagtgctgggattacaggcgtgagccatcgcgcccggcctggaagatgtcttatacaaagcgtgagggaactggataatttggtcttacctatcaaaatataaaatgcatatacttttgcgtttttctctttcctggtaggcatttgcgctagataaatacacagatgcacagcacaggggtaagtacaattcatgcagaattgttttttaatagtgaaaaccaggacccaacccaagtccatgagtaggaaattggttctgtaaatagttttatttcatgcaatggaatatcatgcagtcattaagaagaatgaggtagacctctaccagcagtgaaagataagggcattttaatcaagggcaatcatacctagttccaggaaaatgtttattaatctcatttagttagaaaatatatatgtagaagtgaatctatagacaagtctagaaggctacacacccagctgttaaacagaatgtctttgaggagggcagggggcggagtctgcgtttacgtgaatgggacgctgctgtttctcagtgcacctctgctgtttgaatcttttactaaaaaccttcccatgcattgctgggagggaatggaaggagtattttgagggtttcgtgtgaagggaaaagttgaggaggggacgtgggagaccccttggtctcatcaaactctagcgccgcttgaggtgaggagaccccgccccgctgaggtgattctgcagaggggcggagccccccagatccgaggcgggaggcggcccgggggcgggaccagccggctccagcggcccgctccgctcccaccatgcccttataaggagcgcccggcgttagggctcgggaatccggtagcaatcccggcggctcagccccaatcccaggcccctcccttaggaatgggggaggggcggggtttggcggcgcggtggctggggcggagcatctcgaaaagggaccagtaggagtggcggcccaggtctgagctgcgctgccattgggcgcggcgacgagagggggcggggagcccgtgaggctggttacgccgagggaagccccgactccgtagtcgctgcacagtctgtctcttcgccggttcccggccccgtggatcctacttctctgtcgcccgcggttcgccgccccgctcgccgccgcgatgccagtgtttcatacgcgcacgatcgagagcatcctggagccggtggcacagcagatctcccacctggtgataatgcacgaggagggcgaggtggacggcaaagccattcctgacctcaccgcgcccgtggccgccgtgcaggcggccgtcagcaacctcgtccgggtgagcgcgcagggcctggcgcgggagcgggcgcgggaggtatccccggggccccggcccgcgtcgcggctgcctgtggccggctcgctggccgtggctttccgcgtgggttccggagccaggcgccgagggttcgaatggcctcttctccgccctgtgaccttgagcgagtcctgagcctctccgggcctcagtgtcctcatctataaaatgggagcagtcatgaaaaaggctgccttgcgggcttgtcgtgaagatatggcgaggtattattcgtggagtgcctcgcgcggcgtgtggcccacagcagacacccaataaatgagagttgctgggatgtccgagggtccctgccccgcgcaggcttcgcccccacgttgacttcctcgctctcagcgccttttaggcctcctcgatctggctgtgcgggggagggagagcgggccttcccacggatcccttgccttctcttctagggatccttatttgagccacgttgtcctcctttctaatacttctgcccctcaccctgagacccgcctcgcccacccccgctccccagagctccctgtattccgcccttttattcacttgcctcactctctgtcgcctcctcctccctcctgggcattttacttatgctcactcctctggcactctcacacctttatgc

SEQ ID NO: 5369 - DNA, 2300 bp, Homo sapien
gctaactccttcctaatggactctatttggattaagaatatgcatgtacagcctgtatcttaccagatacgtggcaaatgttaatccttttttccccaaatgctgtaactgactggccaggacctcttgagcagtcacttaaattttctgagacttggtttttgcatctctaaagtagagatattaactgtcctgtctcatggggttgttgtgaggattttttcttcatattattcataaatcagttttgagtacttttcggtatccttcttaatggtgatttttaagatggaagagttgacatcaagtgtttaaacatatgccagttttgtgtatgttcttctgaagtatcaagtggacactcatttactttgtcactttattaccttcttaaaatcaggctgtgatggtaaaaccttcctgtgaagggcccattctggggagctgtttattgagaccaaacctcatgtattcagcctgaaaagagacttgccactttctggctttacagtgccatctgtaggtaaagaggagaaagcttggctgaaggtttgtatctggagagcaagggtgctctggtgtttaaaggtgttttgtcattgtcaggtggtctcggctgctcgtatcttacttaggaaccctggaaatcaagctgcttatgaacattttgagaccatgaagaaccagtggatcgataatgttgaaaaaatgacaggtagagttttctatacaaatcttgttgtctaatccatgaagaatgagttctgagaaattggagcgggactggttctgttactcagctgtaattggataaagggccggtcacgtgctgagcagtgtacttggctctgcttaaggctgctgagcagtggcggcttctcattcaagccttgcaactttgtcagaagagagactctttgagtctcttttattttaatgctgccctcctggcgtgatgtttattgtcaccactcctatcttctctttgaatagtgtctttgcccagtccgagcccgagtttggtttcagaggctgggaggcggtgtttgtggatacagtaagtgtccctgtcattttcagtgggttcacatttcaaggaaccacaatagctaccatttaatacaacttgtctcaaagtttcctccaacttatcaactacgtagtttttttaaaaaggagaaaccaaccaccagcaaacctgtgtctgtgcaattgaagtggcacctctgaatcgtcttcattctctgtaaagggagagataggaaagaaggaatgaggaatgtaggctttttgctgtccctgcagaacctgctgtgactggggtccatggcagcccgagatgaaagtggaactcctgaggtgtctgaagagaggtaacaggaataagaaataggctgttagggttattggaatcctccgcatggctcatcttgagcactacaagctgccaacaagcaacagatggctggggagtgagagggacagggagaaaatattattcacagataacgtggtggtgatgcagtgatggtttcagacatattccttgtttcctcccgatgttgcatttctggttgtctggggtggatacaagaaggctggcaaccacggttggtataaatgctgcaaatccagatgggcttttgggctatgtcctcactgttttttttaactgtggtgtttacctggaagcttttgattatgtaggaagagtttgagctgaagaagagaattctggatgttatactttctcatgagaagtttgagtggataacagtgttttggagtttctgttcttctaaattgaaactaaattccatttctgttttcctaacagggctggtggacgaagccattgataccaaatctctgttggatgcttcagaagaagcaattaaaaaagacctggacaagtgcaaggtagctatggccaacattcagcctcagatgctggttgctggggcaaccagtattgctcgtcgggccaaccggatcctgctggtggctaagagggaggtggagaattccgaggatcccaagttccgtgaggctgtgaaagctgcctctgatgaattgagcaaaaccatctccccgatggtgatggatgcaaaagctgtggctggaaacatttccgaccctggtaagcaatgcatggcactatgtctcacctccactgagaggttaactcaggaaaggtcgtgagggaatatgtaccccacaaccaccacatacaaagtctgggggcaaaaactatagacacttagtttgagaatgctagattaatctttttccatccaagt

SEQ ID NO: 5370 - DNA, 2300 bp, Homo sapien
cacacacgcacacacacacacacacacacacacacacgcagcctctttccccgagtacctgtaagaggttggttctaatccgtttatctgtgcactgcttggcaacctccttggccaaccgagtcacctcatctgaggccttggcgatgtccttggcacactgaatgagtgcccgcttggtaccactgccccctcttaccagccgagacatctcagccatcagcagagccatgcgcttggctgctgcaatgatgtcattgccctagagggaagcaaagatacagtgtgagctctgcccacgctctggccatgttaaggaaggaaggagaagcacagagaagaggagggagcttgccaccttagcatccctccggaagggtgagaagaggagaaaagggccgttcttgagtgatacggatagcactggaagaaaaaaaaagaatgagacagggcactcgcccaagcactcagtgtgagaaacaaagagagaggagagaggagggggaaaggagagggagagagacatttcctgactaaaaaaaaggaagacccagatattagtctgaaagggcaagatgtgcaccccaggcacagcactgaacaagcactttggcatctccaggttaatcatatcaataaactggggacagggccaaggagctggttaaacaggcactttcatttctatagggagaaagcagtagagctggcctgaggggaaaaatacagaggagcctttccagatgctgaaatcaccctcttcatgcttacccttgttgcaaatagcagccaagcgttcttgctacttaactagaatttcaaacccaagtaactattctcagctgggtgagggaaaaaaaaaaaaaagatattttctgatctagcctgctctggctatccctctactgcctcttatttgtcctgtcagcctgaacgaacatgttgctttaatttttcccacgtaaaagggtaaagaatcaattcttcagtcccctcagctaagtgaagactccagttaaaggaaccttcagctaagaggatgcaagagaaggcattaggaaaataaaagtcgtgattcaggctgtaaatggaaccctcactccaaggaatggcagtttatcttagacttggcattttggtttactaaaaccctcatgggtcatagtaaagaaacagacaagttatgtattctgtgccctctcatgaaagctcctcttttggctgctaacaaccccaagtcatagcaactgcagtgttcaaaactagctaaaagtccaggccctactcatttttcccctcatgctcttcatttctctacagtgcagtgaggcatacacaaaccataccactgcagggtgctctgcaagaggcctctacaggcaccatgaagcggttcatcatttatgctggaagggtgtaacatctcaggcagtaattgaggccggagagaacgcaggtatgggaagaagtcaagaagcaaggggtatgttagacaaggtcctctgggtctacctcttctagtgcagacctaggatcattccaggaccccatcacgttggttagaagatagcatagtgccatggttagtgactacccatcactcttcaaagcctttcttcttgcagcatgccacctttaaagggaaaagtgatcaccccaatcaccctactctccaaactagctttggttcattccccaaggccaaagttctatggcggcctgtcttgtggccttgagtactccatttcccactcccattccctcccactgagatacctggacaagcagtcagtgaggccccattttctgtggactcccatcaaggccagcatctgccacatagccaagtgcagggcagcaagcagtcctcccccagagaccctgccctataaagctgcctctccccctcatcaactctccctgagccatcagtgaggggtcagttgggagcaggcaaagctcaatggtcaggccaggtgacctcgtaatggtctaccatggttcctgacctggaagtcattgagagatgcattcacggcttcccaaggggtttccagcgatggccacaaaatcagtaagaaaaggaatcctttccaaaagtgaccccccccatctctcttcatcccctaaacataaatgcagtccaattaatctggcgttagcagacctatcaaacttgtgaagccagtcctaacaacatggtgcagacagacagatgcccgccctgctcagactcacaggaccagcacagatcatgagtgatgcaatgtgtcaaggctgcacatggccggatgcatatg

SEQ ID NO: 5371 - DNA, 2300 bp, Homo sapien
gtgatccacccacctcagcctctcaaagtgctgggattacaggcatgagccctaccgtgcctggccgtatattatattaaatggttagaaataaaaatcataagattaagtaagaaaatataatcttgttgcaaagagagctttcctaaagatacgtaaggtttttttttttttttttttttttttttttttttttttttcgaggcagagtctcgctctgtcgctcagggtggagtgcagtggtgaggtctcagcttactgcaacttccgcctcccgggttcaagggattctcctgcctcagcctaccaagtagctgggactacaggcgtgtgccaccacacctggctaatttttgtatttttagtagagacagggtttcactatgttggccaggttggtctcgaactcctgactttgtgatccgcccgcttcagcctgccaaagtgctgagattacaggcgtgagccaccgcgcctggccaagattcgtaaattaagataattcttcattaacctcattcacttcacttctcctatagtgtcaattgaaagtgtccctctgtctttcccaaattaatcctttcacttgtaacttgatcccattcctttccttctcttctgggagacaagactttttcttgaatcttcaaatagttgcttgcttcctgcccccaaatagatatcttgtattctttaaaacaaaccccaaactttcccccaccttgccactctcaataatcttgcttcatgccccaaatgatgaaggattggtctacacttgcagtctttcctcagttactattaaagcatctctctcaaacagctcaatgactttctaattataaaatccaacgacctattctgatttcagcttcctcctctgaccattgcagcattttatgtcattgataactttctcctaaacaaaaatacttcttacccttttatatgaaacttcatctgttttgggtctcaccttgaaagtctttcgggcttaattctcataattttttttaaagtctttctacaatctccatgtaaaccactgtttcaaattcgataaaactcaaactccataaaatacctcctcctgtcactggcaccatcttcttaatcacacataaggctgtaagtttcaggttcaaacaaatctaccaaatacaaacagccacatcgcccgtcactcttccacactcactgccacctgctcagcttagaaccccgttacctctctcctgaagaactgcaacacccttctcactgcattcctcaccccaggctcttccaggcaccacccgctaacaggacgtctgctcaggtccgtttggggttttgtcctccaaagcagaaacctgggactgagattcctgccgtctgtactccagctcactatagagggggaacccagtaagcttgacctccggggctcaggcgcctgagaacactgggctgcaggtggaccgctcccttctggccttgctggcgagaaagcccggaaggccgggagtgggggggaagcgaggcccgggccaacagcaccaaagacgctcctagagcccagatcggagtcgggggccccagctattcagcctactcccgggttttggagctgtccccagtccacagatttcccgcccctcacactcaccccaacacctgtgccagtcagtgattcggcgccggatcctctcctaccgaagctggagaagccgagaaggccgcgaggacccgcagctggagtgcccaggaaattgcctgattaacagcttcaaagacaccgactctgtctaccgtattagaaattttaaatatgcaggaagaccgtaaatgagaggaaagacgtctcttgaggcttagtatctaaatcttctacataatccagggcctagaaaaatggtgggtttctctccatctagattcaggcggtcatctgctgcctaacgcagtctggggtccctcatggtaggggaggcggggtcaggaatgggcggggcattcgctgttggtgccgacggatagagccaatgattgtggatgacagcggcacagaatgggcggagtctggaggggcgggatttggagaagagaaagcggtgatgcgaagagggggcgggaccagagagtggatggcagaggtgggctgtagagccaaagtggggtgggagcgcgaagatggcagctgctgaggaggagccgaagcccaaaaagctgaaggtggaggcgccgcaagcgctgaggtgagcgctgccggacttggggaggagggtgacggcgctgcaagcaagccagggcccacgtgg

SEQ ID NO: 5372 - DNA, 2300 bp, Homo sapien
attaaattatgcaaagtctttataatccattctccttaaccaaaaccagtagcaatcccctgtcaagcaagtcatcataaattcagtgtaaatactcaatgcattatcacactttgagtctgaaagcaaattaatataataaaagtaataatagccgatcctaaaatgtctccccacaaaattagagatttgtcccagtactcaagtgtctaatcttttaacttcatgtctacaggtggcactaaattcatattgtataaagtgaattttagttgcctaaggaatgctctcaccacagcctcacaaagcaccaggactgcaggtataagaaaacatgctcagctagttcctatttctgttcctgtactaattgttttatttgggcttcaatatcttcaattgtaaaataggcataattcttgccttcctttgatcacagaactgtccaacaagataataaataggaaaacacagtgaaaatggatcagcattatatataataatttttattaaggaaaaatctaaggaaatctaagggttatatgttcagtaggatggtagggaaaagttgcatctgtcttccagtttggcgaaggaggtgccttataaggaaatactctaataaagggcagagtagggaaagcacatgccttgaactcaggtaggtctgattcaaaagccgttgctttttattctgcatatagttggaatatttaaaataaaaatagaatatcctgagggtttttattttaaagtttatgttcttggtataaggtaggcacactaaccctttgagggtagtaggaatacattaaaggaactggcaaggatttgttcaccctccattcaaagcagcatgaacacaccaccaggcccctaagtgtccttttcttttcaattgtgagtgattccttcctttggaggtgaagaagagtgatactggaagaaatgggatatgtcctgtttaatcaggagtgtcctaatagttttaaatcagtttgatatgtctattttaagatggaaaaaaaaatcgctgcctttcagcgaacatttccaaatcatcaaagactgcctgcttcactttatacttattaggaagggatattttaacaaatgactcttcataagtaaaagttgcaacatcaatcacatgtgaggcaggtgttaggggcagcactgtccccgttgctgccaaaaagtgtaaataaaaaagagaaatcaacctttcctatccattcatccaaatgctgcccctgcaaagcatcggaggggtctgggtccctggtagagggtcctcaaaggtacgggctttcagaatgtgcacgaaaaggaaggtcaacgtgcccttccgcaacactctgaaaaatccccaagaattctgactttgccccagtgtacagcagttgccgagcctctttcccgccatcccccgggaagagaaggcggccgcctacagacgctgctccggtccgaccctccggggtcgcaccagcccagcctgggcttgctcgcaggtggcgcggtcagccagctcggtccccctgcgggccacgactggcgaagggctgctggagccggagctgcaccagacaggcggggactcagccaaacggagagaacgtctggcaaggggtcgcggccaagcgggcagctgggggaggtcctgcgtgttggccccaagctggcagtgagagacaccacccagcgtcggggccgtgcaaccccacgtgggccctggcttgcttgcagcgccgtcaccctcctccccaagtccggcagcgctcacctcagcgcttgcggcgcctccaccttcagctttttgggcttcggctcctcctcagcagctgccatcttcgcgctcccaccccactttggctctacagcccacctctgccatccactctctggtcccgccccctcttcgcatcaccgctttctcttctccaaatcccgcccctccagactccgcccattctgtgccgctgtcatccacaatcattggctctatccgtcggcaccaacagcgaatgccccgcccattcctgaccccgcctcccctaccatgagggaccccagactgcgttaggcagcagatgaccgcctgaatctagatggagagaaacccaccatttttctaggccctggattatgtagaagatttagatactaagcctcaagagacgtctttcctctcatttacggtcttcctgcatatttaaaatttctaatacggtagacagagtcggtgtctttgaagctgttaatcaggcaatttcctgggcactccagctgcgggtcct

SEQ ID NO: 5373 - DNA, 2300 bp, Homo sapien
tggattatctatcaacattttccacaagagaaggtgggtaactctagccagtgtctccaccactgtgaattgctaatccagctgctgctttgcttcagatcctgtttaatccagaggaacaattgactaattctgcttgtggaccttcggtcaaagtcttaaccacgccaagtatagctcagtgttttaacagcttttactcatggactgaacacatcagttttatagaccatggcttcattctggataggcatttcccaggttaaagagaacagtgctaaaaatagcattttctaaagaaacttgaaatcttctggaatatttgatgtgttttatggctagcaagaaaacagatttgtataaactggcttccttactaatttcattttgtgaacttaattattctatcacagggacagtgataggtaaagctaacttagactagagcagcactgttctgtagaaatataatgcaagattcctgtaattttaaattttctagtagccacattaaaaaaggtaaaaaagaggccaggagtgttggctcacgcctggaaggctgaggcgggcagatcgcttgaggccaggagtttgagaccagcctggccaacatggtgaaactccgtttctaccaaaaatacaaaaaaatttagccaggtacggtggcgcatgcctgtagtcccagctactcgggagcctgaggcacaagaatcgcttgaacccaggaggcagaggttggagatcgcaccactgcactccaacctgggcgacagaacaagactccagctcaaaaaaaaaaaaaaagtgaaatgtagtccaactaaaacaatacaattgtgtttagtggaaaaatatattgcttcagttataaaatttaaatgaattaaaattaaataaattaaaaattaagttcttcagtcccatcagccacatttcaatatcggatggtattggttgcttctgatataactgatttcagacatatgaaattgatcaccatcctagatggtcagtaagttaatgccacaggatattgtagtctattaataacattgtagaacagggcccagtcgttcacacctatattcccagtgctttgggaggccaaggtgggagggttgcttgaggctaggagttcaagaccagcctgggcaacatagtgagaccctgtctctacaaaaataaaaaaatgaaaattaaaaaaattattgcacagagaataaaggaataaaagcaatttggatcataaagcatttactgattccccccttttcatagttggagttaattttccttttattggttcacaatttcttaactcttcaactgcattaaactgtaagattagagccaggagttagggtgccatccacttttcccctctatggtcttagattcttttttttttatagcccgcatgcttctttggaaagtgaggtaattgtgtcaaataggatagccttgagtggggcccagaggttgtaaaattttatgtctgtacctgattcacctggtaacttgctaaaaataccgatgtccaggcctacctttctagattcggatacataaagtgacactttccatattaaataagctgctctaagtgtttctgaagttcaggaacgtttgggaccatcagatccagcaattgactctcaaaggctgcggactggaattagtacgtcgtgctgccgttgccaggcattttatattttcctaggctgaggcttcccaggctgttgctttttttccccccacctttgcagatggattttgcaggctgttaaatcccactcccgaagacctgccctgacagcgcctctttcctaagtgctgttacagggagctgagcttgccgaggtagacagtggccacgtgactgctaaaccggttgccagaggcgcggccatttttggggcgggcacccaatctctcgccctgtaaactgcggggtgacgggacgctgttactaggactcaagatggccaccgcgcccgctagtcatctcgctagcccgcgcgccagtgagctggcacgagacacgcggtggcccacggcgtctggggacgatctccagcccttcgcacggggcggagcgcccgccttccctccaatcagcacgccgggccggctagccaggggccgcccgcgcgcggggtgtgtgaggacgcgctcccagtcgctgagtgcctgagccgggaagcagttgctgtggtacctgctgctgcccgagcggacgtagagcatcggacgcgggcgccgtggcgctgggcaggagggcgaagccatgacgtcagtca

SEQ ID NO: 5374 - DNA, 2300 bp, Homo sapien
ctagatgttttcagccatctttgatccccaggttgctcaccaactcttattatcctttgaaatgactctcaaatcttacccctctttttgacttttatgtttgttgccctcatcttcatcttttttttttttttaatgagacggagtttcgctcttgttttctttctttcttttttttttttttttgagacagagtctcgctcttgcccaggctggagtgcagtggcgccatctctgctcactgcaagatccgcctcctgagttcacgccattctcctgcctcagcctcctgagtagctgggactacaggtgcccgccaccacgcctggctaattttttgtatttttagtagagatggggtttcaccgtgttagcctggatagtcttgatctcctgaccttgtgatccgcctgcctaggcctcccaaagtgctgggattacaggcatgagccactgcgcccagctcgctcttgttttcttgttgcccaggctggagtgcaatggtttgatcttggctcactgcaacctccgcctcctgcgttcaagagattctcctgcttcagccttctgagtagttggcattacaggcgtgtgccaccatgcccggctaattttttgtatttttagtagagacagggtttctccatgttggccaggctggtctcgaactcccgaactcaggtgatccgccagtcttggcctcccaaagtgctaggattacaggcatgagccaccacgcctggcaaattctattttttttttttttttttgagacggaattttgctcttgctgcctaggctgtgcaatggcacgatctcggctcaccgtggcctctccctcccaggttcaagtgagtctcctgcctcagcctcccaagtagctgggattacagacgtgtgtcaccatgcccggctaattttgtatttttagtagagacggggtttctccacgttggtcaggctggcctggaactcccaacctcagatgatctgtctgcttcggcctcgccaagtgctgggattacaggcgtgagccactgctcccagcccttcatctcttacattaggtgccatagcactcacctctgtggctctgtttcttctatcccaacagcacatgagggattgggtccccttccatctctccaactccctactcctactaccacataaattaacagaaactccctttagtagtaattctcaaatgaggtgccaaatcttggtctgtatggaatgtgtatttggttttaaaaaaattctaaaagtgattctcttctgaggtcctaaagggtcttttgcaggacttcctcaaattcgtcttttacaatgctataggagtcatctttgtcaaacatagatttactcattttacaactgtgtaacaacttattttttgccaagtattgggatagctactggagttagtaaagtgaatattagggtgcttacttttgagaaaaatgctaataatatagtatagccatcatttactggaacttttttaagtgctaggcacttcatgtatttatccttataatagtccttcagtgtagatattattagccactgtacagatgagcagccattctcagaattctgaggactcacatagtaattcattaggcaagtgataagctttatgataaatacttgaaagggacctctaagagcatagaggagggatatctagtttagagttggaagattaacagaataggcttcacagagaagatgatgtattaagctgagtatttaaagacaagtaggaacttagacaaaatgatagattggaaaatgagtgtgtggcatggttatatttgtgaatagtctttgtacagagatataagagaagcattttatgagaacacctggtgctcacttaggcaacacatatactaaagttggagaacagctcaatatgactgaagcatagtatgtgagatggggaatttagagtggtttagatataaagacattaaactaggttgtattttatatatttatacatctatatctatatatctatatctatatgcatctgtggtcccagctactaaggaggctgaggtgggaggatcgcctgagcctgggagatcaaggctccactgagccgagattgcaccattgcactccagcctgggtgacagagtgagaccctgtctcaaacaaaacaaaacaaaacaaaaacccagttagactgctggaatagtccaaataagaaatcaggaggccttgaaacgtgtcagtgggattaaagaggagagaggtggaattgaaggttatctggtaggtgcaat

SEQ ID NO: 5375 - DNA, 2300 bp, Homo sapien
tggttcttttgcaaagccatagttctcctccccctctcaaagaaatggcgcctgggagggaaacttcgtgctcaaactctctaggagccatttctcagcccacctttcctattttctgaagtctcccttgccagcatcccattcacctccggaaagaaccaggggcgctctcttcagagtccagagagctctgggaggcatgtgggcagcgtcagagtggcctcgcctgggcggccagaggagcccccagtctccctcaagtgggcctcaggaactcggggggcccaggggaagcctggaaaaccgaacttcgccatcagccttccttacagcgctggctaaaagagagggggggaagggccccccagcggtcttccccgcccccctcccgcctcagcccctctgccatccgcctgcaccgcccaagaaagcacccagaacgcggctgagctcgccagctcctcgcaggcagggagagagcatcctggggggcagcttccccctccagcccgcgtctgacatccccactcccacacaaggatgccgccgccgtgccctgtccgcagtcgctgaatgtcactgctccctcttcctcccgatcagggtagacacagctcccgaggcgtcccccaccccaaaactgccgcgatcgcccgaaggcgcaaagcctgggcgaaggacgaagtttggggcccacagcgacgggagtggggacgcgttggcgaggaccgcacctcagtcccagccctggcgggcacactccccgccccaaacggcccaggcgtccccatcctcccgcggacaccagcgtctccgccctcccccgagggcggcgagaggagccccccggggcggaggcaggtacccccggggcggagactggggcgggcggggtccgggctgcgcccccggccaggccgggcgggctggcgggcggcgcggggggagcggggctgggcggcgctgcctcgggctctgtgcgctgcagcccggagccgaggaggaggaggcggaggaggagaaggaggcggcggcggtgggtcccgggcggggggagcgcggcgctgcggacccgggcggctggcaaaggacgaggcggaggctgaggaaggcagcggggagacccaggctgcagcaacaaagggcagcgagcgattggccgggctgcaggcgaggttagccggggacccgggtggccggaggcagcggcgagcggtgcacgtgcttgcagacacgggcgagtgtggagccggggggtgcacgcccggtgggtaggggcttgctcccccgaggcatgggatggcgaggaggctgcagcgacatcgttctgcctgcacccggcctggggctggcagggtaggggtgtgttggggggggaaggatgcgagccagggggcgggcgagtagtcgcccgggacgggacgggacgggagagagggtggaggagggggcgggatggaacgctccgggcggcgcgcccgtccgcacactccaccgaaggagctggcgactgagaacctcgaattttaacttcgcgtgcccgcccgcgcgcgcccgcccgcgcccacccctaaatcctgcggccgccgccagcgatcagctctcacacaaactttagctgcgggctagggggtttggggttgagtgggggaggggagagggaaaaggcctcctgattggcgtcgtctgcagccaataaggctacgctcctctgctgcgagtagacccaatcctttcctagaggtggagggggcgggtaggtggaagtagaggtggcgcggtatctaggagagagaaaaagggctggaccaataggtgcccggaagaggcggacccagcggtctgttgattggtattggcagtggaccctcccccggggtggtgccggagggggggatgatgggtcgaggggtgtgtttatgtggaagcgagatgaccggcaggaacctgccccaatgggctgcagagtggttagtgagtgggtgacagacagacccgtaggccaacgggtggccttaagtgtctttggtctcctccaatggagcagcggcggggcgggaccgcgactcgggtttaatgagactccattgggctgtaatcagtgtcatgtcggattcatgtcaacgacaacaacagggggacacaaaatggcggcggcttagctcctacccctggcggcggcggcagcggtggcggaggcgacggcacctcctccaggcggcagccgcagtttctcaggcagcggcagcgcccccggcaggcgcggtggcggtggcgcgcagccaggtctgtcacccacc

SEQ ID NO: 5376 - DNA, 2300 bp, Homo sapien
atccaggatttgaaagataagaaatatcaccatatggatggcgtttcatgttgtcagacaacagatatttgttaaccaaggacactattttgagcaactctgccaataacctgagctgggtgctgatagaagaaaaataagtcaaggtcccttcccctaaacagttctgttctgtttcggaagatactgcttagatttgtggatgctcactcagttacacaatgggctttgaaaaaatccaggttttccaacagtgatccctttggggaaaaaaaagaaagaaaaagccaggacttatgaaagtaaaatagttaaaaataactgttagcaagtaaaactcaggatgacaaaagtgtaaactctattattaatctttgtttttttctaccactgttttttgcctcatccataatctcatgacttgagtgttatgacattgattttgaaacaacacacacagctttagtaaaagcttagaggaggcctcgcataatacttatgatccaggatattttgactcttcttatgctgacatgaatatttctgaatagtgttgatgtttatgtaataccagtgaagctaaaagctcagtgctggactaagcatttctctagatatgtttagaatatttgtaatgaatgatgtaaatagtgttatattataagaccgtatgatacaaccatataatttactgatattttgtagttaaaaataaaatgattcacaaccttagaaaatagaataatttaatttgatgtagcacaaatccccagaattaatttaggatgatttgctacctttttgatagccttttagtccaaccttcaagtttttatagaaaaaaaatgaaaagagaataatgattttagggttttcgcttgtgatagaatgtcctatctacatgtgaagcaaatccccatgctctgaaaaagagaaatagtgtggataattccaaatcaggaaaaaaaaaatcatttctatttggcttttgaatgaattatgcatttttttttcctgtggatttgtctttccagttagatactgcttaggctaaaatgaaattggttttcaatctattctcttgcttatatgaatttacagtggggccagtgggatgttggaaacaaatcagcctaagattaaaaaatttgcggtggataatatacaaagtggataatatacatgtgtttagttgagaattggctacagataagagacttctgattttgttcctctcctagctgtgtattttttttttttttttgaacactgtgattctgcttgtagcaaagagctgctgagttacatctgcttctgcctaattaactctgttggttggtgtcagatgagagctaattttgagattaaatcgaggagtggggtgtgtgtcgtggctgggggaggggagaaggaggatccaaggttgcttgattgttttacgtaagatcaaaatgcagttattcacaattgttcttttaaatttattttttgcttttcaagtaaaaataatcactgctgtcctaaaatgtgacttgtgtcaatacatatttactattatgtaaactggtacgtttttcttgtaggtgagcttattggtcatatctgggtagtccattcagtacctaggtgcctggtggcctttgggacaaacagcgaatgctgcccaggaatgtgaatgctgaccttaaaacaacttttgactgtctttttttctgataaatgttatatctgtttggctatttgagtagtagtgggtttttgtttttgttttgtttttccatgatgagattttttcttaggaatctatcacaaacctgatttttaaaatttgaacaggtctgggcttagggatgaaatttacttctataggcacttggctgggtccttggggcttcattttctgtctcaagtttcatatttataagaatccttcagtggtctaaaagaattattatatcaccaaatgtagtataataactcattggagctgtttgtcttgaatggttgtggagatacacggatggttgctgaatttaaggatgtccttatgtccaaatgaacatttccttttttcttttggcagatttgcctgaagacctggataatctccatttttgtcatggactgttaaaacgtttgaagttccaattctggtactttcccttattttattacatttttaaggtataaaatgacaatcttattgaaatgtgttggtaatggatataaacaattgttttatggatataaatgattgtgggtaaagatttgtgggctgggtgcagtggctcacgcctgta

SEQ ID NO: 5377 - DNA, 2300 bp, Homo sapien
tttgtggccaactgcgcattactgaatctcctcagatcttagtagcccagtgatgtctctagatagaccatatcatctccaatggtacagaaagtaaagaattgactttgtttttaggtaactgctcacccagatctgatatctttgtcttcagtatctatctgggacatagaggagagccaagactgatagagatatcacaatacaagctaaggctccgccccaaggccatctgatgtggcatctgttagggaacttgctgttctaactcccagctcagcgctcttctaggcctggcagtcttctggaagggtctccatggggaggtggtagaaaggagcatcccacaaagtagacttcaggcttaagaataatgtttccatttcttaggaggagtgtgtattcatgtgttgtatatataataaaagaaatttgttctaaaactatcaaaaaccagaatcatccaaggcatgatctgaactggactcaacctgaagaaaaccagttctctaccttggcttccctcatattagggaaaattctcatggattaaagagggcaggcagactggggggaataataaccgtaaatgtttaattacagaatatgattaactggctacgtgtgtgcttcagtgagcattcagagcgttaacaaaagtaagacacaagaattcttggaggccggacacagtggctcacgcctataatccccacactttgggaagctgaggcaggaggatcatttgagctcaggagttcaagaccagcctgggcaacaaagcaagactctgtctctataaaaaataaataagtatttttaaaataataataataataattgaatacagtttacctgaaggttagcttttaaccaagcatattgaacccttctttgcagtgtattttcaataatttggggggcaacaattacatcttagcagcaaatctacctgctattcctctatttgaattttgtgtcattaaaaacttttttgctgggcgaaaaacattttataattacaattatggacagtcatttgtgccaacctttagtgcaaacagaaaaaatatttttaggccaggtgcggtggctcacacctataatcccagcactctgggaggccaaggcgggtggaccacttgagctcaggggttcgagaccagcctaggcaacatggcaaagccctgtctctacaaaaaagaaaaataaaagaaaaaaatatttttatatcatacaaataagacatctggcatgtctttaacatttttagattccttctattaaaatattttgccaggttatcagttgctcacatctcagcagccaccaatacttgactttgttaacattttaaacagtaatcctttcttcaggtacctttcctttccttttcatagccctgaagtcctatggaatgagaaaaagtaggctggtcttgtatcatatttcccagtgctgtccacatagtgggtgctccttcaagagttctcaagtattaaatgggttaacccagtggctagttaattacagcaccatttataaagacattagagtctgtgatgaccttaaatgtctgtgatgtgaggaatattgaagccagcaagtaccattggaaaaatatatgctagaaaagcaaagcttagtttttaaaatctccagtcaagctgctaggatgttccctctcagagcatctgcttgagtaaacaactgttttatttggaaaacacttgcctgtgtagttggagcccgagagggatgttagacatcaaatggaaggttaagtacaaaggcattacagaagtcaccacgtgtaagattctcagacacgcgttcagtacatgtctactgcatatcgactcaaccatttaatttctcatgagctcttatgtgttatgtttggaattaatttcagaggccttttgtactaaagaagaaaaggggtcgtaaacgcaggaggatcaacagcagtgtaacaacagagaccatttcagagacgacagaagtactgaatgagccctttgacaactcagatgaagagaggccaatgccacagctggagcctacctgtgagattgaagtggaggaagatggcaggaagccagtcctgagaaaagcattccagcatcagcctgggaagaaaagacaaacagaggaagaggaaggaaaagacaatcattgcttcaagaatgctgacccttgtagaagtaagtagaggaatgataaaaaccttacccttgagaatgtctgtatctgactgggtgccaaagagcaggcctctggcgtgatgcccagaggca

SEQ ID NO: 5378 - DNA, 2300 bp, Homo sapien
tcaacccagtagtatatagtttgtaaaagagagaagcaatacatgcagattcttctcctttatctatccatcttcaaaataaggagctggttcccaaacatcttccaaccgtgcataataagttttgggtttttttttttttttttataaggtctcactgtgttgcccaggagagcagtgatatgatcttggctcactatagcctcagcctcctgggctccagtggtcctcccacctcagcctcagcctcctgagtagctgggactacaggcatgcaccaccacacccagctaatttttgcatttttttgtagagatgggttttgtcatgttgctcaggctggtcttgaactcctgggctcatgcaatctgcccacctcagcctcccagagtgctgggattacaggcataagccactgctcccggactgttttcagtattattattattattttgagatggagtttcactcttgttgcccaggctggagtgcagtggtgcgatctcagctcactgcaacctctgcctcctaggttcaagcgattctcctgcctcagcctcccaagtagctgggattacaggcacccgccactacacccggctaattttttgtatttttagtagagatggggtttcgccatgttaggcagtctggtcttgaactcctgacctcaggtgatctgcccgcctcggcctcccaaagtgctgggattacaggcatgagccaccgcgcctggccttcagtattattatgacctaagtgtttgatgtgttttgatccactggaattatttttatttttcatgttcaaattgttccagttttgataagtggaagcttcttcaagttgtattctgagtccctttgacatgttcctaatggtctttgaagccatgaaccctttcctacattctctgcatccccggcctgcccctcctcacactgcacctcccatctccctccccctgacactaagaccctgtgctacagacagcctcaattcatgatcctccttatctgtaaaatggggctaatgatagggtattaggataaccctatctcagtgttgttaagattaaatgggcttacaatcatcaagcacttggaatagtgtctggcacacaataggtgttatataagtatttgtcaaataaataaacaaatagcattcacctccatggttctcagtcttcccaccttttcctccttctctccagtctcctttcccaggctgaccataggtgcatcatttactcagctcaggaaacaatcaatgtccaattccactgcaaattcctctccttggggacaatggaaagtcctctcccacattccactggcagagcctaacaagctctccaaatgcacatttcagtctcgaggcacagctttctatcttggggcatctcttccaatccccttggtaagttaacacagtgatggccaggctcccagtgtgagagtgtgagcattgccttcagctcttctgacaggttaaccctcatgcagccaggtttcctcccctctcaaggcttctgaagtcctgctgatgtgcgtgtggcccagacccaggcccgggcaggtatggccttggcgatgtactctttccactggctgacggctccctgcagacactgagagggccacaggcctggaatgtcaggaatcttctgggccttcctattttgggtcccaaatggcccaaaccagtaggtttcagtcagataaaggaaaaagtaggaaccaaaggagtaaagtctaaagaaaggtgggaaggaactggctgcttgcaggatttcttagctccagagcccgccttggcccacgtccaaggaccccagctctccttctctagaaagattggaacattggggaagtgtcatttaactgccatcatggccttccttgtttacctgtgtggcctgggaagaggaagccggggcatagcaggttggggaaactctttccaaattttaagataagcttattcccacctctttttgtaaagcctattccctgcctcagtgtcccctgctaacccccatcctgcttctctctcataaccagctgcagaaaggagagaaaatcccttggctctaaaatgacatctggagaagtgaagacaagcctcaagaatgcctactcatctgccaagaggctgtcgccgaagatggaggaggaaggggaggaggaggactactgcacccctggagcctttgagctggagcggctcttctggaagggcagtccccagtacacccacgtcaacgaggtctggcccaagctctacattggcgatga

SEQ ID NO: 5379 - DNA, 2300 bp, Homo sapien
tattacctgctccataaaggcactgtgaggattcaatgagaaaatgtgagcacctagctctgtctggcacatagtacatccttgatgagtgctaaatataacaattattgctggacagagaaagaaatatcaagaaatacagagatagagaagaaatctcactgtcccgtagggaagttaccctccacataggatatggctggggctggaaagggtaagagtaattatagtagtgataataatagtaagacgtgccatttattgggcatctaccataagacagaccctgtgggaggtgctttacattaattattacatggaattctcacagcagccccactgaagaaactggcttggtgaagacaagaccacatagctgcaagtaccagacctgagatttctacccaggtctgccctccccaagaccctcaggctgagcacagagacccacagctgttccccactggcagccacacgccacccttctgcaggccttctccccacactcctcactggtcctgccctgagatctccagccccacatggcctgtggccacacttctgtctggcctccctggagtggagtcagaaaggatgggcaggaagaaagtccaggggactatctgaaactgcagctgagaggtggatggcaaacagctgccccctgccccaaggaagcctgtgcctctgcccgatgtcttgggcacacagagcagcgtcatgggaggctgcaaaggcacatgagcttcctgggggaggatgggagacagaggcaaacgggggagtgacccagggaggagagatgcaaacacagaaaagaagtgcatggacttgcaaacagcagcagcacaggagcagccaggaaaagccctgcctacagaggcagctgctctgctgagcgggggaggcaggaagggggcgaggaggagcacgggatcagggagagaaggaagactgcagggagtgggaggggagctcggccgggccctggccctgctggacgttgggcctgtgcttcacccagctggggacaaggagacatggaatgtagtgtcaggcagggccctccgaagaccaagtctcaggtgtcagaaaccggcggagctgccacaaccaccgacttcccctccttgggagggactggggcttaaaggacgagtccctgggggggtggccgggcctgactctgactgatgggatgggctgggtcccagtgggttagagtggacaggtggggcaacaccctgagcatcgggagcaaggcattaggtggagcctgaccaggcatagcgctaagtccaggggagagccccgttcttcagacctgggcctaggtcccctcggaggcagaggcatgcactgtggcctaccagcccccaaatccttgacccctctggagcctcctgggggtggagcctggctgcctgctccctggcaaggctgggctgtgacacacccattggccaccagggggcagcctcaccccatgccaagctccgcaggcctgagcccggagcctgtcccacttcccaaagccccatctcctgcctggggtggtgcagccccacctgatggctccagaccagtgtggctgttggactcctctgggtcctgggggcttccccaactccaccacactacactgccctctgccctgcagtgaccgcatatccagacactcctctctcattctcgggtcagacccccagagcatcctgaaaattaagtccagcatccctagcatgggaagataaactgtggtccagatgggagcaaagacttgctcgtggccacagaatgagttatggcagagtgctgggggagccaggctctcctccctgcctcagaagttctcttcccacctcttcaggtagactcccatcttcatggaggtttatggaaccaacggtcttcaatcccaaacagataccaagcagagaggaggcctgggggtttagagggaccggagggcccactgcagtccacaaggcctcagtcggctctcaggccccaccccccatgggcgccccagccagcacctggaattctagccgcttcacagtgtttgtgttctgggcagaacctgcccagccctgttccgctcaggcagagtcctgcccctgcacccactcccccattcccggccccaggccatgccccaggtaggtggcaggccactcagccacctggagaggtcacagtgggggatgaggaggacagcttggtcttcacttccgccttgcccgacagcctcccactgggtgagcctggccaagccggcagcctcctgggtgcctgtt

SEQ ID NO: 5380 - DNA, 2300 bp, Homo sapien
agcggagccggggcggggcctgtgggatcagtaaatggggttagggcctagaaggaggtaatccgaattcctctggagagagccagctcttctccaatagccagcccccaatgatcattgttataatttattgcccatttactctttgacagtgtctatgccaaacgccatataaacatctcatttaatccttgtgctaaggccgggagcggaggctcacgtctgtaatcccagcactttgggaggctgaggcgggatcacctgaggtcaggagttcgagaccagcctggccagcatggggaaacctcgtctgtactaaaaatacaaaaattagccgggcgtggtggtgcatacctgtaatcccagctactcgggaggctgaggcaggagaatcgcttgaacccgggaaatggaggttgcaatgagccgagatcacgccatggcactccagcctgggcgacaagagcaaactccatctcaaaaaaaaaatcctagtgctaattctgcaagggggatcctatagcacagaaaagtaaagaaacatactgcctgacatattgcaaactgatattccaacccaaatctctctaacatcagatcctgtattttcctcactccaccatgctgcaccaccctgagggaaggtctcctcccaagccaggtctagcattggcataaaccaagtccaaacccagctgtaacctggacacgagcccctccttggtcttgcctccccacacagtgccgggccgacttcaatggttctgaatgggatagacatgagtgtagactgcttccatgggatgccctggtgtggcctttcccttcaaactggtcttaaggccaagggcagctgggaacctccccactgcagctcatacccttcccagctccattagggccactgagaagtcacatgagagagggtgagacatctcatctctcttgctgataaccagctctggcagaaggacaggttgacctttctcagtttctattttgggacccaaagcccttataggcagaggaatctccctcccactgtttctgatgacagttagcccctttggctctcaaagtctagggcaacactcacctcccgtctccccatttgacatacaaggccctcttcagccttctcttctgagaagttagccatcttcactacaggaccattgttcaaaccttgccccattggcccggcacggcggctcacacctgtaatcccagtactttgggaggccgaggcaggctgatcacttgaggtaggagttcaagaccagtcagaccaacatggcaaaaccccatctctactaaaaacacaaaaattagtgtggcatggtggcacatgcctgtaatcctagctactcaggaagctaaagcaggagaatcacttgaacctgggaggtggtagtggcagtgagccaagatgatgccactgcactccagcctgggtgacagagtgagaccctgtctaaacaaaacaaaacaaaaaaaaacaccttccccctccccccatgaatcttgtgggcaccctttaaaggaagctctccatgtctcttacccatatttctctgactctacaactcagaaaactgtccctgacctccgtaattcagagactcatccaacagacatccaatccagctcctgcccaatttgtggcccacctagactgtacacttctttcagttctttctatcattcatccttggaaccagccacctcctctgcaccctggatctctactttaactcagtcctcagaacctaatagccttaggcagggctctacatctactaattccacagatgtttctaagcacctactatgtgtcagacccagcatgtcctttgtttcatctaatcctcaaattctctgaggtaggtgtgattatccttactttacagatgaagaaactgaggttcagggtggtagctgacttgcagaggtctctctgattctgtgttctcatggagtttgggggtggggggaggcttggggaggaaaaggtcttgtccactccagaggcccctgtgacttgctgagtcacttgcttctgtcacctgtccctgtcaatctctgggaaggagaaatgacactggagaggcagagaggagtgaccacagaggcagaggggtgggcgggctggcccatggctgagacctctctcccagagctggggggagaggacaaagccacgccttgccccagcatcctggagctggaggagctcctgcgggcagggaagtcttcttgcagccgtgtggacgaagtttggcccaaccttttcataggag

SEQ ID NO: 5381 - DNA, 2300 bp, Homo sapien
ggctattaggttctgaggactgagttaaagtagagatccagggtgcagaggaggtggctggttccaaggatgaatgatagaaagaactgaaagaagtgtacagtctaggtgggccacaaattgggcaggagctggattggatgtctgttggatgagtctctgaattacggaggtcagggacagttttctgagttgtagagtcagagaaatatgggtaagagacatggagagcttcctttaaagggtgcccacaagattcatggggggagggggaaggtgtttttttttgttttgttttgtttagacagggtctcactctgtcacccaggctggagtgcagtggcatcatcttggctcactgccactaccacctcccaggttcaagtgattctcctgctttagcttcctgagtagctaggattacaggcatgtgccaccatgccacactaatttttgtgtttttagtagagatggggttttgccatgttggtctgactggtcttgaactcctacctcaagtgatcagcctgcctcggcctcccaaagtactgggattacaggtgtgagccgccgtgccgggccaatggggcaaggtttgaacaatggtcctgtagtgaagatggctaacttctcagaagagaaggctgaagagggccttgtatgtcaaatggggagacgggaggtgagtgttgccctagactttgagagccaaaggggctaactgtcatcagaaacagtgggagggagattcctctgcctataagggctttgggtcccaaaatagaaactgagaaaggtcaacctgtccttctgccagagctggttatcagcaagagagatgagatgtctcaccctctctcatgtgacttctcagtggccctaatggagctgggaagggtatgagctgcagtggggaggttcccagctgcccttggccttaagaccagtttgaagggaaaggccacaccagggcatcccatggaagcagtctacactcatgtctatcccattcagaaccattgaagtcggcccggcactgtgtggggaggcaagaccaaggaggggctcgtgtccaggttacagctgggtttggacttggtttatgccaatgctagacctggcttgggaggagaccttccctcagggtggtgcagcatggtggagtgaggaaaatacaggatctgatgttagagagatttgggttggaatatcagtttgcaatatgtcaggcagtatgtttctttacttttctgtgctataggatcccccttgcagaattagcactaggattttttttttgagatggagtttgctcttgtcgcccaggctggagtgccatggcgtgatctcggctcattgcaacctccatttcccgggttcaagcgattctcctgcctcagcctcccgagtagctgggattacaggtatgcaccaccacgcccggctaatttttgtatttttagtacagacgaggtttccccatgctggccaggctggtctcgaactcctgacctcaggtgatcccgcctcagcctcccaaagtgctgggattacagacgtgagcctccgctcccggccttagcacaaggattaaatgagatgtttatatggcgtttggcatagacactgtcaaagagtaaatgggcaataaattataacaatgatcattgggggctggctattggagaagagctggctctctccagaggaattcggattacctccttctaggccctaaccccatttactgatcccacaggccccgccccggctccgctagccccgcttcctcctgtcgctttggcctccggcatgacgcatgcgccctcgggctcctccgcggcagcatctcggttctcctctcgggcccatctggagcctcgcgtcttttccagtgtgggccccgccccctgccggtagaaccccgtccccggccggtagggccccgcctcccgaagcagttccggttcggctccgagcagctgccggcgcggcggtgacggcggccgggacgatgcctgcgcgcagtcgccaccgcccccgcctccactccggctccccgccccgggctccgcccccgccgcttgaggcgcttcactccggcgaggcggggagggccccggactccgacggcggctcggacgccgactcggaggtgggtccggggagcccgactcggaccgcggaggtgagcgggagctgaggctgaggagaggggagcttggggggcgcctgctgccaagggtgagtggggagtctgggatggagccgggggctgccgagggaccgcgacctggagg

SEQ ID NO: 5382 - DNA, 2300 bp, Homo sapien
catttgtcattttatagattaaaaaaatgaggtaggccgagcgcggtggctcacacctgtaatcccagcactttgggaggccgagactggcagatcacgaggtcaggagatcgagaccatcctggctaacatggtgaaaccccgactctactaaaaatacaaaaaattagccgggcgtggtggcaggcacctgtggtctcagctactcgggaggctgaggcaggagaatggcgtgaacccggaaggtggagattgcagtgagccgagatcgcgccactgcactccagtctgggcgacagagcgagactccgtctcaaaaaaaaaagaagaaaacccaaaaaaaccactgaggtctaccggcgacattattggatagatgactgctttgggagttccagttgaacccatttctatttcattagactgctcattttttctttttcctttggctctgttaaaagaaaaaattacaaagaatttagtttaaacatcttaactggcttttagttccaattctacaattgggcaacgcttcattctgtaaaatggaatgaatgttccaatgagaagaggaagttggtattacagacagaaaaggaccgaggaaagcagaaacaaaaagtggattagttggtagaaagttacttttcttgtaaaggttaaagaacacgggacttcttcatgccagctaaaactgacctgtttggggatttttgttttgagacagggtcttactccagcgggcaggctggagtgcagtagtggcaccatctaagcttactacagcctcaacctcccaggctcaagcgatcctccctcctcagcctcccaattagctgggactacaggcgccagccaccacgcccggctattttttttttttttttttttttttttggtagaggcagggtattactatgcctaggctggtccggaactcctgagctcaggcgatccgcccacctcggcatccaaaagtgctggtattacaggtgtgagccaccgcgcccagcctgtttggggatctggctagcatctgtttctctcctgatttcttggaaggtcagataaagatcctagctttggcgtggtagtgtgaaacttcagcatgagtaaccccattttggtttggtctgatgggcctaatgcaggaggtcagtctaaactaacggtctcccatatacattttatctaatagctctgtcacccttcctgcacacccggggaactcgggtgcggcattctaacgcctgctcagcatgattccacattttctccaggcccataatccagaggaggttgggcccggagcaggcttgcctcgccaagctccggctccgtgcgtgtgtgaagcagtgccatgcctgagtggggaggagccgcggaagagaaagcgtaaggcggcgtggaaatgggtggggcacgctaggacccgctcacatttgttcagggagaggcagtcccaaaaagcctctcaggcacacaacccagcacagcaaggcagtcacaccaaggtgggaaaagagggcagaagagcgcgaggggctggaggtggcgcccctgtgtcccactcgttctccctgggctgggaaagagaagcggtccctcagaagcgcaggctgcgctagcttaggatggacgtgggtaacgctcagctgactccccgcaggcaccctatgcagggctttgtttcgggggggaacccgcaccagcgcgtaaggggagtaggagagatctacgtgaccctggtgcgcagccgcgccctatcgccccggccacgcgccgacgccccgccccgtccgtgacgcgttcgcgcggggcctccgccccatccccctcccaggcggtccccagcgcgctgcctccgccgttccccgccccctcgcctctgaggctgcccggatagctgcctgatccaaggcccagcagcttctgccttccggatccccaccgacggacggaggcagcccacctgcaggaccggggcgctgtcggtccacgtggccgctctggagcaggttggagttggcagcgggctgcgctgcagggacaggcgcggcggacagccccgggggcagcggcggggtcctgtctgggagaggacagggttgcggcgggcggaacggtgtctccttcacttcgccctccagctgctggagctgcagcccgaccgcgagcgtgccaagcggcttcagcagctagcggagcggtggcggcggcccccctcaggacaccaccaggtaccgccgcgcccgcctcacgccgacccaggggcctaggccgcggcggccaagccggag

SEQ ID NO: 5383 - DNA, 2300 bp, Homo sapien
agctcagatcaagaaactgcaagtttctggccttcatcctcagccaagccactctctcattaactactcaacaagctggcctctgggcctcgctcaggttgagcccccgcctgggaagccccccagtggagctcaatgcctagtcagcgttgttaaaatggattcttggccgggtgcggtggctcacgcctgtaatcccagcactttgggaggccgaggcgggcggatcacatggtcaggagttcgagaacagcctggccaatatggtgaaaccccgtctctactaaaagtacaaaaattagccaggcatggtggctggcgcttgtagtcccagctactcaggaggctgaggcaggagaatcgcttgaacctgggaggcggaggttgcagtgagctgagatcgcgccactgggctccagcctggacgacagagcaagactccatctcaaaaaaaaaaaaaaaaaaaaaaaaaggctcttacagcctccaccccaggggacatctgcagtgcagcaggaagataaccggctgcccttcggactttgactccttttaaaggtaacatgacagctcactaagtgccaggattttctcatttggtcccctgtgtaagtcctcagcctggattttctcatttggtcccctaggaggttgggactattcataacgccatttcacagaggcagaagtcgtgaagcttaggccacccgccagctgtgtgtgacctgcatctctgaaaccagcttcactaagaataccaaccagaggccaggcacgggggctcacacctgtaatcccagcactttgggaggctgaggcaggaggatcacttaaagccaggagttcgagaccagcctggacaacatagtaagaccccttctctttaaaaaaaaaatttttttttttaaattagctgggcacagtggtgaccgcctgtggtcccagctacttgggaggctgaggcaagaggattgctgagcctgggagctcgatgctgcaataagcagtaatcttgccactgcacttcagccttgccagagaccttgccaaaaaaaaaaaaaagaacaccaacgccaggcacaatggctcaggcctgtaatcccagcactttggaaggacgaggcaaacagatcacttgaggccaggagtctgacaccagcctggccaaaatagcaaaacccgtctctacaaaaaatacaaaaattagttgggtgtaggggtgcgtgcctgtagtcccagctactccagagtctgaggcaggagaatcgcttgaatcaggaggtggaggttgcagtgagaccagattgtgccactgcactccagcctgggtgacagagcgagactcagtctcaaaaaaaaaaaaaaaaaggacagcgtcagcgtctttcacctcctccggagtttggcgcatggtaggggttcaatcagtgttctctggacagtgtttcaacagaacaaccttgcaagggagcttcaccggctttctccccaagatgtcttcattccaacctaccaacataacagcagctgccacttatgtattgtgctactgtgtgcgaagctgtgggatctggtgccttttatggtaagattgtaggcctcattttacaggaaggaaactgaggctcagagagactggcaggaccaagattagacactcgtatccatctggcccccaaaagcaggattttaacagctaagaatatggtctcagttccacaggcccaccccagggctcctgaaccccaattcgaggctgcatgccctcaaaccagttccctcactccttcagcctgatgctttggggcatcttgtccaggaggccttccccctttaatctctatctcttgtacttgtgactatcttgtaacttacactggcgccctccatacacaattcacatatgcccccaaggggcctcagaataaatggtggcgaggagaaaaaagcattggcaggaggggaatggaggcaggcacctggactgcgggcacaggcgggaaaattcagatctaggcgcttggcctgctccccgcaggggcgcagttcccggcgcggccaccagatcgcgcccggctctctcgggcggggcttgcagtaaggctgtgtggccgccagatgatgcccgagaccgcggctccgcgggtagtgccccgacaaggtggagcccggcgggcccgcgagtccgagacctgtcccaggagctccagctcacgtgacctgtcactgcctcccgccgcctcctgcccgcgccatgacccagccggtgccccggctctccgtgcccgccgcgctggccc

SEQ ID NO: 5384 - DNA, 2300 bp, Homo sapien
gggctgaggccagggctggcacaaagaaaaggatcccttgccaaagtcacacaggaagatactccaaaagaccctcgcccaaagaagagggcggacggggttcccctggagctccctttccctaagggcctggcgttgggctttcgatcctagttccacatgaggtttcatgtaaatgattgtattattattatttttttgcatgggtgaaaagtcacaaattattaacgctgaatttcaaagactgcagtcttctcactctggggtggcatctcttcactgttcaggcacgggcagcctcacagaacggacgtggcccagacctcacttgacctctgagaggccctgaaggcagtcgcccaagggcaggggcaggggacagggcggagggggaggacactgagcggagcggggaaggaagagagaggaggggtggggaaggagaggaggggcggcggggagcccggagagaaagaagggagaccccggagaggaagagggggaggcccgggagggcgcgcggagggggtgtcagcgaggggccgcctgtcagggttctatctgcgcgatgattgatgcgggcccgggtttttctgtcagcctgtcacggcgcaggaatgtttaatgttctcattattggttacgctgttgtgtatatttctctgtcagcaccgcggacccagctgaactggcagagcacttcaaaggcctacgggtcattcatcatccccatgacgctccggcaaatgctcagcttcagccccgcgccagggatttgttatgacttgcgagccgcctgacagacagggctgcggcggccgggaggggacgcgcgggaggcgggctccgggcccttcctgtcacgccgggcccgcgactccgactcggggggcaggcggcacggcgcggggcgggcccgcctgggcgacccccgggaggggtggcaggaggaggcaggggcgcgccccctcatgggccccggggcgccctcacacctctccctgcagtcccgccctcctcctcctggcgggcggcggcctctcccaaagttgtgccgcagacccagaggttgagggggggaaaagcgaaacttgcaaccgtccagggccagggaggggcgggagctgggagcgagagcaggagagtatcggagctttgtttcctttcccaggccgtgacatgattaatcgttttcttctgatctaattttggaacatgaaaaacagcacatttgtcttgaagaaaaatgatgtgccgaactgcgcagatggaaatttcgagcaatgagaaagattaaagtgaaaccccactccttagacctaatcatgagttgtagattattctgtcggcccagccagatggtagctctgattccacagccccttcttatattaatgaatactcgactgttatatttgacttaggtaagtgaaatgtctatcagagctaatggactgccagccagcataacacatgttgtaccgctaagggtccttctgcatttttcatgttttatactaatgtagaacattttgtttcctactgtttttcatcattgtcactgtttgctaaatattttcacatggaaggggggagagagagagacaaagtcaggaggaaaaagaacccccctccaaacttgtgtccaaagctaatttcctcccgttgggcttggctataactctacaagtaaaacagtcaccccgagcaatacgtacaggaactcaatagtaacgtgattaagttcctagtcaacaagactacactcgactgtatgttaacaaacctaattatagccccgtggtaataaattgggccagggccctggctgcacatctctgaggtcatgtctaggagagctgtttgaccctcttgtctcagggaagagaattgtcctggagaggggtccctgtctcagcatggtagaggggctgttttctccctgacctagttgtccagcccctgggaggatgggtggatgccaggaagcatttcagagcggaaggtcatcggcatgagaactgggtattaggatttgctggaggagaccggaagggcagtggcttctgagccattggcccctttcacgttgtgagtggcatcaggatgtctgagaggagagcatggtgtttttgcttcattggatccatgcaggtcttggagggtggtggcccactctttctgggccaagtagagggtggctcagacacccccccttcctccaggcttctcatctgtaactggtgaagcccggaagagcttgttgttcaagaggaaatcttgtgttacttctttatgaa

SEQ ID NO: 5385 - DNA, 2300 bp, Homo sapien
attaataaataggctgggcatagtggctcacgcctgtaatcccagcactttaagaggctaaggtgggagtcacttgaggtcaggagtttgagaccagcctggccaacatggtgaaaccctgtctttactaaaactacaaaaaatttagctgggcatggtggtgcacgtctgtaattttagctactcaggagactgaggtgggagaatcacttgaacccgggaggcagaggttgcaatgagctgagatcaagccacagcactccagcctgggtgacagagcgagactctgtctcaaaaaaaataaaataaaacaaaaagaaaaaagaaaaaagaaaatccccattaaaaaataaaataataacaataacaccaaaaacctttttgaaaacccagctacgttcaccacaccctcctctagctggaacagcatctctggctcccaggcactgttctgctttaaaacttcatcaggcaagagcagccaaggtgagaatccctgcttatagccatctctcactagctgtgtacctcaagccactgtctttccgctgctgagcctcagtctcctcatctgaaaaacgaggtgaagattcttttaagttcaggggtacaagtgcaggtttgttacatgggtaaacttgtgtcatggaggtgtgttgtacagattatttcatcatccaggtattaagtctagtaatggggtgaagattctaatgacctcatggaactgttgtgaagtgtaagtgggatgatacaggatcccatgggctgggcatagcccgtgacagatgtgagcaggtcagcctgggttttccagtcactctaagcaccaccaggctgctagccacattcggtgaggaaccctaagccaatacgtgcagcagaggccagccgatgacctgacaggggataagtcccaccttctgggcaacttttacgagtcttctgtgtaagtactgtgtgctaaccgattgcgctgctggagctgcagccttatgagttttctaaatcacaagaagttcatcacctagtggggcttttttatctgcctttcctcactgcttaaagaccaagcccacatctttccttctcctgtctgctgtcggagcataagtgtgtgccacacgtgaccaggtgtggcagagtcagagcagggggtggcttctgtggaagtaggagtgaaagtgtggaaacaagtgagtgcgtgtgttgacaggcatctgcatttgtgttagttgtgcttactcagaggtccacaggcttgtggcagatttcagaagctggtccttcttcagcagctctctcggaggcacacctccctgatctgcatctatgcggagttacccagcacaaggacaccagggtcgctgtgtcaccaccagaggcacaggtagggggataagattggatggtgggggaaaggcctgggccttatccgccagccctgccactggcctccaggacttagcctcggtttctcaaactgtgtcagggacgagtaaatgggatgagcagcccttggcaaggagtgggcgctaggaaatcatcagtgaaggagggagtgaatgaatgcaggcctgtgtggcgactgcttcagcatggcagacaaggtgacgtatcagagccttgagggtgggagctccccaggttgggaagggacagacacgtgggccaatcctctggacaggaatagagaacgaggaggaaacaagcgcagaagctggagcgggtggagaagagcaggggagacggttcgcagcaggagaaaagaagcgaggagtcacagggaggggcctcctggacaccgctcccaaagccacgcgaaagtggaagcgcggggcctcgggatgcccatccagccggctgcccgcgcgctggccggggttccaggactccttcctgctccgccgggctctgcagcgccgcctggtggacacgcggcgctccgcccgggctccagccgccagccggcgcgccggggatcccgcggctgttcgggaaaaagctggagagagtcggggggcgcgccttggggaggggcatttgtccctccgaggaggctcgcacctcggcctggacacgcagcagatactggcacccacccttcacttaccgcgcgcccggggtgactcggatccgtccaacacgtcggggaatcctttctgtcctcacccccgggcgccccagcgccggaacgctgctgcctctgtgtagctgctcccggaaggagtttcatcaaacttttaaggggctttggttttgggttgtgttgataaaataccaagaaggggcatgaaggc

SEQ ID NO: 5386 - DNA, 2300 bp, Homo sapien
tcccagcgcgtggtgggggctgcgcagcgccagcgtcccagggctgcccggtgcgcccgaggtggggatgtgcatgtggcaagccatggcggccgcggcagcgctggccagagacgacgagctggggtagcccgacagcagtttgtctgtcccgggaaatgccgtatgggtccgcaagtggctcagcagctcttcggacgtggcgaagcgcttgtcgcacggcccgttggccgacacccagttgcagatgtgggggagtgggtcgttagggagcataaagccgtaggggtagagggggtggccggccagggagggcggtgtggcgccagcagccgcggcggccgttagcgaggagtgcacaccgtgcagcgggtgcgtggggtacaccagcgggtatccggacttcagcgccgcagccgcagcagccggatcatgtgcgcaagaagcgctggcggccgccgcccctgccaggtggctagcgcagtggtagctgaggcagtaagggtcccggcacaaactggctgtcatcacggacggcggagacgctccggccaaagggctggagccggccggcttactgcagcccagagacccggccgcggccgccgccagctgcgcccccaccaggctgcccggcttggtggggtcaagtgccacgccgtgtggcaggaactggggcgggtagccggcgtaggccccggccaggctgcctgggtaggtcatacccgcgggaggcagagggaacactgtctggcccggcttgtagggtgacacgggagccaccagcccagagcccaacactgaggaggaggtgggcgcgctggggccggagccggagctggagcccgatgaaccgccgcagtccgagcccagagccttgcctcccgggcccccatccggatgctggttcacatccacattaatcccgccgccgcagctaatccggccgtgtgccagccccgtgggtcccccttcggccgaggcgcccccggtgcccttgccaccgccgcccacgtcggtgtctttcttgtcgtccttgccctccggggcacccccggccgaggacagcatacctcccggcgagcaggccgaggcgctggagctcgggctgcctgtcctgggcgtgaatggctggcaggtggcgctcggtacccggaatcccgacttctccgacgaaacacccccgccgccgcccccgccaccgccaccgcctccaccgccgcctcccggctccttcttatccgagccgggtttggagtacggcttgaaactcgacttgtcctccacgccgatgtcgctcagcttcagggggcccgatttggtgtccttgtcgcccgcagcaccgccgccggcaccgcccgcgccgcccccgttggaggcaaccgaggagagtttggaggagggcgaggggtcgggcttcccgatctgcgaacatgtttgcgccaacagcgccagcgggctcttcttggcatcgagctgcggggtcagacgatggggggggagcgtcacacagagaaagaagtggaaaccctttagaatcctggcttctggggttcaaatgcctctccgcaacagcccacgaagatcctcccagccccaaggcgcaattctaggcggcaccccctcttcaacacccactcacaaacattctcgccgttgggaaaggcagcagattgctccccccgcccaaccaccacccccagcagcatctttcctgccctctctgagcgctaactagatttttaaagagcaaaatgttttggttttcggttcctagacccagaactgtaccccctccccacaaacactccttaattcttcagagtaagggctcgggcggctggcgcctcagaggctgtgtgcacacactggcttctgcggatacgaaggacggcgactttggaaccgtatttcagacctccgcctgccttcggtgccgagtgaaggggcctgggtcggggtaggggctttcatatcgaaaggagaaacaagtattggcagccttgctccctagcatgcacgccccattccacttcctcccccttttccgccctagttttgaggtacggaagcagtagcctcttcccccattcgggagctgaatcactccgacccccccacctccgcccagatcccgagaaaaagaaagccctagggtggcagccagggtagtggtcccagtgcgatccagagagagggtccttacctcgatggggctgaccggcgtggaaggcaggggctgcaggtactcggggtgcaaaatgtggccagttcgtgccgtcagcatcttcagcaccttg

SEQ ID NO: 5387 - DNA, 2300 bp, Homo sapien
gttttgaggtacggaagcagtagcctcttcccccattcgggagctgaatcactccgacccccccacctccgcccagatcccgagaaaaagaaagccctagggtggcagccagggtagtggtcccagtgcgatccagagagagggtccttacctcgatggggctgaccggcgtggaaggcaggggctgcaggtactcggggtgcaaaatgtggccagttcgtgccgtcagcatcttcagcaccttgattggcaggcggttggcctggcgcagggggtcagaggggggcacggcgtgcacaaaaggcttggtgctgccggccggggacgagcctgggccggggccggagctatttccagagagcgcgctggtccaggcagggtctgcaccgccgcctccgcctccgccgccgccgccgccgctgtgcttactgcttcttagggcagaaagcgagggcgctgtgctcatgacccacccgcgcgcatgggagcagcgggggggagggctccgggaggcgcggggcgggctcggggctgcgcgctcgccccgggagcaggagcagcgggaggaggaggagctggcgcggcggccacgggcgcccagcgcgccttctcggcgcctggagccagacgcgagtaatcctgggtggcccgcagcggagccgtggccgggctagaggagccggctggactgcgggagtgccgggcggctcgcggtgtccgcctcgggctgctcccctgcgctgcgttctcgcggccccgcgccggcgctgcgctctgcgatgcgagccgctgcgtgtccagccggggctctggcgaggaaactcacttcaaaagcagctgcaccaagggggagattaaagcctttgccgccttccaatcaaatgggagcccgaggtgattggagggtcaaggggatgtgacgcgtcccgcgccgccgccgccgccgctgccaggactctcagtgccggttttaatgggcagctccctcttcgccgcccccctgtgtgtcccctccctcgatttcgctgggaggacgagatggacatttattctacgtttgccatccgccgcctccctcttttttcctcctcgtcgttcttcctttccccagctcgaaaataaactgaaaccttcttttgaaggggggtgcgcgtgaggaacagactgcggggggtgtccagaaggagcaccggtgggagtgtggacaccggccggactgtcaactccaggggcgaagggaacctgcacacccagtgttttttccttcgcagtaatcgagatcccgcgcggcgcagcgcagccaccagggtaagaaggcaaggtggggagccggagctggaagaagcccgcccgcccgctctaatttcctcagattccgcggcggagaaaccagaagctagatgggcagtcgcagcggcggcggctcaacaccgcgaggagcgctgggctctccgcccttcccggccacgtgacgcccggggacgcgtagattggggcagcagcgggggtcacatgtttcctctgtttcaccctcagtctgtcccccaaccccccattcttactctcccaccctgttttcctccctcccccccttctttgggcatctccacccctccatcaattgtcaatgttcctcgaccgcaatcaatcagttatttgtcagctcttgtcaatcctcccgtgatttatgtcagcttttgttgctgattacaaggcgggtgcgacttgaagggaaaaagagagagggagagagagacggagaggaaggaggagattgagagggaactggaggaggggaaaagaggagcggcctcctgggatgggggtggggtgggggctctaagaaaaagaatgaaagaggcgcacggtgtcaggaaaatgaatagcgagagtaaagtgcgcaggtgcgcccagggcgccgagaggggcgcgcaggcctggagtgtgcgcctgccctctcggtgtcggagagacgcccttccacctctgggagcctcggtctgttggggtcgcggagttcgggcgcggctccgggtacccgagaccagcggcggcaacttctaacacgggagatttcccgccaccccaccccgccgccgcgagtcctcgcggggcgtgttgcgtgcggaggtcaggctgccaccctctgtagttccctaaccccaaactcggagacttctaagagccacaccaccaaggaacttctagtcctggaggtcaatggtggggcaaacctcgcctcaattctttgaccccctcgggtcgtaagcagggctaagaggctgcgaagaagaggcctg

SEQ ID NO: 5388 - DNA, 2300 bp, Homo sapien
cccccacgcgggcacagactggctcccgactcccagagctcccagccccaccatttatcaaaaggacttgacaacaaaagaagagccggggcggaaaagcggaggaggggagattcaaagtcttctaagtcgttccgaggaagggggtgtgtcctcctccccaccccctctaatttctgcgagttcctggaggagaccctcgaacccgctccggacgctatcagagccccgataactcacgcagcgccacaggcatgcatacacactgggcatccaggtccaggtacccggtggcacgcacagcgcctccccttttcttcccaaacaacccgagtgacggtgcaaatcgaggggaacgcggcagtcccgctccgcttccctggaagaacccgcgttcccacaggcagccgccccctccctctctcgctccttccctcggctctcctagcgcagctcattccgactcggcgttccaataaattcgagagagcagccccgagttaccctggctccccagcctgcggggatggcggcaggtgggagaaggtcggggagggggcatgagtgagcctgagatgtttcttcccccatacacccatggccaggcctcttcttcgcagcctcttagccctgcttacgacccgagggggtcaaagaattgaggcgaggtttgccccaccattgacctccaggactagaagttccttggtggtgtggctcttagaagtctccgagtttggggttagggaactacagagggtggcagcctgacctccgcacgcaacacgccccgcgaggactcgcggcggcggggtggggtggcgggaaatctcccgtgttagaagttgccgccgctggtctcgggtacccggagccgcgcccgaactccgcgaccccaacagaccgaggctcccagaggtggaagggcgtctctccgacaccgagagggcaggcgcacactccaggcctgcgcgcccctctcggcgccctgggcgcacctgcgcactttactctcgctattcattttcctgacaccgtgcgcctctttcattctttttcttagagcccccaccccacccccatcccaggaggccgctcctcttttcccctcctccagttccctctcaatctcctccttcctctccgtctctctctccctctctctttttcccttcaagtcgcacccgccttgtaatcagcaacaaaagctgacataaatcacgggaggattgacaagagctgacaaataactgattgattgcggtcgaggaacattgacaattgatggaggggtggagatgcccaaagaagggggggagggaggaaaacagggtgggagagtaagaatggggggttgggggacagactgagggtgaaacagaggaaacatgtgacccccgctgctgccccaatctacgcgtccccgggcgtcacgtggccgggaagggcggagagcccagcgctcctcgcggtgttgagccgccgccgctgcgactgcccatctagcttctggtttctccgccgcggaatctgaggaaattagagcgggcgggcgggcttcttccagctccggctccccaccttgccttcttaccctggtggctgcgctgcgccgcgcgggatctcgattactgcgaaggaaaaaacactgggtgtgcaggttcccttcgcccctggagttgacagtccggccggtgtccacactcccaccggtgctccttctggacaccccccgcagtctgttcctcacgcgcaccccccttcaaaagaaggtttcagtttattttcgagctggggaaaggaagaacgacgaggaggaaaaaagagggaggcggcggatggcaaacgtagaataaatgtccatctcgtcctcccagcgaaatcgagggaggggacacacaggggggcggcgaagagggagctgcccattaaaaccggcactgagagtcctggcagcggcggcggcggcggcgcgggacgcgtcacatccccttgaccctccaatcacctcgggctcccatttgattggaaggcggcaaaggctttaatctcccccttggtgcagctgcttttgaagtgagtttcctcgccagagccccggctggacacgcagcggctcgcatcgcagagcgcagcgccggcgcggggccgcgagaacgcagcgcaggggagcagcccgaggcggacaccgcgagccgcccggcactcccgcagtccagccggctcctctagcccggccacggctccgctgcgggccacccaggattactcgcgtctggctccaggcgccgagaaggcgc

SEQ ID NO: 5389 - DNA, 2300 bp, Homo sapien
cacttcaaaagcagctgcaccaagggggagattaaagcctttgccgccttccaatcaaatgggagcccgaggtgattggagggtcaaggggatgtgacgcgtcccgcgccgccgccgccgccgctgccaggactctcagtgccggttttaatgggcagctccctcttcgccgcccccctgtgtgtcccctccctcgatttcgctgggaggacgagatggacatttattctacgtttgccatccgccgcctccctcttttttcctcctcgtcgttcttcctttccccagctcgaaaataaactgaaaccttcttttgaaggggggtgcgcgtgaggaacagactgcggggggtgtccagaaggagcaccggtgggagtgtggacaccggccggactgtcaactccaggggcgaagggaacctgcacacccagtgttttttccttcgcagtaatcgagatcccgcgcggcgcagcgcagccaccagggtaagaaggcaaggtggggagccggagctggaagaagcccgcccgcccgctctaatttcctcagattccgcggcggagaaaccagaagctagatgggcagtcgcagcggcggcggctcaacaccgcgaggagcgctgggctctccgcccttcccggccacgtgacgcccggggacgcgtagattggggcagcagcgggggtcacatgtttcctctgtttcaccctcagtctgtcccccaaccccccattcttactctcccaccctgttttcctccctcccccccttctttgggcatctccacccctccatcaattgtcaatgttcctcgaccgcaatcaatcagttatttgtcagctcttgtcaatcctcccgtgatttatgtcagcttttgttgctgattacaaggcgggtgcgacttgaagggaaaaagagagagggagagagagacggagaggaaggaggagattgagagggaactggaggaggggaaaagaggagcggcctcctgggatgggggtggggtgggggctctaagaaaaagaatgaaagaggcgcacggtgtcaggaaaatgaatagcgagagtaaagtgcgcaggtgcgcccagggcgccgagaggggcgcgcaggcctggagtgtgcgcctgccctctcggtgtcggagagacgcccttccacctctgggagcctcggtctgttggggtcgcggagttcgggcgcggctccgggtacccgagaccagcggcggcaacttctaacacgggagatttcccgccaccccaccccgccgccgcgagtcctcgcggggcgtgttgcgtgcggaggtcaggctgccaccctctgtagttccctaaccccaaactcggagacttctaagagccacaccaccaaggaacttctagtcctggaggtcaatggtggggcaaacctcgcctcaattctttgaccccctcgggtcgtaagcagggctaagaggctgcgaagaagaggcctggccatgggtgtatgggggaagaaacatctcaggctcactcatgccccctccccgaccttctcccacctgccgccatccccgcaggctggggagccagggtaactcggggctgctctctcgaatttattggaacgccgagtcggaatgagctgcgctaggagagccgagggaaggagcgagagagggagggggcggctgcctgtgggaacgcgggttcttccagggaagcggagcgggactgccgcgttcccctcgatttgcaccgtcactcgggttgtttgggaagaaaaggggaggcgctgtgcgtgccaccgggtacctggacctggatgcccagtgtgtatgcatgcctgtggcgctgcgtgagttatcggggctctgatagcgtccggagcgggttcgagggtctcctccaggaactcgcagaaattagagggggtggggaggaggacacacccccttcctcggaacgacttagaagactttgaatctcccctcctccgcttttccgccccggctcttcttttgttgtcaagtccttttgataaatggtggggctgggagctctgggagtcgggagccagtctgtgcccgcgtggggggcgggggccgagcctggagacccggtttcgaccggcgcgcacctggggctgagccgggtgcgcgcgggggtcgggtctggaactgcccttggtatgctcgccctctcctcttggcccatctcactcccctcccccacctgactcccctccccggcttctttctctgtctcccactccgcacgggtaccgagaactttccggggtgagttttagaatttgct

SEQ ID NO: 5390 - DNA, 2300 bp, Homo sapien
ggacagagatttgaactaccttgtgggtggtagaagaggccagagaggagggtgggttggtggggggtgggggcaggaataatcaactgtgaatgtcggagctagaacgtggcctggtggtggaggtgccaagtgctttactgcagttagacttgatgctgtgggtcgggggaacccatgggttgggagggtgatagtagcaatgctgtgtaacagagtcctggtgggggaaacttgacttaaggggtggacgcaggcgggaaagacctacatggaacttggtgtcttctggcaggagggtaagaaaggcttggactgaagcactagctggtggagtagagagatgaggtcagcctggtggaatattcctggggtagaatcagccacttacaagagagtctccacttgcctttcttgccaatactggtagccacttgcatttattctttcccttcttctcatccttctctgtgtcctgccttttctattcatctctttccccttttctttgtctctctatctttgtctccatttcactcttttccttgttccctgtcttttttttcctgctcctttcctgccgtgatattttccttcctctatctgtactcctaaacattttgtgttgtgcccccacctccatcctcacccccattctttcttgggtcttctctccctccccccacattcttttcctatggaataaataaataaataaataaattttaaaatctgtttttctgttggttgtgtcagcatgttttagactgctgggctttgcatgttttgcagctggttttgatgcagttgtcagacggtgatggatgactatcatcatttaaagtataaaagaaaatgccttggcacagagagacatgatgaactgccgtctgccagcctggataggcgcggccaccattttcttctcccttcttccacctccctctctgctcacactgcccttgccagaatctacaaaagtcatcgtgagccgtgcagcaccgggctcttgccttctataatatcactttggtagttgtcagatcatatgaaacgtcaaaattcatgtggcctccgcgaagagatatatttagtacagctgctgcatacctacacgctacctctgacactgacatattagttatgctgtcttttgcaatctgatatctttaaatttgccaccttgttaagttttgattaatgtgattccatttcactaaagtaattggcttggcctgttgtaaaaaataatcagccccctctacggaacaaatgctagaacatgctaatgagggagtgagttcgttacattgatggcgtggactgacagttattaatgattgttatgataaacagacgagtgcgaattgggatgagttgggcaaaagtgacagtttaaaaataacgtatattggaaggtactaacgaagtaatatactgttaggaaaacaatcatgcaagttgtcaaggaaagaagtgtaattatacagccgtatgggctgcttaggaggacagggacctgcctgataatggacacattttttgttggcaagagggaaatatgttatggcagaaagaggtgcagattgataaattaattggtccttctcacagctcagagagcaaacttggccggcagtcccatgcagattagggagatggagcttgcccaacgctgcttttcccccggacctccccggctcttgctgccagactttcctgaggccttgcttgcctcctctcctaccctccttcaccagctgcaacaagtcgtaggaagtgcatcccgaggcagtgtgtacaaagtgcaactttgagctggaactcttgcaaccatgtccaatttttttttaaaaccctaaagacttaaatgctctattgttactaaaatctttggctgtgatggaggtaattatgggtggttttcagccccatgaaggagactcaaacaggctggggaccatgcagagggaggtgccaactccatgcttctaataccagcacattgctgttggcagtttgtataattagccaagatagagtggcggtagtggcagtggtggtgtgtgtacgtaggggagaaagggaggcatgctcttgaacaaagaggtgaatgagcagaatgggtcatgtacatcccactgatgtgtgctgatgtgacaaagagagaaggcaggtagaagaggtaagagctttttttgtgacccctgtatgggtatggcttctgggtttgtgtcttggtcaagactcttaattgcattaaaatagtaaccaacttgagataacttaagcataaataa

SEQ ID NO: 5391 - DNA, 2300 bp, Homo sapien
ctgaggccaaacaagaaggcacaagtactagggccagtggggtctcattgcccctcactgggcagctgctcagaggttgcttgagagcaggcgagtctccctggctccccttcctgggagtgtgtcaggatagttttgctcatctgtgtgtctccagttgctagcactgtgtgggtacccagcaagtgttgttgtgtcctgcctttcatcaggggcatgtttgaaaccataggctgtatgatagcaatttcaagctcaaacttgccattacctaaaggaataagtcttaactctttagtatgattggaacttcccccttgtccctgccagagcatggtgatctgtcttgagcctccatgcctttgcacctggcatcctctttctccgaagtgacccactcttccttttccaccttgtgaagacttgccttgatatcactgtagcagaatcttccctgattgccccaggtagtcatacctttcctcattgacctcctcattggcctttgtatttaacttatatggtgcagcaatattgaaatcatttctttatttttctgtttgcctcacttgactgaattttgcatttttcattcacctctttgtcccagtgcctggctcataataacctccgatacatttttgttatagaagaaacatcatttctcccagggactcctttcagacagctgcagaaacaaccactagtagttctcaggaatggagatgatattatgattattgactaattaattggttattgatttattattcaccatgagaaatatagatgggagaaataaatgaggaaaaagatcaaaatgggttagagtataccgtttgtggagaacaacaataacaacagcaaacatttctgtattgatttaagatttataaagtgctttaatgcgaacattatcttatttgttctcattgtaacacagtgagggaagcgaggctataactgtaaatctttttgctgatacccctcatggatgattcgattcacatgcaaactagtgagcaaagaggagaagaggagaagaaaggaggaaaaaagaggtttaggtaagggaaagttgctttatttagtttctattctttaatattcataactaattctgcgaggtcaatctcaccactcccattttgcagatgagatcacagagaattgaggtggtaacttgtttcaaatcccccagctgatgagtagtagagattggattcacacccaggttttctctctctctgaagccctggtcacctgtttggccctggggtgatggggagaaggttctggctgtgtcttggctatctcctgcctctccctctgtggggaatgtgttcgaggatcacagctacagcttttcggataccctttcctttgtgaagcatgtgagaaccaacattgcatctcggcaagatttaaaaggaattgttgatgacctgctgaggtattttcattttgttcctggaaatgattaatcttgaggctttgtgatggcctttgtcacaaatagccttccttaatccataattttctcactttcctttaaggtaatattttgcatttaagaaataaaaacaagcaaaataatcctgctgtgaggatatgaatgcagtgtttgtgtgtgggggtgtgtgtgtgtgatgctgaccaaggtctaaattcacctgaaatgaattagaaaaaccacctttttaaaataagttcagtttgtcttttttgctaactctatttgtcaatcttacctcttccttttattattattttttcttcttcctctttagcagatgggatggaatatttctgttttgttttttatgggtgatttttcaccggcttcttccactttatattgagtcacttaacatcctgtgaagcggaaaggaggccggtactttcagcctgaggtcggccagggtgctgcaattccggacagagagatgtttttcccttgggttgggaatggcatgttctgagcttcttttgacttctagtcctcgctgccggtgcagttccaagtagagtcaacataaagccaggcacttgtgagatggagaccggggcgaaactgcaagcagatgccctttgctgactgttgaagaaagaggatctggctgaaagacccgcaactttcacttgttgagaacctttagccagcgccggcgtgcatgtgttttagttttattctttttcccttgcccccaaagccgtggagtacctgctgttgctctcatgcctcttgccaacagtggcatctgctcagtgtagccatcaagaatttgaatgtcaatatc

SEQ ID NO: 5392 - DNA, 2300 bp, Homo sapien
gcgtctcccagcttccaggcaccacagcattccctggtgcccatggtggaagctacttgcaggacgcctggtccagatgcagcctctcttggagccagcgcctatactggcacttggagctgcctgccccaccgcagccagcacacctggccgtgcgctgtggccgaaccccgtgctcactcacacaccccttgccactccatgcctggctcacccttgacagatgtgggatctgggccggtagtgccagctgagcgcagcctgctgggccaagtgtgtggaatgagcccagtgaggctaagcaaaactcaggcaaaggcgccacgggccacagacatttctgactagaaaactgacaccctaaggatcctgtgacacttgcattataaggctattgagagggttaaatgaaacaatgtttataaaatgcctgcatataattaatgccagaaatgtgatgtacacacacccacattacttggaggttatattacattacattctgattatgttctatgtttgaatatatgacacaaactaaatcttcagcaagaattaattagcagcaaactattaatttgtgctccatcatacttctttggataaagataattatttgtttgtagataggatattctgcccttattaaaactacccatgctattagtaaattccttctcatttgataatcttgtctcaatgctttgagaagttgtcctgttaggtgctgcaaggcattcactgtcaaattaggactggcccctaccatcttgcaaaagagacaggtgcccagtggacagtgaagcaggggagaatagagtaatggtcaggagaagggcatcatgaaaacctgagggctccaatgcagagagagtgtggggctacggaaacagtttgggctttaggagtcaggctgatttggtttctaatcacactctggactttagaactggatagccttgtacatgttactgatctttcctaagtgtcagtttttttcatttttcaaatgagaggaatataggacatatctcatacattggataaccattagcgtttaccatatattcaagaaatattaaatcctgtcacacactttgcctcctttctttaccatctccttctttttcctcaactcgtatttttcctcccttttttcatctctcctcaacctctgataggacagattgaaaaatatttgatggactaggcattatttcgtatcagccattgtatatgagtagtgttttaaattctaaatattgtaaattataagaagtaattatatgttaaataaagtttacaactccaaacatccttaatcacattgctagcaaaaatttattgatttagtttttgagatggagtctctctctgtcacccaggctggagtgcagtggcacattctcagctcactgcaacctctgcctcccgggttcaggcaattctcctgtcttagcctaccaagtaactggaactacaggtgcccgccaccacacccagctaatttttgtacttttagtagagacaaggtttcaccatattggtcaggtggatctcagactcctgacctcaggtgatccacctgcctcagcctcccaaagtgctgggattacggatgtgagctactgtgcctggcccaaaaatctttctatctttacttattaactactacttattcctaattttatgtagttaaaaaccacaacctatgtattattttaatgtttaccatgttgacttaatgctaggtaattaatatctttgcatatttctctctcctttgtacttacagttgtattaggttaccaaaagaaattatgatcacttctataatgtccaatatttagatggttttatttttgtcttctgttatataagtgtctgctaaaaatattttggaaccactgctctagatgatttgtaagatctttaacaactcttacattctgtgattgaattagttatgtaatagcccataaaatgcccaagccacagcccttccttccttttttcctttcgtagttctcctcctccctccctccttttctttttccttccctgcctttcataaatatttgtgaactgctactctgggccagatgccactgtgggcactggcagaactgggccccctgtagatcagatagaaacaaatgggaagctctgggccattgccttcaaaaggctttcttattccagagaggtttttgacataatcctcccctccccaccagcctctgctgtgaccagcttcttacttgaattacccttcagctccctcgctcagcttcatgctc

SEQ ID NO: 5393 - DNA, 2300 bp, Homo sapien
gattgggttaattcaaaatccttttctgtaagctcagaaattctaaaattccttaaaaatcagtttctcagtttctacaaaaaaacaacactttgggattttgattggaattttattgaatctatgtatttatttgggaagaaatgatatctttagaatattatgtcctcaaatccctgatcatggtgtatcattcaatttattttaactttccttaaaatatgtctcaaaatattatatttttctttataaaagtcttccatatttttgctagatttatttctatgtatttgatattattgttaaattataaatttaagttgtaaattaccaatttattctggtttcactgaatcaggaatagatatgtaataaccaaatactttttcagcatttgtgaaaataatcataatatatatttctgtaacatattaagttatattattttaaaatattgaaccatatttgtatttctgaaaaaaattcaaattggttatactgtattattcttgtaatatgcttgtgaattaggtctaaacttattttaattttgtagtttttaatttatatacatgagtgagcttttgtgtagttttctcttattgtacagacttcagtggattatgataccaatgttatacttacttcataaaattaatttggatttttccccttaagtcattatctaaaataacttttatatagcttctaaattattattaaaggtttaccaggcttcttttatgaaattttctacctggaaaattttatttgtggcataggggtaaaattgatataaataaaatagagggttatctaaaaatatttattgatattacaaagcctaaaatttgcatatgtactcaaacatatacacttctcattatacatcttcccatacatgtttctaccaggtgaatgtataggatttgatctttaggattttcaattcattcttttctagatcttttttattttagtttcaattttatatttgaaataagaactgcttgtgggacttttaaaaaggtcccacattattttcttactaagtactagtgttgtttccttgtaagcatggtacatttttggattttatttttactttttgaaatttactgggaccttgaaagtggtctaatatatgatcaagttttataaacattctataacttgaaaagaaggtacactgtttttatttttagggtttaaagttcaaaataatatatcaattattataccttttaaattattttatttaagctttctattggttacaggaaaagagaggtgaaataaaatctaaggctaatgtatctctgtttatgcattttactctcatggttgtgatttatgaaggtgaatgctgtgttatttaatgcatacaatccaaacagttaagtgttcatcgtgtattggactccttaatctcataaaaactgcctgtttttgttttaaggatttttggcctgaattcaaagttatgtgttattaagtttgttaatactactcttttttattgtattttccttgtttatatattttttttgtttttgagttttcagagtcactttgtttttaatatgtcttacatatagagcacagaattgtgttttggttttatttttgccatccatatctttgtataaacactttgttattgaaaattttcaatcaatcaatcagcaaagttgaaagacttttgcagtgaacaatcatgggttttgtttttaattcccatccgaaattttttatgccttaagagacagagtaaattcactcgaaaacattgatatatatgcttgcttttaatctatattattccgtttttttgtttgtttgtattacataaaatatttcaatatgtgctcttttctctgtattttgatattgtgattctcttgatatttagacaggcttgtacttctgctaaaggagactttcatatcatccacaactatgtactatacaattaaacatgtctttttaaaaatacgtgttagtttctgtgatggtcagctgcagtgtcaacttggtcaggcaatagtaccccgttattcaatcacaaatgcctaggtgttgctgtgaggtatttatttagtagatgtgattagcatctacagttagttgactttaagtaaaggagattgtccttgataattttagtggccctgattcaatcaatcagttgaaagatcttaaaagcagaaaacctgaggttttcttttaaggaggaagacatttcacctgtggactgcagcatcagcttctgcccaagagattccatattttcctacaga

SEQ ID NO: 5394 - DNA, 2300 bp, Homo sapien
tattgccgtcattaccctgcctaaattggctacattaaagaaagtgatgatgaggaattccttcccaccagctttctgcattgggacagccagcaccgcacagctgtgccaacagttgaaggtggtggctggcttttgtctttgttgagtcaactgtggctgatcctcctacattctaatttatttagcatgtcggctcctagaaaagcatgatctgcagctgggtttgtcttcctctcactctaccattgccccagcccttcctcctacctggcattggggccctaactaatcaaacaaaggggagtaaaaagatcccctgagaatgcatggaaaaatacttgctctttcctgagcattatttattctgtacataaggtaagtaattcaccttttaaaagatgtaaaagtcccaggaaggcagtttttaatgacttacatctgatatttatgatacatatggcttttcatcccaaatgtcaaaagtgaaagaaaaaaaatagctattcatatggcaacataaggagacagaataacaatttaatatgcaatcaaacctcttttcacttaaactaaatgactagaatttgatacatccatgattggaatactattctctcctccatattaaggtgagaaatgttcataagaactcccagagggaactggctctgggacaaaaggccttggtgagtaactaaaaaaatcactgatgttctcttgcaacaagcaggtccttcataatcatctacacaaatcgtgaaagcttttcaaatgcttcgcaatacttcggcccagagactggaaacaatcaatatgttttcattgctgtttggttgcttgtttcaaataaacatgtgctaacttattgtgtgtataaaaaaagaaagaaaggaaaacaacaacaacaacaaaatcaaaacccaaagcaccctgataatcctgataaatcagaatcaacttttcttttacattaaataaacttgctctgcctaactgacgttgatcacaagtgctcccttctaatctgtgaactcgttcctgcagtgagctatttatgtctggagcatgcctttgggttatttttcccccagaatcataaataacttttggtccgtctgcttatttgctgttgtgctcaagggttttatggtggtgaaataaaaatgacaaccacatgcacactatcatacatatgcaaatatgtgtaaaaaaaaagggggggactacaggggaaaacagggaaagttactttgttggaaacaccaactggggaaatgagtggcagatacagtttcacacagtggcggtggatacacatatcaaagccgctcttcctgcacgtacttctgtttgtcccgggactccctggacttgggccggttctgtcggtttgctgtggatgggatggagtgaacagaggagctcttcttgctggaggactgcgacgagtgggaggaatgggacaggctggcccgggactggccggcattgtggtcaaactgcattaagcagaagatcaggtccgtcggcacgagctcaaactcatagggcgggttggtgatgacatacctggacagggaaagcagagatgtcacctcctgagagtaactgagtaaagaattcaactctctctgaaccaaaagcaatggcctggttactcaggactttcagaggatctggaagatgcactcctagctggtctgaggccttaaacattctttttcttgttaaatggaaacttcctctgtttaactcaataaaggaggccagccaggagcccaggcagagatgtggaattagagccagtaatggaagaaccaaacttcgcttctcgtggtctacatgtacctttctatacaaggtcaaagtcactttcaagtagcccaaccgcaagaggtttcatgaagtgtgatgcaactttcatttcataattttcggacaatcccagatatacatcacaagatctttgtttaccatgacagagtgtctccttagactattctcgctctttaccttttaaaatctactttggtgagagaatttggaatttggaattcaccacatggaagaatctaagaaacctgcctacttatcagcactactttgttgttcttcacaattagttggagctttctttggtcaacagcagatgtgactaagaaaatcacgctgtttcacttagagcagtggtcaccaagtgtggtccttaggccacacaggtcagcatcacctaggaactaggaaatgcaagttcttaagcaatcccacccagacctactgaattggaagtgctgagg

SEQ ID NO: 5395 - DNA, 2300 bp, Homo sapien
gatgccaggcatatatgacttaaggaaagagtttcagagaggttacctgaaaagactcaggcagtgagaacacagggttgttgaaggattaggtgggattgcataggccacagaatactttatattggttacatcctaatttacagataccatatggcacttaccatttcatagtgcttaccatggagcagattacttggcccttccatgtatcatctccttagatatcaggataacttcatgaatcaggcaccagctctggcccctcaaaggctctggctttttaattgtaaaatgcaaaattggtacattgtccaagactatttagttatttagtgtctgagctgagttaacacagggctatcagagtatgaatctcacatggtagatatgtaggcatcatggaacccaacagagataactttggatggggatcttttttggcattcttcaaatcatgccctgtgaacaaccattactctgcctccaatgaggtcacaccctgctgtctatcttaacatatttgtgttgatatctctaataattgaggatgcaataaattctagttctcttcttcctgcaataatatccttccccaaactatggccctagaatcttcaaaagtcttgaaaatatttctggtaaataaatgttccccattcaccatccatccctcatgctcttgcagggccctcctcagacacaggctggcggaagcagatctcctaataccgattgctgagttagaggcagcttctccccatccatcaattctaactgcattcaaacattttcaatatgtgggctccttgataactttcactgtatggaaaacaaaatggagggaaatgattattggcacaaaagggggaggccataaatcttcaaatcagatataggacagattggaacaatatgggttctccaaggttgccatgataatgtacctaataactctccttgggcaaaaaggcaatctgctttcaatcaatctcgctttttttctgagcaaaaataccaattacgttgaaggaaggttttttttcttccttttttgataaagacagctctccaccccagaaatcatgctgtggctaaaagatatatattttcaattgtctagaatggtattggatagctagcaccaaatgaaaaaagtcaatcctttttttctcctcactcttgccagcatttgtctacttcttaagagaagtgaaagttaattaaaggcttaagggataatattgattgcattggaatatattttatatgtacccagtacattttcaaggaagagaaccctgactttttctaaggctgaataaatcagccagctgagcttttgattcaagggtgagaggggggaactcatcttttccccttgcacttctcacacatctttcctagggatgaatgatttcagagaggaggaggagatgctggctgatgttcattcagttctttgcatgctgggtaggaagaacgaatgttcaggcatttccccagacctatcattgatttgagcctagctttgagtaataaccaggcttatgctggtatagaacttcgaactttacaatgcctggcacaggaggccggctgggtggtattaacctctcagcttcctcctgcactgaatgggaataaatactttgcccacacccttggtcgcagagcagggaatcacatctggcttactttcacatctaagtgatgagaacagcctcagccacgtatctgtcctgtggagatacccacgcattggattcatgttggctttgctcctaatcttggaagtctatgtgcagaggatgttagaatggcaaagtagccctattgtcagttgcaaggaagttaggtcagtaggggaattctgtttctcattcacttcaaacatatttggcaaattcaaagtctgaaatcttattcagaacgtgcaaatttatttgaagtattttgtccatgtaaatgtacatgtgccacaagaaacattttaaaatatatgataaaatgcatatcatccaaatgttcaatctatattgtgtattctgatacactgtgtgtcacactgtcttagcctcatactactcaccatatactaatgagggggttagtcatatgggctttgggcataaaatttgggtgggtggctaagggaccttcatcaacctagcaggagagcaaagtgatcatgttaagacatctcttctgaagtagctcattgacactcttccctcaccttggtggccgctgcgtgcctgattgctaagtgcaccaccgtaacaataacagtctataat

SEQ ID NO: 5396 - DNA, 2300 bp, Homo sapien
tgttgccttggtgggtcttagccttgagcctgcattagaacaacctggagggcttggccccactccagagtttctgatttcggtcaggtctgcgataggtctgagaatgtgtgtttttaataagtttccatttgaggtaaagcccagggaccacactagtctgtgctgtactgactcatcatcccgtctcagtttccaacctccaaaaccagagggttgagctttctaccagttctctccagttgaccagttaacgcagaaattccagccttctaatcacccataattatgtttagttttggacaacttaatatatgagagagcaatagtacttcagtaaactcctctactgctactgggtttctgtcacttgtctcctcttatttttgacaatttgatgttttgtgttgtgaggcttcctttgtgcctaaaagtcattgacttttagatactcactttggattatctccatcaatgtgaaacctcctgtgttgccttatttaatgtcttttgccttgaatttcacttgcttggataccattgcctttaacttggcatcactccttagcttgctttttacagtttggtagagatggtgtctcactatattgccctggctggtttcaaactcctggcctcaagtgatcctgccacctcggcctcccaaagcagtgggattacaggtgtgagcctcacttgatttttgcctggcatattctggtttattcttttacttttaaccttattttgtcacttggtttagggtatatttcttataaacagtgtataattttatatatttatttattatatattattgcatatagttaatactatatataatgtgtaccacacattttgattgtaataactaatatgttttggcctttctgttttttaaaaaatgctttttgcagtcttttttgtctatctgtaatagatatttaaattttttattttatacttttctttattaaattggaatgtctacccatgctgcctctcaagtatttaaaactattgttcaaccatattttgccaatggttaatgtatagagtgaaatagcctcttactccttgccacgtaagataaataatttttcttcttttcattcccccattccataatattacactcatgcttttatggtataatctgatatttaaaacttctacttattattattatatttttcacattttatcttctcttccaataaattttagttttcattttcattttgatttgtaatcacagttgtaacaattatttaaacctaatagatcttagggttcattgccagatctttattaccatggacatctcctgttgttgaattccttgttttgattaatgtcttaattacaaatatgaaaaatttaacacctgtttaatcttcttgaacaacgtattctgctttatcgcactttgcactttgtttcttttaatatgaatgacaacttggccctgctgttgggttttgcagaggagacatcagatatcagcttgatttttctctttttttttcatagataatctgatatcttctgtttggatgctgataattcttcaccatgaaattaaaatatatgtatgtatgtgtatatatatatgtgtgtgtgtgtgtgtgtgtatgtgtgtgtgtgtatatatatatatatatatacatgcctactgagcattttgactttcagacttgggtctgtcttctgtgttaagaaacttttttttgttttcgtcttttcagttaggtttattctgaattggctgcctgtcctctatatctgtcatctttttgtataatctgtcttagacctcacagtatttctgcttctgtatttttttcctcttcattttgagagtgctttctaaatgtgcccttcataacacatcttgtttcagaaataagttctcttgacttttactgcagacatagaatagatggtttctccaagttcaattatcacaatatcacacgagttgtttactgagcacagactgtcctctgtgcactgtgctaagcactttgtgtgcattacctcagaacaactccaaggggcatgtgctttgtttgtcctcattatatagattggggaaacgcatgtccagagggttgagccctactcagcctcatctgggtactgactgggggccaggactcaggtccagccagtttcacagcagagcctgtgctcttggccatgatgataatggcactttcccacccagtccttttttttttcaaatttatttattttgagtgctgcattctctaccttttatagttaagaatgttttc

SEQ ID NO: 5397 - DNA, 2300 bp, Homo sapien
ccttcaatgggtgtggaaatcagttacacaaaattcaggtgcttactaaaaaaaatctgaatatccatgaagcttgtatggtccctggtggaactttgagcagctgagcctctctgaagatcctgaggttgtcagggtgtggcacagcagctgggggctgggccccgtgcatgcacatcagcatctgtgtattgaatataatcagcacagatagggaagaaacaaaccaccaccaccaaacaccctaagtaccaatctgggcatctgggcaccctggattttcattttgactctgtcatttactagttctctgaccttgggcaccatgctttgcatagcagccttggtttcctcattggtaaaatgaggctgttgaattctatatggctcaagagttctttccagccccgaaacatgcaaaaattcagtttcgactaagagctttagcactgtcttatcttggctgtttgcagtggccaaaattgataacatattggaaaacttccctgctgattaaaatagacattgccctaagtgctgtgagtgtccctgttaccttatcccttctctgaaaccctctgggtttccccttgaagcagcccctaaaatggctcagtttccagcatagcaggaggtctccagcctagccaatggtgccccttgtgaaggtcatggacctgccttacccattgttaaatgttttccatccctctggtgtacgtggagagcttctgggtggagtggacacaaatgatttaactttcccgagtctctgcttctgcgccagaaagtggaaggaatcataaccagtgtagtggaggtaattaggagggtccaaagcttggaccatctgggttcaaaccctggccccaccacttagtatctatgtgagtgtgggcatgtcaggtagcctttcttacctcaattcataatccgcaaagtggggatgagaatagcaccaactgtatcaagctgatgatgagatcaaataacacacaaaattcttagaatagaataagcactgtagaagtgatagctctgtgtatgtcattaatacattcactggtatcactgaactttattttatatcaagtgagataactactataccatccagggagataatgtgtgtgaagcccatagcacaatgcttgacaaatagttttcagggaatgttagcttctatctaagcaggtcccattggaaaaaaaaaaagttgtatttttatatagttctagttagtttctcatctgtgatctatgctatttttaattgaaaaaaaaaagtgtttccatacattgtcaggaggagccgttcccctgtcccagcctctcacaaagcacaccctcactccctcatttttccagtagtcccagggctagaccacctgtagagacaggaagcctgcctaaagagcagaagcatctgctcagaaagatctagttgtttgctggagcctcagcttgaagaaggctccaagtttattataaagtcccagccacacagtttgcttgagactttataaagagagaatgagatgtagaggctgggcccaaacccactaccaggctgtgggaatgggggatggggtgcttggctggcatctcttctcagggcctcctggtcagcctcaggagatctagtgctaagggttactctgctggggaaaatctcaatggcactagagaccacttgagcacagctcttaggaactgaggagccagctacttagcatcccagaatcccaatgcccatggccagagccagagctgcttagaagaaaagcaaagtccgcaggctgcatggactgagaaccacctcacctggctgcacattctctgagtggccttgaccatgctgttctctgagcctcagtttcctcatcaatgatagagtggagttagctagatcaggggctttcaaaagctttttcccctgaaacccagaataagaaataccttttctttctcaacccaatacttatgttcatgtatgtaattaaacaaaagttccatgcagcaacccttttaatatgcagtactctgttttctgtgctgttgtttcagttgaaaaatgctgattgtgaatgattcagttgattctgtgacctgctgatgggtcataacctgcagggtttttgttttattttgttttgtttttgttgacagagtctcgcactgtcacccaggctggagtgcagtagcgcgatcttggctcactgcagcctccacctccagggttcaagtaattctcctgcctcagcctcctgagtagctgagattacaggcacccgccaccac

SEQ ID NO: 5398 - DNA, 2300 bp, Homo sapien
ggtctggtgtggcagggatgcattcagagtggctgaacacagaggccgaggttggaggtactatgggatggtatggagaggaggctcagacaattccattttctggagcacactttctgcagctcccttttacatacacttctttttgagaaccaaatactcaagaactcttacctcattccattttctcctttgactttggccttgactctttcttagtggatgtgtactctaaacccaatgaatgtattccgaatcaagcaagagagaagcttcaaacatcctcttcagcctctctgcccagctcagcctcccttgctcgctcttccttccagagacctccaaggacaagggcagggctgatctgactctcacggagacagcctcaggtgtaaagctaaggatgctaacttgggccttttccatgggaagagctgaaaggaacctgagaattccaattaggcttaaactaatgagctggaaactttggggaaaccactgcagcaatgagggaagagcgtgatcatcctcgatttaattagcgctggaaaaacttggggtccagctggtagcacgaggacggacgctgttcagggggcgcaaagtttctgaaagtgtcagaagggggattcccctggtggtgtacggagacacgctacggaacaaacacggactccttcttcatcttaagtggggagaagggaagaccctaaatggggaacggtgagccagaatgaagtctggagtccctcttcccccatctgccctcctcacgggatggatggagtctgagactatatgagaggaaagcaacccttcagggaactctattgtctatcggggcctgcactatccccaggccaggtcgtccttgatcatttctgcctactctttgttgggcagcctctgttgctaataaggaaaaaggagagaaaccacctgctgctgtcagaggccacagaccacccgctggccttcctgactctaccctccagccacacgcgggaccctgggcacataggtagcaggaagagcgaagtaggggtgggtagctgtgtgtatcctggcgtggggtcctcctcactcccgaagcccgagggtcctggggagctcagcctgtggaatccagttgacagctggccactcctcccctccccactgggggctctttggggaaaaaaacggcctgaccggggcgccccgccgtcctcccagtgtaccccaccgctctcggctgggggcgcagcaccttggagagaggcgcctggccccgcgcctgggctgggggcgctctaccttgcgccctgggggtcaggggcgcttgccgggccgctgccgaggggccctgcccacccctgcccagcccggagcccaggcgagccagcgcggcgagcctcctcccctcccgcctgggtcgtcctgagtccgcgcccgctccagttgctgcagctgctgctgctggcggctgcggggagcgcggggcgcgcgccgaagaggcttgggcggcgaggacggggacgaggaggagtcggaggcggcaaggaggaagagcgagcggaggccgaggggctcagcggcgtggcgacaggactagggggtcccgagaacatgggctagcaggcggccacgggccggcggccggacgcggtgaacctgccgcggccgggcgcgcactggcgcggcgagccggagccgagcgcagccgggggaggagggctggcgcaggggcgcccgggcggagggggccgattatccattattaacgagttaccacctaataagcggagagcggctcgttagccgcgcgggaggcgctcggggaagggggtcaccggccgagcgcagcgcacacccgtggcgcacggcgggcggcgcggcgccgaggacacccgggaccgcgcgcggagccggggcgggcccgggggcggcgcagaccccgggcgcgggcggcccgcggcgccccctggctctcggcgctcggggccagcgcagcccggggcgagcggggcgcgggccggggagggggagctgcccgcgcactccatccccctcccccccgggcgggcggcggcggctcgctgtatatatctcggcgcaccccgccaggtcgcgcacagcgccccgagcccaggcgcctccccgcccccctcccgcgctccgcggcggcggcggcggcggcagcagtagcagcaatatggctgttgatgggtgtttggggtggcgctggcggcgggaggagctcccccgagcccctgcgccggctgcccgttgctagctatggcaaatggtggcggcggcgg

SEQ ID NO: 5399 - DNA, 2300 bp, Homo sapien
acagtctggatgccaccatcgactatgatgggcacaccaaagcactgggcatacttggccaccttgtacacagcagtgccctggggccaaccgcaggccatcactttctgggtaatgcagatggagccgtagcccatgcccacatgcagcccgtccacacgagcgtccatcaggttcttggcctgggctgctgtcaccacgttccccccaatcacctggaggtgggggtacttctgtttgatgtaatgcaccatggtgatctgatacaccgagctcccttgggatgagtccaagactacaacattgacacccgcctgggtgagcaggtccaggtggcattcgtcatcctcacgggtgcccacagctgccctgcacagcagctgtttgtgggaatccttggaggccagagggtagtctcgattcttcttcaggtcagtgcgggcaatgatggccaccagctcatcgcgatcactgacgataggcagcttccctttcttgttacgctgcaggatctcatttgcctctttcaacgtcacacctttcaacgtcagccaccaccagttccatccttggcgtcatcacctcactgatgaaggtggcgtgctccttcttagcaagaaagtcgacgtctcgggaggtgatgatgcccaccagcttgctgcccatggtgcccgtctcagtgagggggataccagagaagccatgcagcatcttggcctccaagcacatcacccacggtgtgcaaggggctcagcaccacagggtccgtgatgaagccctgttcaaacttcttgaccttcagcacctcattggcctcgaactctggggtgcagttgtggtgaatgaaaccaatacctcccatcagagccatcccgattgccatgtcagcctctgtcagtgtccacaggggaggagatcagcggcgtcttcagcccttgtgggtcagggctgaggtcaggtccacctcatcatcagctatgaagtctatgaatcctgggagaatcaggaagtcattgtaggtgaggccgttggtgctggtgaagagctgctgcgcggtgagcccgtcctcgggcacgtagctggtgccgctgctgatcaggtagtctgccaggctgccgtgacaccccgcgacccgacataaacacccgagtggccacctgccgcaggcacactgccactgcgggccgggcacaggggctctcagtgtaaatctttttatatcccttctacttttgggaaaaaaaaatgccccaggaaggtctgatcaccaaatccttccagagagcgatcttccaagccaaagaggttttcagtcccacccactgaaatcatccagtcctttattcacctgtgtcaacccggctcggaggtgtggcctgcgagatccttcatgcaatcaagaagtcaggcctccacctggtcctgggggtcatctgaggcccgcagttttggaagaggaatgttttctgccagcagttcccacagacgggctggctccccactgtggggacatgcaccatgccctctgtgggcctctgtttttcatccctgaattcatcccccacagaatggttcagttgtcatatctagctatctaataagcttgagggcactgtgtcccctaggggatgcccacatgcctgaccatgcaggctgatgcagtgacaagcacaaagtatcgtgattatagttcctgctctcctttccagggctttaagcccagcacatgatgttgtgcgtttcttgttccaccaactggctgctgtggaatgactacgaaacatcttggatgacagtttaatcctcgtggggtaccaggtggcatctgggcacaggtcaaactttccgagagcctttttaacctctttcactgcagccaggaatggctggatctctgctgctgcctatagggattacagttgtcccatccatacactggtctgtgttggcttttgtcacctgggcatgtgcggccaccatcttgactgctcagctagttctgtacctgggttctagaatgatgtcataatgatgccattatgacagatcagcccaaggctgcacactgacctaatcaacaggtgcggcagagctgtgattaagagactgagtcagttcccacttgtgaatagacagcatgaaggctttaaacctctctgaacctgatcagcattggcaatgatcttctgcagatccaacaacagcacagaagaatgtatcatcaggaacacatttggatattgacacaacttcatctgcagttggcttgtcatcctgagctccgttcccaggcagcgtag

SEQ ID NO: 5400 - DNA, 2300 bp, Homo sapien
cctctgcaatccctgcctaggtattccctcagagctcctcgtggagtggccagaacatttttgaaaatatcaaagactctgataagatgctgagttttcgagcccatggcccggaggtccaggctcataacaaacggaacttgatacagcacaataactccacgcagacagacatcttctacacggacaggctggaagacaggaaggagccaggccccccaggaggcagcagctcctttctgcataagccattccctgggggacccttgcaggtctgcccccaggcctgtcccagtgcctctgagcgtagcctgagctccttccgctcagatgcctctggggaccgtggctttgggctggtggacgtgcgtggccggcggccactgctgccctttgagaccgaggtgggcccctgtggggttggggaggcctccctggacaaggcagactctgaaggctccaacagcggcgggacctggcccaaggccatgctcagctccacggcagtgcctgagaagctctctgtttataaaaagccaaagcaaagaaagtccatctttgaccctaacactttcaaacgcccccagacaccccccaaaatagactacctgcttccaggtcctgggcctgctcactctccccagccctccaagagggcggggcctctgacacccccaaaacctcccagaaggagcgactccattaagttccagcacaggctggagactagctccgagtcagaagccactctggtgggcagctccccatccactagtcccccgagcgccctgccccctgacgtggaccccggggagcccatgcacgcatcaccccctcgcaaggccagggtccgcattgcttccagctactaccctgaaggagatggggactcctcccacctgccggccaagaaatcctgtgatgaggacctcacctcccagaaggtggatgagctggggcagaagcgtcgccggccaaaatctgctcccagttttcggccgaagcttgctccagtagtgattcctgctcagttcctggaggtatagctgagccccagggtgtggggaggggaggcctagagaggggcagttggccgaaggagggctgctaagtggccctgcaccagtgtcccaggcccctgtttagcctggtgcctttgcctttgctgttggactcaagtgggaagtggcccagctaggaggtaggtaagtggcgtggaagtgcatggtagtgggagtgtgacacaagaggggaacactttattgggcatagcatttggtttgcttttttaataagaagcttttgaacttacacaataaaacctagggcatagacttgccttgaagggctagggagatgaggtggcacgtgtgaggctgagtgggcagcgggacggcctgattgcgtgtgctgtcatagtttccagaagggtgagattgctggggactgtggaaagcatctcaggcaccagtccacactgctcactggggacaaagagcttcgcacagccctccacatcgggcagagttgtacgtgcctgatgcacttgtgcattctcaccttttacgtgatctctgtgaaagattcattctctgtggttttcttctgaagtaaagctgcttccttgaagatgtgtaaggcaacatgaatgggcagcgttcccattcatgtcccttcctgtgccccagtgggaggagctggttcctggggggcagaaactggcttgcagagctgctcaagcgttccactgtttggttttttttttttttttcccctaagatggagtctcactctgtcacccaggctggagtacagtggtgcagtcttggctcactgcaacttctgcctcccgagttcaagcgattctcctgcctcagcctcccaagtagctgggattacaggcacccactaccatgcccagctaatttttgtatttttggtagagacgggatttcgccatgttggccagggtggtcttgaactcctgaccttaggtgatctgcccgcctcggcctcccagagtgctgggattataggtgtgagccactgcgcctggccacactccactctttctagcagacactcttgcccttgcatctgcaggaacagaagtgtgtcccggccagtggagaactctccccggagctccaggagtgggcaccttactcgcctgggcattccagccggcacagcaaccccccgctataccctagcaggccgtctgtgggtgagtcagccagccaggggctggggctgagggtcggtgtaaactcgggatgcctagtctccagggagagggg

SEQ ID NO: 5401 - DNA, 2300 bp, Homo sapien
gaatcgcttgaacccaggaggcggaggttgcagtgagctgagatcacgcctttgcactccagcctgggcaataagagcgaacctctgtctcaaaaaaaaaaaaaaaaaggaagggaagtgacatgtcatgatatttgtaacttgctttccagtgttctgtagtatcattatagacaaaaagacaatttagtgaaatatttttgaatctagatggtacatttatggacatttattatacttttctacatatttgaaaagtttaataataggaagttagaaaaaataggccgaatttagaaaacatctcttaatgaaatggctgggcctattttttctaactttctattaagagatgttttctaaattaactattttcaaattatttgacttttttggaagcagttttatgtttacagaaaagttgggctgatacagaattcttagcactctctcaaccaccccatcaccaccatccccactcctgtccccaagtttccccaattttggcattttgcgttagtgtagttagtacatgcgttataattagtgagccaatgtggatgcattagtattaactataatgcatagtttacattaaggttcagtcttggtgtattttctgtgagttttgatgcaggtgatgacatgtactaccattgtaatatcatacagagtagtttcactgctctaaaaattccctatgctccccatatttatgcaagcccctggcaacaactgatccttttactgcctccatgcttttgtgttttccagaatgccatagagttggaatcacagagtgtatagaatggcttcttcatttgctaatatacacttaaggttcctgcacgttgtttcagttctttttagtgctaatttatattccgttgtctgggtgtaccacaagagatatatttttaacaatgaatttttacttttatgtttaatatttaaaaaaaatattcaagacattatgcaggtaatttccttctttttgagacagagtctcattgtgtcgcccagactggagtgcagtggcgtgatcttagttcactgcaacctccacctccgggttcaagcgattctcctgcctcagcctcccaagtagctgggactacaggtgcatgccaccgtgcctggcttatttttgtaatttttgtatagatggggtttcaccatatcggtcaggctggtctcgaactcctgacctcgtgacccgcctgcctcagcctaccaaagcgctgggattacaggcatgagccactgtgcccggcccagataatttcagaaagtgttcaaagttaagaaaactttgactcttctttgagttcagagtgaccagagccatgagaaaacttatccattagggagaagcatatgtgttcatgtgtgtgtgcatctctgtctatctgtctcttttttaaggggcaggtggcccattcctgaccattgctttacctctggggatggttttcagtggcagctccaagtcctgccatctcactctctctctcactcctctgcaatccctgcctaggtattccctcagagctcctcgtggagtggccagaacatttttgaaaatatcaaagactctgataagatgctgagttttcgagcccatggcccggaggtccaggctcataacaaacggaacttgatacagcacaataactccacgcagacagacatcttctacacggacaggctggaagacaggaaggagccaggccccccaggaggcagcagctcctttctgcataagccattccctgggggacccttgcaggtctgcccccaggcctgtcccagtgcctctgagcgtagcctgagctccttccgctcagatgcctctggggaccgtggctttgggctggtggacgtgcgtggccggcggccactgctgccctttgagaccgaggtgggcccctgtggggttggggaggcctccctggacaaggcagactctgaaggctccaacagcggcgggacctggcccaaggccatgctcagctccacggcagtgcctgagaagctctctgtttataaaaagccaaagcaaagaaagtccatctttgaccctaacactttcaaacgcccccagacaccccccaaaatagactacctgcttccaggtcctgggcctgctcactctccccagccctccaagagggcggggcctctgacacccccaaaacctcccagaaggagcgactccattaagttccagcacaggctggagactagctccgagtcagaagccactctggtgggcagctccccatccactagtcccccga

SEQ ID NO: 5402 - DNA, 2300 bp, Homo sapien
catatttttatattgcttggctgttttacaacaaacaggacttactttggtaacaaaaaaatttaaaaataagtattacatttagttaaaaaaaaaggggtggcatttaaaagtcacaacacaatgatgtcaatttttttaattgtccttgataaacattcatgagaatgttaaatgtagagaactacatttaaaatgttaataaagctgggtgctgtggatcatgcctgtaatcccagaactttgggaagccaaggcgggcagatcacctgaggtcaggagttcaagaccagcctggccaacatggtgaaaccccatctctactaaaagtacaaaaattagccaggcatggtggtgcacaccctgtaatcccaactactcaggaggctgaggcagcagaatcacttgaacacgaaagtcagaggttgcagtgagccgggattgcgccactgcgttctaacctgggtgacagagcaagactccatatcaaaaaaaaaaaaaaaaaaaaaaaagttaatagaggttatctacaggtggtaccaaagcaagtggttcttatttcccgcttaggcctttggaggttgcagtgagctgggattgcgtcactgcactccagcctgagggacagagagagatagagaaaggttatctacaggtggtagcaatgcaattgattcttatttccctcccagaccttttatttcctaattttctacagtaaatagaaacataccatcaagaaacctatttttaaatgttcacatagtacaatgcccacaacaaggaaaatataaaaactttgctcattacttcttgctcaaacctcccaaatgtaatctgcctatgcacggcagatgaccctggctccagccttgagacttaccgcaacgatcctgtctcccacagcaagggacccttctttagcggcagggcttccaggcagcacagcggcagcatacactccattctccagactgatgccactgtctgcaagccacaggaggtcactgggtagcccctggcctcgctgcccagccctgggtcaccctacctcatctttgttaccatcttcttacaaaagaggatgtcagcaggctgcgccctgtctacgcctgcaccctgccccagtcccaccaatcgggggctcagttacatctaccctggtgaatcaaacactcagaaagcaagactcagggcccagaccacctcttgccagaaaagcacatgggctacatttaaatggcattggcccctcatccctgtgaatgaggtgctctaaggggcacccccggcccctgtccacaaaaaagggccccagccacctgaggcactctgccatgttcacaggcccgctacctttctgtccactgaggttgatgtgcagcggcgtgaccaccttcccacccagggacttcctccgccgcacgaccatgttgatggccccctccccattgaggagcgccttgatggcctgcttcttgtccttgttgatgaggtccacatcgttgattctcagcagccagtcattgaccctgagaaagggcacagccagttcagcacccacacaggctgtgggaccagcggctaccgcccacaactctcactcagggggctgactgccaaggagtgggtgcctcacatacacgctcagaaaatctcctcttgcaggagtgcacagtggtgaaatttgcaaatgctgaggttagacagcctgggttcaaatcctggccctaccacttactagttgtatgacctagcccctccaggcctcagcgtcttcatatgtaaaatgggggcaataatcacgcctaccttgtaggattgtaaagattaatcaattaatttctataaagtgcttaaaccagtactcagcaaatagcactgtaatagtgttagctattttatcatcatgactatttccctgaatgagcatgccatgtacatcctgggctctcacgcataccccttgagcactttcccacccaaaggagcaaaagacagtacctggtaactaaagaataatcagattcagaggcaactgagaagcactgtttctttcggagcattattagctgctgagactgcaggccttggacagactgtgtgtgagtctaaggctgggaaacgttcacctaagtgctacctggctctcttcgggtcctctgcactgggaagaagggccccaccttgcctccagagcctgggcctcaactcttaccttaagcggccatcagcaatgcttcctttgtccactttagtgacaaatatgccacagtcccccgggaaacaaggctcattca

SEQ ID NO: 5403 - DNA, 2300 bp, Homo sapien
agtttcctcccactttagtcattttcaaaatagttttagtgattctgatgcctttttgtatacattttagaatagccgtctatatctacaaaaatcttgttggcattttgattttattttttaaattaaattttattttttttttgagatggagtttcactctgtcgccaggctggagtgcagcggtgtgacctccactccctgcaacctctgcctccctgattcaagtaattctcctgcctcctgagtagccgaggttacaggcacatgccaccacgcccggctaatttttgtatttttagtagagacgaggtttcaccatgtcggtcaggctggtctcaaactcctgacttctggtgatctgcctgtctcggcctcccaaagtgctgggattacaggcatgaaccactgtgcccagctggcattttgattttaattgtgttaaacctctagataaatttggggagaatttgtcttttttaaaaaaccactgtgaaaactcacagatatcccagcagccttgacctgactctgagttattgggaaacaagggggaaaggaacccattttagctgtttcaaatggcctgcctcgtgaggttcagagccgttacgcggtgggatgtttcacctcccaaggggctgtcaccgtggctctctctgttcacagggaacagatggaatcccagttggaaaaggaggcccggttccgacagctgatggcccacagctcccacgactcggccattgacacggattccatggagtgggaaacggaagttgtagagttcgagagggagacggtaagctgcctctgatggttcttctctccttctctgatggatgaaggaggagacggtgacccgcttgcagtatctcccagtttcaccactccaagtttggaggttctccttttcctcccaggagtgtgaggcatcctttcccagcagctgtccaggctgggttgcagctggggaagggcagggtcctcggaggacgctgacagggatgtctgtctgcagtggccagaaggggcaggttgcagatactcataggtttccatcctggggatggagtgtcttatcagatgaggtgaagggacagtcccccacattggagtgggcagcttcggggcttaagagccaaatgtctctgtcactgctttgtgaaatgcgttgctgttgctgctgtttttgcaggaggatattgacttgaaggcactggggtttgatatggcagaaggtgtgaatgagccttgtttcccgggggactgtggcatatttgtcactaaagtggacaaaggaagcattgctgatggccgcttaaggtaagagttgaggcccaggctctggaggcaaggtggggcccttcttcccagtgcagaggacccgaagagagccaggtagcacttaggtgaacgtttcccagccttagactcacacacagtctgtccaaggcctgcagtctcagcagctaataatgctccgaaagaaacagtgcttctcagttgcctctgaatctgattattctttagttaccaggtactgtcttttgctcctttgggtgggaaagtgctcaaggggtatgcgtgagagcccaggatgtacatggcatgctcattcagggaaatagtcatgatgataaaatagctaacactattacagtgctatttgctgagtactggtttaagcactttatagaaattaattgattaatctttacaatcctacaaggtaggcgtgattattgcccccattttacatatgaagacgctgaggcctggaggggctaggtcatacaactagtaagtggtagggccaggatttgaacccaggctgtctaacctcagcatttgcaaatttcaccactgtgcactcctgcaagaggagattttctgagcgtgtatgtgaggcacccactccttggcagtcagccccctgagtgagagttgtgggcggtagccgctggtcccacagcctgtgtgggtgctgaactggctgtgccctttctcagggtcaatgactggctgctgagaatcaacgatgtggacctcatcaacaaggacaagaagcaggccatcaaggcgctcctcaatggggagggggccatcaacatggtcgtgcggcggaggaagtccctgggtgggaaggtggtcacgccgctgcacatcaacctcagtggacagaaaggtagcgggcctgtgaacatggcagagtgcctcaggtggctggggcccttttttgtggacaggggccgggggtgccccttagagcacctcattcacagggatgaggggccaat

SEQ ID NO: 5404 - DNA, 2300 bp, Homo sapien
ctgaaatgaaccaatcctccctccctctctccctccctcctttccctttctttctctctctttctctttctcctccccttccttccttccttcccttcttccctccttccctccatttctccctcttccttgacttcctctttaagagtctacagtcctagaatctaatgcttaggtcttagaggaagaccttactttcttgttgctatgattctgacttttaaattaagccctcttttgctttttgtgtttttcgtgtttattgagagctgaccctaattccaaagggagtgttccatcgtcccagcttctggttctctaggctgcaaacgcttgataaaccaggctgccactgaatgagccaggtgattcctcggctgttggagctggaagggccagacaagctttcctggtctagcctgggcatttgaggaatccggaagctgaaacccagagaggtggagtgactcaccccagggctcagatcccatgaggtgcttagccaaagccagcagcccccctggcaacctcttaactcatcttcttggtttgtttttttctctataacagcaccccaaatgaactttagtgcctgtcatttagagtagaatgctgtctagcttaaaaccctccacagcttcctgtctcactcaggagacagtcttcactgtgaggcctgcggccatggccacccccatgcccacacccacttctccaggtcccctttgaacccacctccccctgtgcattgggctcttgctactccgccttgcccctctctgtctctagaacacgcctgcaggccctgcctctgggcctttgaccctgcccccctctctgcccagtgtgctctcgctgctcttcttcatttgcctctgaagtcgccttcttcaagaagcctcttcagccttagcctccctcacagacctccactctgctgctcagatggctctctccagcccattattctgttttattttttattttcttgatagttcttaccttgctctgaagttactttatttggcctatctgtgtgtccacaccctccaaattaggataaaaggcccacagggcacagcgtctttctgtcctgtctggcatcaccagcccctagaccagtgctagacatattaggtacttgcatgggatgcggggggaccctacaccatggagggtcaccctagggcttttgagagtctttaggtccgatttacataacctgattctgggctatgtcactttctgggaggactcaaaagattcagtatgtaattatactcaatggctgacatttattacaacaaaagtacacagagcaaagtcggcaaagggggaaaggcgcgtgaggcaaagtccaggggaaactgggcctgagtttccaagaatcctctcctggtggagtttcaccggaggcacttaattcctccagcatggaatcacaacaacacacaagaagtgctggcctccacggaggcccattagagactcagtgctcaagtgtcttattgggggctggtcatgtaggaacttctgcctgccatgtacccagattctggactcccagtagaaagcaggtgttcagcataagccactttatttgtacaggctcagtaccagagctgcttatatcaccagaagaaaagttttacatcagcctagagaactgtttactgttcgggttcctagacgccattcggtagggtcaaccttgcaagcaggcctttctaaggatatagaagtctcaggtcagctgtgttaactgttctgcacaatacttagtaaatagttgtgactgagtgaatctaaatgaatcagcccagtgtgactgcagggcctggagaattggacctcaagactctcaaaagctttagggtaaccccctccccccaaccgccttgtcatcagtctcaccctcagatagacaaaagtgagagtgggaggtctcctccgccacctcccacagacccttggtaagtgaaactgtctggtctccaggtgttgaagcacaacgggtcatccgagattctcaacaaactgtatgacacggccatggacaagttggaggtggtcaagaaggactatgacgcccttcggaagaggtacagtgagaaagtcgccatccacaatgcagacctgagccgcctggagcagctgggggaggagaaccagcggttgctgaagcagacagagatgctgacccagcagagggacacggccatccagctgcagcaccagtgcgccctctccctgaggaggtagggctagggccatcgggggccgggggcaaatgggtccta

SEQ ID NO: 5405 - DNA, 2300 bp, Homo sapien
ttgacaatgaaggcctaagggggacacccctcttagtcaatgagtacatgactccagttcagcgtttccccagcttggagtgaaaggaggttagattccaatgctggaagcccaggccccagatctccagccagatcaaagacttgctttcgaacccttgactcagggtctggttttcagaacccaaaccaccataagcagccatggccaactacttcccagctgcatctagtccagagcacttttcctggaaggcccagtccaagggccacttcctccaggaagctttctgtgattcccctcatcagaactaactgcttcttcccttgagttacttctttctttctgctctacacagaacagaatagccagtcgtgccagacagtgcctgtctccctggcagtgtgataacatttggggccgtgttcaccgtgatccctatgagtaccaaacacctgccccacaaggaggaggcattcccatctctgataaattggctttgcaaaggattacccctgacccaaaagtctgggccaggaatgaaggatcagaggtcacagggcgtcagtggcagcccccacttccctgatggctcaccccaccttcccctgtcaaccagaagaagcactttcaaggaatcttccctgggatatgagagaagccctccagcaatttctcctgccgataagcctggagacctctccatttaataagaaatcttctgctatttcaatcttcatggaatttaaggctggctttataagtgctgcccaagaatgtctcttctcctccttaaaacctccccagttttccaagatgagaaataaaaggctactgagaaattaggtcaggatgaatggggaggaaaaaagtactgattgcctgaaacgagtgtgcagtccccaggcagatccaccaggtagggtcgggggcaggtcacaacaacaggcgcaggaagcgggggagggcctcggggaagctgtgtgtgcttagctgatgaaaactgcccgaggaggccttggcacaaagacctgctgcctttaaggctgttggcaaaggtgtggcgagttgtgagtagggccaggctggagatccgagacccgacagaccgcctgagagaacgctgtctacacgccccaggcttcagcctccaatttcttctcatgctgaatacaacctgccattgttttcccagccgtttccatttagggagatgtaaatggaaaagtggaagtgatgtttttattataaggatcttgctcttgccttttctcaggttcctaagatcaccatgtgaccttaccagcggcccctcctgccagggcggtgtgtgcttgcaaagacttctgcctctcatcaggtgtggctgagccagcaggaactccctggcaggtgctagagtgctcccagccagggccagccccaccaggcactccaccccgagggactggtacaagcctggtacagacattctggttcccttctcagggatgaggttgggccagcccatctcaaactggagggctattaagctgtagaaaccctcagcgtttctgatgcagcaggggtgggaggaggctcaaacctgcatctctaataagtgccccagtggtccagcgaccaggctttgtgagccactggtttcggcacaaacaagcagccaactgtggtcaatgaaaggaggccatactgatggactctggaacaggttcctttgctcataagaaccccgccttcttcttctgccactcaccgcagatggctacagagcacttgaaatgtggtggatttgcctgagaaactagaaatttaaatttcattttaattcatttaaatttaagtagccacctgtgtttagtggcgcccatactggacactgcagacctggacactgtcaggtctggatgtgatggctggagctgctgctacagacaccccgccatgagactgtgtgaagacaccacacagaggagggcagagctgcatccccatgtactggctgacctcagcacagcctcatatgggagctcatacatttcctgattggttaaggtggtatgagtgggtgttccctgctgcctgcacccaaaggacaatggcaatctcaagcagaagagcaagagaagcaaaactcggttccctgtgaactcaagaggctttgcccagaagggatgcaaccagttatttcagcattaaatatccagacacagacagtacagacccatcctgctccaagaaacacatcagagcactgcactctgcctgcctgtgatgcccaggaagagcacagagatactgtt

SEQ ID NO: 5406 - DNA, 2300 bp, Homo sapien
accctcaggcttttcatacctggcagtgctgaccgtggccatccagacctgtttagagatgcagctttctccagcatccacccgctgctcctggtttggctgctggaggccatcaagaacaaatctaatcccttctgacagtcgtattgagagacaagacacctacccattccccagtcattctcttcagcccatgctcaacgccttcagattcttcagagtctctgaaaatgtgataatgaggctactggtcattgccggtcacgcctgtcctagtgcttgccattaccaaagttgctttttgcttgctttctcttttttctctcccccttcatctctttttctgatggacacgcctgctagctcgcctgcctgcagtctatctctctgccctcctgcatggtcctcacctccccagcaaagtctccctgctttcccctcaaggtctctcctgtcccccaggggcctcccacctacagtgcatctccctcccctgccccgctcccccatttacccccatttcttcatttctcctctttcccgtccaaagatgcgtgtagggtggctagtcaagaattgcagtggaagagtgttttttgttttttttttctgagacaggatctcactttgttgcccaggctgaagtgcagtggcatgatcatggctcactgcagccttgacttccctgggcttaggtgatcctcccacctcagactcccaggtagctgggattacaggtgcgtgccaccacgcccagctaattttttgtattttttatagagatggagtttcactatgttgcccaggctggtctcaaactcctgagctgaagcaatctgcccaccttggcctcccaaagcactgggattataggtgtgagccaccgtgccctgctgggagctccttaaatgtggtcctccacatttcttgttgtggagcccaggatctcattagttcttggcagctttctgatgccagagccctaaggcttgttcaaagcccttattgcaaaaattccatctccagctcacccacttggcctggtacataccgctcttcattgtatagttcttttggctccaagaacaaaacactggatttgtccttgttttatctgacctgccatctctgtgtgttatgctttgtccactcccaatttagtctctgagtcagtttgccctcccttttaattttatgtcatccatagtcttgatgagcaaagtgtaccttctgtttccattaatcatggaaattgctgaaatgggatgggggatgggggatgggggatggggtagggaccttataagccatctggttgaactccttcattttgcagaccaggaaacagagttccagaaaacaaaagctacttgctcagcacgacccagctatgggcacctacatagagctaggttcagaaactgggcttcccggtgctgggagggtaacatctggttttgaagatatttgaattcaaaccaaaccacagtggttgtgtgtccacaaccaggaattaacattaagtgtggacaaaaaaaagtgctaccctctggctttggtgatggtacaattgctcatcattttaggagtaacttttaataagggggcagatactaagtaaattattaagaactgagcttgaatacagttagaacctaaagagcagaacagtcagagaaagaacagatagttcagttgttctttaatttctgctctgttaccctctgcatggaagccagaatcatattgctagagatgtggaggaaacccccacaccccatgtttacctggggcatgtcactcccttgctaagcctttccccagatgtcccaacaagaagccagctgactgactccaagttcccctctgcccgcctgcccagagcaggaggggccgataaagtgaggtgggaggcctggcagaaacaccgaagtccagatctgctgagcgcgcctcctctgcttggcccgtggatgtggatttctagtgcctggtgcatgtagctctcatggcctggcattgactgatgatcagctggcttggggtgaagacgagtgaccccttggggttagtaacatggtctcccctctttccccaggttctacctacagcgtcctgtccaccatgccctcagactcagaaagcagcagctccctcagcagtgtgggtgagtaccactgtctggggaggacaccgggtgggccaggggtctgggtgaaagccaaggcagctggggttcatgggagaggaagctggttctcccttgtcagattactcacaggatcatccttccgttgatt

SEQ ID NO: 5407 - DNA, 2300 bp, Homo sapien
gtgtgtgtgtgtgtgtgtgtgtgtgtgtgtctgttgggggacagaggtgagctcaccagcctatgaataatgagctgtgtgaggtgacagctgctcacagaacaaagagacatggagactcaccaccttccctcctttgttaagtccttactgtgtcccagtcactgctgcagtctgtgagatgcagagataaaccaaagcctcatccttgagaagtcctcagcaggaccacatctgcagtttgcagtttgcaggcccagtgcaaaatgaaaattgggagctccttgcggcacataaatcattgaggatttcacgatggcaacagcagagtgcgaagccaattgtgagccttgtgagactgcacaaggtcacacatccatgaaaccaccctgaccccagcctcataggtgaagccaggcctagtagacatcagctagaaccatagggaggcatgcatagggagataggggagcaggtcattcctgggtagggggatctgggaaactcctcggagaggtctcatttgagctgggcctgaagggtcggttgggatgttggtagaggcagtagtgatggtggaatcagaaaactgaatgggaacacctgggaatgggctgggtgtgataagcaagtggcactatagtctggccagaagtgtgggtggtagaagggggagccctgggagggtgtggacaggttaggctgggcccatggagaccctccagtgccagcttccaggcaggttttattctgcggctggagagctggggactcctggaagctcagagatggtacagggctgggctctgggaagctccctctggaggtggcactcgctgatattccagtagctcagaataactactccagcgctaccttgagacatccaagtgtaaagcataattatttacaggcatgcgccactatgcccagctaattttgtatttttagtagagatggggtttctccatgttggtcaggctggtattgaactcccgacctcaggtgatctgcatgcctcggcctcccaaagtgttgggattacaggcgtgaaccaccgtgcccggccgtaaagtgtaattattgacctcatcctctgtgtgccattatagaggaggaatcagaggtgcagagaggtattatgtaccttgcccgtggtggtaaatggcaaacctgggaccctagagacccaaggtgaatcgtggggtggatgagatgagttgagctatgagaggtgtggccacatcgtggcagtggagaggaagtgacgagcacaagaggcttggaggtaggacaggtagaccttggctgctgatgggctcaagagcgccctccagctgaagacatcctgctgcagctcagcatccgtgttggcaggggcatccctctttgagaagctgcttgccgttctcattggtaaatcctgctagctgttgtctataggtttttggccccaatctgcctctaagtttccccttttcctcatcaccaccttttgggcatgttgtattttttttcttcttgcaactcttggttcttccctgccttccacatttgttgtggctttgtgctgagtacagtggttcaggtatggtcagagcagctggggtagatggaactgacttcagtatatctcagtggatgctcttggctttgggatcttctgcacttttgggatgctcaccatctctggctcccacctacagtgcccctccctatcattgtgtccaccgtaccatgtctccacacatttccaaatacttcctaggatggttgtcaaccactggctcaattctcagattactcctgggataggttctagcctcctccttgtaacaccttttcttttcttgccctccaatgtcagagggtgcagtgcttagcataaagatacggaggcagatgaagtagcctgtgaccctgcctaaccccttcttgggtctggaacctgcattctgtccattctcccagcctagcaggtgacctgctggagctcagtaactcgacaccgccttgctaattgtctgctgaggtcacagtgagctcttgtcaccgcccatccagcaggaccacagtccccgactgggttgactggttcagccactgttctggacactcatgggaaacaagtggcctttgtcatgagctggtggacagagtgcgctgtcagcacgggtgagggctggatacccagagtttttggggaaggctgcacccagggcagccagctcagagctgggaggcccagaacagacctcattttctctgataatggggagcacagagttgcagagactttt

SEQ ID NO: 5408 - DNA, 2300 bp, Homo sapien
gggctggctgtgtcttactcatctgtggatccccagcgcccagcatggcagctagcctaggaagttcagtaaatgtgtttagatggggagattaacctggcttcttaaactggcatgcatgggtaataggcaacagttgaaagatgatcagcctttctcacaaacagaccaacttggggtacaaactgagtaacttcccgacaccctcttctttctctcgggtagttaaagctgtactagcccttaaaacacattctgtcagctcgttctctcacgcatcaagttcatatgttacccatataacagttgactcaaatgcagcaacctgctctccagtttggggatttctctagcctgtctcttgctgcctgccttgtggctcctttgcagaagagatgagttgtatccaggaacgtagcacatgaaccattgtgaaagtgtcaggtaaaggggaggccccacggaagcttttaattagcctggcctccaacctccagcctccctagagcttcccacagaggctgcgtgtgttgccatgaactgagcatgaattttcaagggcaaatattttgtcgtgggtgaaaaaaactactctttttatgaataaagcatagatatatatacacatatagtacataaaacatatgtagcatatttatggtattaatttcatggtgcgggtggggggtgcttagaacaaacctgactaaaaggacttcttagaggggcaacaatgaaataaacgaagaacaacactggaatcagtaacacctacacctggccatgttgcaggtgaacgctgagacagtgagatattccatctgcacatccaagctccgtgtgaagcccggtgatgtggctgttcatggtgaggctgtggtgtgtgtcacccccagagagaacagcaagagctccatgtactacgtgctgcagttcctgaaagaggatctccccaaggtgaaacagaagtcgcttctcatggagacccagcatctccctgtggtgtgacacccagggctgggacctaagggctttgtcacttagtccgatttcttaatttcttcttggccttatccccaaggagttagtctgttagattcctctctgttctatcaaaaaactgatgttaggatgaggtgcagtcccctgaacaacttctgttctcccttatccctaaaactagctctagtgtgttaacagatgaccactgctgaaagctggggtgatcaaggtgatcagcccagggcatggctcaccccgtcctcacagctttctctgtctctgaatccaggtggtggtgcagggcattccagaggtgtccagagctgtcatccacattgacgagcagagtggaaaggagaagtacaagcttctggtggaaggtgataacctgcgggcagtcatggccacacacggtgtgaagggcacccgaaccacctccaataacacctatgaggtaccactcagcccacggggtcgccttagggttaggctgtcttccttgtgccatctgcaggccttccactgattcccagtatacttcttttttttttttttttttttttttttttgagatggagtcttgctctgttgcccaggctggagtgcagtggcgtgatctctgctcactgcaagctctgcctcccgggttcacgccattctcctgcctcagcctcccgagtagctgggactacaggcacccaccaccacgcccggctaatttttttttttttttttttttgtatttttagtagaaatggggtttcaccatgttagccaggatggtctcgatctcctgacctcatgatccgcccgcctcggcctcccaaagtgctgggattacaggcatgagccactgtgcccggcctcccagcatacttctctgaccatcccatttgccgtgggtctgcaactgaaaattgcccagcaatccatttctggaaaacggcacagggtttgctttgaaactgcagggcagaggagaaagtggagagaatttgcagtggcctcccggaaggggctgcttctgctcattactggctctctgtaggtggagaaaactctgggcatcgaggccgcccggacaacgatcatcaatgaaatccagtacaccatggtgaaccacggcatgagcatcgacaggaggcacgtgatgctgctctccgacctcatgacctacaaggtatgtgggcaggaggcccccgggctgcctgggcatcccgaaactcactttcaggagaataagcctgtggagtttctaagacatgtagaatacgctgctgtgaggaccatcatagaga

SEQ ID NO: 5409 - DNA, 2300 bp, Homo sapien
gcatctgtactcatccagacacacagagcagctgaatgcctgcatttggccagagtgccattcaagcttaccgccactgtgatttccttgctgctacaaaggaggggcagtctatctcctcttccccatattctcagagactatatcatccctaggccacaccagagcagccgatgccagctcccgggatggcaggataatggcctctggaggatggttgctactacatggcaggtgccatcagctcaccctgagaattgctttaagagccagtctgtagtccgtgatgattgacccactgtgagcaggatgttaaccgctcctctgtaagtgctccttccctgtgagcactctccaggggaaggtgctggctgatcctggctttaggagtggtggtgggctgggtctatttcacagacacactgtaaatcctaaaacagatagttttacccatttgagtggttgccagaaaacctgagtcagggctgtagtctctagccctgctctgatcttccacctgtgtatttttcaccttcttcttgctctacttggtcatcctcccggggctgagagtgctgttcttaaatacagtgggaatcgcagcatatactgatgcttcacatctggctttgacaatggtttccaggaatccttacagacttctaattgtgtgtgggaagacagtgtaggcctaggcctgtggggagaggtggttaccagaggggaaaagataagctgggtttggggagtgttttctttgaaatgaaggtaagctcaaagtgtgtttgaaatgcatttactgtcaacaaagctatgctttagttggtagtatttaaactgagcataataccttcagaagaaaccctcaaaaattaatctgtagaagaacagtataaatgcttcagtcgtacctgtcttgagctgtgttcttatagccctcgtggcacgtgggagagcaagaacaaaggctcccacgcactttgtgggctctgtagatagtgccatgagagcagttggaggagaaggtcttagagacacattaaccaatggagtgtgtgtctggggtatggacagtgtggtgtgttccttggaaaaccactttgtagtagaagcagtatccagattgggtcctttatactatatatggagctaacactaaaatatgatggacttgtcatatacaactgaggtttatgaaatgaattatgtcatctgcatgactgtgaaacttacaaatgatgtttgctgtgtaatctttcaggaaataaaaaaattcattaagggggtctctgagaagatcaagaaaaccagagataaatatggcatcaatgataacggcacaacagaggtaatatccctccaagacgcgttagaaccccgagctgtttgtagttgccgctggccctaactctgtgcttggcttgtattctcccagccccgtgtgctgtaccagctggaccgcatcacccccacccaagtagaaaagtttctggagacctgtagggacaagtacatgaggtagggatgcttttgtcttggactgacggtcatccacataggtctcacgtatcccttctgtttccccatgtgtacaaaaccctgcaccagctcacttgttaactgccagtatttgatcagattctgtcacattttctgtagggggtctgatgaattgccagtctgaatgctccaagataacggaaataattgcaaggaaatttcttagtgtcttctccccatggggaaactgctaacgaatatggcagatgccactgctctgtttgccatcagtaccattggttagcagactgcttagattttctgcatccattacatgctgaccacaagcagccatgcagaattgagttgcactgctgccccctctctgacctttactttcccctgtctgtacctatttctggtctatgccaggctttttctctgtcacagacataccctttccgaccctaatagcatctatattctctgttgaaaggtgataaccagaagcctctccccagcagttttgctggacttttctttggcatgctgcaatctcatccatacctttgccttctagggcacagatggagccaggttctgcagtgggtgctctgtgtgcccagagcattggtgagccaggcacccagatgaccctgaagactttccactttgcaggtgtggcctccatgaacatcaccctgggcgtgccccggattaaagagatcatcaacgcttccaaggccatcaggtgcctgctttcatttccttcttgttccacacatgcctgtcctgtttcc

SEQ ID NO: 5410 - DNA, 2300 bp, Homo sapien
attaattcgcaagaactttagagttctcaagaaactctttttaaagagaaactctcctgattccttgttattaatgatgagtctgacactgtgttttcagatacagttaccttttgcaaaccagagatgaaaaataaagctgtagagggcagtgggacaacctcttctggcatggctctaacagaatattcaaaggcatttgcacttgctgccactgaatttttcctctatatattcagtataagagggggctttgcctggcagtggctgggtccttttgagaaaggtcccgaaagccctcttggcccagatgttgccatttgatcaccagttgttaaaagctgccttacctgttggcacaggaaaaacaggagcagaacctaaggccaagccttagacccagaaggttttcatctgcaagggactgtgcacacatagggagtaaaattaacacacctaaaacaatctgccggcttaggcactgggaatgacatagctcagctttcaccccaatggacacatttcccgtgggtttgctgaatgactttccctacacaaaggttctggaaattaggtttaaaaataaaaaaagaaaaacagctcactttttggaaatgaaaactgaaacaatctgctaaaaattcacactgagtcaacccatgcatactagagggaacgaactcacaacatggctattggcaggcaattcatcacacgattaaccagaagttagtgtctcatgctccacagcaggcctatgagcacgggcattctcctctggcagggacctgggctcaatgccactcaggagtgcctctgtcacctcagctctgatacgggctagggctggagaacatttcacgggctcagacacatctgttctggccagtggattttggaccctctcagcaaatctgagctcatcggattgtgagctgccggtggcaaggacatgtttagtcatccttgcatccccaggatctgtggactgtgtgacatatggtgagggctaaaccagtgctcactgaataaacaaatgctgccgggtaggaggtcacctgtgttaaaccttttcaagggcaagaaaggaaccagtccaaagcaaagcagtgtttgccagaaccgggacagaaacctgctctctctggcgctggcaaatgctggggtgctgctggagtgggccctttctgttggcgttcacagcatgctaagtacgttacctcgttatagctttcataacctgtctcagttaaggtctttgaggacaaacagataaatacgtaaacatgagcgtgaagaaaaaccaaattacaactctaatttgttagttaaaaaaaaagaataagaaagcctttggaggagaaaaacagacaaaggcacccagccttgccacactcttgattttaaaatctggaagagtctctttttcacctttcacaccttgacacatgaacacaagaagcgaggagcttccttaacacaaatattcttatttaagcttcactcgctgtttttatttttgatctacggaaagagatacattcttctttggcctgctgatcttgtgctacatttgaattactatttagtacacaaaggaaaccatttactgatttctgtatccctttgcttttgatcctaaccatgattataaacatgaaggagctgcctgagcaggtcagaaccataaaaaaaaaacaaaaaacaaacgaaccaaaaaaccttaagagggtatcaaagtaacagctccctggaagaatagaaaaggctgattcaatggatttttgatccacaatacagcaaaagaaagagcagtttaaaataaatggtatcaaaacaagactactagtactaataattattgggattcagaatgattgagggaagagttggctcacaagatagagtaggtagtaggctggtgttagggacagcgctcaaacaaaatcagcatttttcttctaacaggggaaaaaaacatttttcttctaatagggaaatggcttgagtgaaagacataaactaagaaagtcatgagataaattctgcttgttggctggtgagattttgccttggccatttttgaatgactgcctgtcatttttttttttttttttgagatggagtcttgctctgttgcccaggctgaagtgcagtggtgccatcccggtgtactgcaacctccgcctctcaggttcaagcgattctcctgcctcagcctcccgagctgggattacaggtgcccgccaccacgcccggctaatttttgtatttttagtagagacagggtctcatcgtgt

SEQ ID NO: 5411 - DNA, 2300 bp, Homo sapien
atgagactcacagttagcccagatcatagatgttcctggtcagcttgtgttgtgtgtcctcagttgagttactaatgatccaagagttaacttctccaaaatggtgttccacaagacagttgtttaagaggttccagaacacattcaatgcagaccagggcttgtggtgctggtgtcacaacttttaaaccttacaagcccccagtaagttattgcagatcaagtcgccacctgtttctaggatcacagaaggttcctatagatcagtctagcctacccgttttaccagtgaggaaaccaagcaccaggaaaggaattggccatgtcactcagtgagcaaacagctgagttgacactggaagctggaagcttgtttgccagtctgttgttcacattatactcaagaccataggcagcaggctgcccaggatgcctctctttctcctagaatctgaacaaggaaagtaaagattaagacgcatttcagtatcatttgttagtttctagttacctgggagtaacttattgtggtttttttgtactgcaggtaaacaaagcaaacatcaatttcttgaggaaactggttcaaaacggccctgaggttcacccaggagcaaacttcattcagcagagacatacgcagatgaaaaggtaatcttttcccaatctagttggatttaactactttctcatggcaaagctcactgtggtcatactcagccacagaatgcaatccagaaatacagtttgcgtgacattttggcatgtggaaaatatctgtttaaatttccgtgagccaaggtatgtcatttgctctgttcagtcattgaatatacatgaagtgctcctttgttctcaggcttgtaatgttattggatccaggaggacaaaataccatggatactaaagtctaaagaggatcattattgctgggcttggtggctcacacctttaatcccagcactttgtgaggccaaggtgggcaaatcacttgaggccaggagttcaagaccagcctggccaatatggcaaagaaaccccttttctactaaaaatacaaaaattagctgggcacggtagcacacgtatgtagtcccagctactcagaagcctgagacacaaaaatcacttgaacccaggaggcagaggttgcagtgagctgagatcacaccactgcactccagcctgggcgacagagcaagactctgtctcagaaatacaataaatatataaagtggatcattgcctgtgtcacctgggctctcagggcttttagcatttctaaaattaggatatgtcttttttttttttttcaagacagagtcttgctgtgttacccaggctggagagtagtggcacgatcttgactcactgcaacctccacctcccaggttcaagcaagtttcctgcctcagtcacccgagtagctgggattacaggcacccgccaccacacctgactaatttttgtatttttagtagcgacgggttttcaccatgttgaccaggctggtttcgaactcctgacctggtgatccagctgcctcagcctcccaaagtgctaggattacagccatgagccaccacatccgactggatatatcttaagatcaatttatcatggtttttttttttttttttttgatgtctcagtctgtcactcaggctggagcgcaatggcacaatcatggctcactgcagtctccacctcctctgctcaggtgatcctcccaccttaggctccaaagtagatgggattaaaggcacacaccccaccacgtttggctaatttttgtattttttgtagagacaaggtctcaccatgttgcccagtctgttctcaatctcctgggctcaagcagtccgcccatctcagcctcccaaagtgctgagattacaagagtgagtcacctcgcccaccctgtcatagtttaatagggagcttttttcttggcacataaaactatatgacattaaaatggaggcatcttagatttgatgaaataatatattaaagattgaatcctgatctgaagagggagaaacttggtgagagaactttgctttcacagatcatgtttattgttgcacattcaggtttttgaaatacggaaatcgagaaaagatggctcaagagctcaagtatggtgacatcgtagagagacacctcatcgatggagatgtggtgctgttcaatcggcagccctcgctgcacaaattgagcattatggctcatctggtgagtagcactgctttttaaattttccatcacgtagaaatttgccatgactgttcagtgct

SEQ ID NO: 5412 - DNA, 2300 bp, Homo sapien
gtgtatatatacacatatatctatatctatatctatatatatatatatatatattttttttttttttttttttgaggcagagtcttgctctgttgcccaggctggagtgcagtggcacaatcttggctcactgcaacctccgcctcccggatttaagcgattctcctgccttagcctcctgagttgctggaattacaggaatgcgccaccacaccaggctaatttttgtattttttagtagagacggagtttcaccatattggtcaggctggtctcaaattcctgacctcatgatctgcccacctcggcctcccaaagtgctgagattacaggcgtgagccaccgcgcccggcctgcacaactttattttttatttttttttatttttgagatggagtttcactcttgtcgcccaggctgcagtgcaatggcatggtctcggctcactgcaacctccacctcccagcttcaagcgattctcctgcctcagcctcccgagtacctgggattacaggcgcacaccaccaaccccagctaatttttgtatttttagtagagatggggtttcaccatgttgaccaggctggtcccgaactcctgacctcaggtgatccgcccaccttggcctcccaaagtgctaggattacaggcgtgagccaccacgcctggctgcctacacaactttaaatggtgaaagctagactcccatgatggcactgtgatttcataacttttgctcttaacctctagataagtcacacacgatccaacccttgttggtataatattgtaaacatcagagccgggtgtggtggctcacacctgtaatcctatcactttgggagactgaggcgggcggatcacgaggtcagggattcgagaccagcctggccaacatagtaaaaccccgtctctactaaaaatacaaaaattagctgggcgtggtggcgggcgcttgtagtcccagctactcgggaggctgagccaggagaatcgcttgaacccgggaggcggaggttgcggtgagccgagatttcgccactgcactccagtctaggcgacagagcgagactccgtctcaaaaaaaaaaaaaaaaaaaaaacaaaaaaaacccataatgttgactatatatatatatatatatatatatatatagtcaacattatttcatgattaagtgatggagtaccgaaatgagttagaaaaacctgatatgcctcgtttgtctgtgacattgtgttttgctagtgaggatccatggcgtctgaaaatgagatagcgtcccttcttaaaaattgaaagttgttaaacacttttgttaagttctgttttgagtttctcacaaataatgaggacttagttctaattctaagcgctaagccctgtggtgatgtgatttccttgctaggctcatgcactaatatatcacactaggatcacctcccacaagttctcacagactgtagacaacttatttcaagacatgaatgatctttactttccattctcccttttcttctgtagattaccatggctgttttcactctaacagattttcaactgtttttgtaatcaataatgtaagtttaattcttcccccctccctccaaataacttcatgaactggaggcacatgtgcgcccatattttccgctctgttttcctttgttggtcctccacagatagtgccctctgttggatgggccggttcattttagcttccaccttcccttaaaacaattagaagctcttaatttagatggtactgatgttaatgatgatgattttccattttatgcaagttttggccctctgcttgtctaaaagccttgaggcaaagagttatatgcagtttctctgcgggtgtctgattacgtggagaaattgaccagaaatgggatttttaaaatacagcacacgcctcggtgcggcttccagtaagcgccaccaggtgacggtgcggggaaagggaaaaaaaaaaaaaaaaaaggcatgccggaagtctctcttgacagacagacgcgcgggcgagtagcggaagaggaagcggacacgtgggacactctacggtggccgagaggatgccgcagatgtgttagcggcgagtccagaagcagccccaggaggtgctgggggcatcgtttctctaatctggcctcccgagtgccaaggaggcgtcccggcagcggtcatcatggtgaaggagcagttccgggagacggatgtggccaagaaaatgtaagacggagtaagagtggccaaagggctgagaaatagggcaaggggtccgaggtcagcgg

SEQ ID NO: 5413 - DNA, 2300 bp, Homo sapien
aatgtaacaggcacattacaatcactcaataaatattcttctgcctcagcctcccgagtagctgggactacaggtgcgcaccaccatgcctggctaatttttgtatttttagtagagacggggtttcaccatattggctaggctggtcttgaactcctgacctcgtgatctgcctgcctcggccttccagagtgctgggattacaggcatgagccaccgtgcccagccggctgactattttcttaagaataaggatagttggtcacctcgggaggctgaggcagaagaatcgcttgaacttgggaggcggatgttgcagtgacccgagatcccgccactgcactccagcctgggtgacagagcgagatgcggtctcaaaaaaaaaaaaaaaaacaaaaaacgaaaaaaaagaaaaatagtcggccggggacggtggctcacgcctataatcccagcactttgagaggccgaggcgggggcggatcacttgcggtcaggagttggagaccagcctggccaacatggtgaaaccccgtctctcctaaaaatacaaaaattagctgggcattgtggcgcaggcctgtaattttagttactctggaagctgagccaggagaatcgcttgaatccgggaggtcgaggttgcagtgagccgcgatgaagccattgctctccaacctgggtgacaagagctagactctgtctcaggaaaaaaaaaaaaagaaaataggaaagctgcccgcaaagcctgcaccttggacacctcgtctgcactaacatttgggaaattcttcttattatttctccggaacatatatatttacattctttacatgtctgtttcacgttaaagaaaatatttctggagcaatcaatttttttttcctttttttttttttttttctgagacggagtttcgctcttattgcccaggcggagtgcaatggtgcgatctcggcccactgcaacctccgcctcccgggttcaagcgattctcctgtctcagcctcccagatagctgggattagaggcatgcaccaccacgcccggccaatttttttttttttgtagtagagacggggtttcgccattttgcccaggctggtatcgaacttctgacctcaggtcatctacctgcttcggcctcccaaagtgttgggattataggcgtgagccactgcccctggcttccaatttttttttccttttttttcttttcttttttttttttttctgagacggattttcgctcctgttgcccaggctggagtgcaatggtgtgatctcggcccactgcaacctttgcttcccgggttctggcgattctcctgcctcagcctcccgagtagctgggattacaggcatgagccaccacgccccgctaattttgtattttgtatttatttatttatttattttcgtagatacgtggtttcgccatgttggccaggctggtatcgaactcctgacctcaggtgatccgcccgccttgccctcccaaagtgctgggattacaggcgtggccatcgcgcccggccaaatatttttcaaaatctaattttgcataatgaccaagatttgcagaaaaatacaaattaaagagatcttttaaagtaaagattcgtcataaaagtcacagaaataatactcatgaataataaattagaatgggcaatgttaagtacttgaaataacaaaggttttagagtcagggtttctgcagtttccctagccatataacgaggagactgttagagaggatatcctaaaatgctttccaagtttacccacctctaactcggaagaaggcaatttaaactaatttggtttaccggaattcaaatacgtacaattcaacataatgaattgaactgaaattgaacacctgcttgcgtaaacctagtcggctcgagttgttctggttctggattggtcagtctagagttccaggggtgtggccaaaagtctgtgaggcggggccgtaggcagcctaaatcaggcatcggcgcggtcagcctcgtggcgcgcccacgcccccacgccggctcttcccggggtccttccgtgcgcgttgatatgattggccggcgaatcgtggttctcttttcctccttggctgtctgaagatagatcgccatcatggtgagtctccctgggcccgtgcagtcatctgccgcgtatccgagccatccgtggtccctgggtcccagtacttgagctataggcacgcgaagcccggttgctcttctctggccgtttctgtcagaggatggttgtcgaggggctcggggctgttggca

SEQ ID NO: 5414 - DNA, 2300 bp, Homo sapien
acagatcagcttgaggccagagtttgagatcagcctggctaactaacatggtgaggacctggtctctactaaaaatgaaaaaattagcaggtgtggtggcaaacgcctgtaatcccagctattgggaggctgaggcatgagaactgcttgagcctgggaggcaggggttgcatgagctgagattgtgccattgacctgagattgtgccattgcacacaggcctgggtgacagagcaagactctgtctcaaaaaaaaaaaaaaaaaggttctcattgggagcccctatacaatggctctgggtaagagacagctcaggggaacgagggcagggaggaggactacatggatcccatgcagcttttgtccctggaccaaggccagacagagatgtgaccctaggaaatgacagcttttgtggtgtgtcggctggggcccctggtgaggtactggatgtggctggcagcggttctcactttgtggctgacttcatcaggcagttgcagaggaatgggaagacttagttagtagtgcagtctgaaggaaggagcctccgagactgtccagctgatctctttgcttcattcaccccagaggaggcagaggccccaggaaaggagctgacctctctaagcccacatggtgcatgggggcagggactggcccatggacctgatctcctgttgtctatcccaggactcctcccacggtgcgttggagaggcatttctggccccagagagcaaagagctctaccaagaacacggctcagagagaccaaagagaacaagaaccatagaagatgacatgggagactaggatatgattcaggttattctaaaatgccatttgcattcttaggaaagaagtgccatttaattactctatgtgcctgatagcaactccaacagccagagaagatgtaccctaggaggcctttcatggtggagacagtcctcattctgaacttctaaaaggatcccagccttgatgcttgaacactgctgggggagggtcaattgtcacaccattatgagaaacaattaggcattatccagaaaagtctgagaagcccacaccttatgacccggagagcctttggagtagtacacagaaaatctcttggacccgtgctccaggaggcacaggtaagaatgttcgtgccacattactgaatacaacccaaatgctcattgcagtagaacggatcagtaaactgtgtatgttcatcccacggagaatgagcgatctacagctacatgtgaataaatctcaggaatgtaacgttgagtgaaaagagcaggtctcagaagaatacacagagcgtgattttatttatgggaaataaaaagacacgcaaaactactgtttagggatacaaatatgtatagtaaaattacaaagaagggcaaaggagtgagaagaataaagttcaggatggtggtgtttgtggttactgctctaggaagggaagggactagaatcagggggatcacacaaggcaccaaaatgatcaagttcagtttgttcagctgggtggttggtatatgggtgggttatgggtattcttattcatttatatatatttattttcttttttaaacttccttttatttttttagagatggggacttgctatgttgccaggctggtctcgaactcctggcttcaagcctcataaaatgttgaaattacaggcgtgagccgttccacttggcttttttattttagccttacatatattttataattgttattttgtgttacaataaatatgtaacagatttcaagtgtggttgttttataaaataacagataaataagcaaaaaatataagttgcttattatctctcctctaggagacaaactgatatggtttggctgtgtccccacccaaatctcatctcgaattgcagcttccataattccctcatgttgtgagagggagccagtgggagatactgggttcctcccagtacgggagtattcccgcacactgttctcatggtggtgagtaagtctcacaagatctgatggttttataaggggaaaaccctttcgcttggctctcactcttctcttgtctgctgccatgtgagatgtgcctttcaccttctgccatgattgtgaggcctccccagccacgtggaactgtgagtccattaaacctcttccttttgtaaattggccagtcttgggtatgtctttatcagcaacatgaaaacggacttatacacaaacacagtgaaaatggactaatacacaaacacaggccatcttttggtgtgggtcatcccaggctt

SEQ ID NO: 5415 - DNA, 2300 bp, Homo sapien
aaaaaccaaaaaaaaaaaaaaaaaaaccaaaggaccaggcccggtggctcacgcctgtaatcccagcactttgggaggccaaggcgggtggatcacaaggtcagaagatcaagatcatcctggctaacatgtaaaaatacaaaaaaaaattagctgggcatggtggtgggcacctgtagtcccagctacttgagaggctgaggcaggagaatggtgtgaacctggagtgtgcagtgagccgagatcgcgccactgcactccagcttggacgacagagcgagactgtctcaaaaaaaaaaatcatgtggtgtgaggtagggatagaatttaaatttgctccctagtaggttggtcagttatcctcaagccataattcactgaatagtccatattttcccataatgacatgaaattctatcttaaaagtatattaaagtttaaatatattatgtattgaatctgcctcattgttccgtctgctaatttttttttgctagtaccacactgttttaattattgcagatttagaatgcattttaaaatttgcagaacaaatatccctttagtgatgttcttttttcagaaatttattagtgagcagtagaagtttatttttctagaggatcttttgaattattattgtaatttttattcttctttttttttttttttttttttttttaccttcccagggggaaagggcctgagcttgtacattcttcagccaagtagcaaacctctctttcacagatggtcagaatacataaaatcatatgatataaagacacagatggtgtgttcccactcactatgctgcccgccttttaattttactctcactgctgtcctgtgactttaggaaagggcggttattgtgtacagcacaagtacaaggcttagaaaatattttttttcccccaaaggcacacaaataaatattagacatagaactgaaatgcctttttgtgttcataagacttcttagaaagaatgacagtctaggaattaaagtctgtgcttctaatgggaaatccttggtcctgatgtgtttacattgaagcaactattttaactgagtcttatgaaagaccttcttaggagtgacaggtatgagctattgcaacaaaacatagtgtacaatcttatgtgagggtctttaaatagagagccggttataaagactgtgtccctgatgtgtggggctggtcctcctccccagcagacctcacctccctgccctttcagcatcccctccttggccccagctgatggctgatgctcccattggtctctgtggtgctacctgccactggcctgccaagacctcagaccctcgctgtctccttgtcccatttcccctgaggcttgtggctggttctgtggttatgactgagttggcccttctgacatcctgatccagacacttcccaacctaggctgtctcagctctccaaaagcaccctgaaaataaaaatggaaaggagtttggctccttgggtgaggttgttcctgctctccctaagacactgttcttttctgtaaatttcacctatctgaaagaaacagaatgcttcttgtttcttggtggggaaaagtaaccataatggaatgccgccttcatgctaggcattttacaggtcaccccatttaatcttcacaattctataggaagggatgcttgtctctgctttagagaggaggaaactgaggccagagggtttatggaacatgtgcaatgtcatgtggaatgttaatagtgaagccagggccaaaaccgaggtctgcctgagtccaagtccaattccacaaacatgatgttaacatactcctcggtgccaggcactgtgttttaggggcatagctgcctccctattgtcaaggattttgagcagatcagatttgaggaccttttttcgataggtctatatttttcttacagccactccccattttaagcgcatcgtgagtaggcttttggagtctgatctatcgagctgggtatgtttggaaagctacagagcagtagccatagaaagactgcgtgagacagagtcctagcctatctgtccggccagtcgaacctcatgtgttcgctgctttcattttcccttggctgaggaaacgatggtttggttttgcaaaggaatgctggggacttctgccagcttgctaacggccttgccccattcagatgcatcgaactcacagaacatcgctccccagctgctggctcgcggttctgagagtgcctgaatagaaaaccactcatttcccttcgcaaaagaggcgcccaaagcaga

SEQ ID NO: 5416 - DNA, 2300 bp, Homo sapien
ttcaatctatcagtctataccacatagcaccggcatctgctcctggtgaggccttaggaagcttccaatcatggtggaaagtggaagggacccagtgtatcacaaggcaagagggagcaagggagaggaggaggtgccaggctcctttaaacacaccatctctttcttgaactaacagattgagaacactcattacctcaagaacggcaccaaaccgttcatgagggatccaaccctatggtccaaacaattcccactaggcccatctccaacactgaggaatcacatttcaacatgggatttggaggggatgagcatccaaaccatatcatgtgtcagtaacatttcctgaacttcagtaaacaccagaactgattgctgtcctctgttactcaggtccatgtgggaccagggatattaaaaggagggaggatcctgatggaaaatgcagcagaatatcaatgcttatgaatagacatccgatttcctcccccaccaagtgtgtgggaccgctctgtagatagccttccccctcactgcctgaggctatgggattccctgcttggtatccagccccatgctatgccctgaggtggtcttggaggtctttgctgccaggagttcacagctagttagggaggtaaggcacaaaccaggtcgagacaggtagaggagcaggatggggcagcaggagggtgcagggtcagggtggggaggtcacagaggctgactcctgaatgcaattgcagagactcgagatttagagcaaatttttaaagcttcttcagactatgagcttcttcacaaggtgagggaagaagagaattccaggcagagaaaacagcaagtggaaaggtgaaaaggcagtgtgtgtgtgcatgtgtgcctgtgcattgtgtgtgtgagagcatgtgtgcatgtgggcctgtgtgcacatgagcatgtgtgtgtgtgcgtgtccatgagtgaactgatgaagtttctggacagtgatgtgagggaggtgggaaggaggagggaggaggtgagaggagaaggagctggtgagggaggtgaggtccaggctgtgaaggccttgaatttccctggacatggcagcaggcccctgaagggtttaggtaagtgctagtgtgatcatttctattttagaaaaacaatactagcagctgaaggccgggcgcggtggttcacgcctgtaatcccagcactttgggaggccgaggctggcgggtcacctgaggtcaggagttcaagaccagcctggccaacatggtgaaaccccgtctctactaaaaatacaaaaattagccgggcatggtggtgggcacctgtaatcccagctacttgggaagctgaggcaggataattgcttgaacctaggaggtggaggttgcagtgagctgagatcatgccattgcactctagcctgggcaacaggagcaacaatagtctcaaaaaaaaaaaaaaaaaaaaaaagaatagattaggaggtgaggccagaggcagggccactcactagcaggctgttggaagaagccagaagagggggtagcaggagccccatcaaggctgcggcactaaggatatggacaggggatggctggaatggccatggcctggtgactgatcgactggtgtgtgaggagagggcctctcaggagataagagtccagggtcactccagggtatctagtctgctggcagggaggggacgagtggggacattaaccaggatggggcccctggaggagacctagtcccagggcggggtggggacgatttgcagccctgggtgggtgggaggtgagatcaccgtatggtattaggtgtcctgttctgggcctgacccaggtttgcttggtaaagcctacttctgggctctttcctcttccccttttcctttctgcttccattcccttcctccctggtacagtttcccagtctcctcccttccccttcagcagcgatctcaagataaacagctggggaagaggagctgtggaaacgtccaatcagggaaggttattaacccaggattctaattatggtgttgccctgtgtctcttgcatggtaacaagccagcctcaactgcttgagctaagagcaagctcagtgtttccttcaagcagcatcgtggacagattcctgccagacccttcagagcaagcaccccacacccctagcccagggtctcttcatcgatagggggtgatctgtctgcccctcactgttttctccaaataggtaagaccgggtggccaagcatgtgattggcagcaaagtgcacatcagcacagca

SEQ ID NO: 5417 - DNA, 2300 bp, Homo sapien
gtgcactgtctgtgtctcaatctaggctggcccctaaccttatcaaggatctaagaagaccacacagccctcacataaggtgagaagatgtttgccaaagccctttccacattcatcatctcattttcttctcgtaagagaagagatacaatttcaacccatttcatagatatggaagctgaagtctggagaatgtttaaatggcacatgtggctttgctgagcgcttgctactcgctaagctctgactgtcataagcaggtctctatcctcatggaacttctggtctagttcagaagcaaatcaagaagtacctacatactctatgaaaaagaagaagaggccgggcgcggtggctcacgcctgtaatcccagcactttgggaggctgaggcgggcggatcacgaggtcaggagatcgagaccatcctggctaacacgggaaaccccgtctctactaaaaatacaaaaaattagccgggcgtggtagcgggcgcctgtagtcccagctactcaggaggctgaggcaggagaatggcgtgaacccgggaggcggagcttgcagtgagccgagatcgcgccactgcactccagcctgggcgacagagcgagactccgtctcaaaaaaaaaaaaaaaaagaaagaaagaaaaagaagaagaaggtgttttaaaagaaaataacaagaggcctaggtgggtggggatgcttgtctgaggttgagacagagtcaagggaagagcatttcagggagatggaatagagggtgcacaagccctgtggtgggaaggccctgaatgctcctgctgctgacaggtggccctgtgggcaggaggtgagcaaggcccattcccttgcaagaatccttgcaatgaaccatgccttcctgcctggcgctgcgttccaactcagggtttctgaccagtctccagccccctcactgctccccagggcctggtcagcccctgctttgggtggtgtccccaccctgcaacagggagccccctctctgcctgacccttcccatctgctgggatctccccaaagcagccccctgctccctgcccagtgtggtcccttcagctctcaggaccacccctttcctggagcccacaggcagcattcctaggagccaggggtgggggcagctgagggcggctgtgtgagctttcatgagcattacatctggagagggagacgggaatgtttgtgtctgaaatttagctaatatcccaggaatttctcctggcgttttggagggttcctagggggactgcaaagccaggatgtctgggttctgggggcagaccggccacgctcaaagcctctttgtctccctggctctgcctctgtgtcgacctggcagtgtgtctgtgtatttttgcatgtatgtgtctgggtgtcagagtgtctccctctgcgtgtatctctttctgtcggaggtgtgtgtgggtctgtctgtgtgcgtgctgggatgtgtgtatgtgtgagtgtgcgcgcgtgtggatgtatgtgtcttttgagtctgggagggggtgttgctatgtgtctgtgggtgtgtgtgctgtactgtgtgcatgctgtgtgtgtgtctgagtgtggatctgtgtgtgtctatttgtacctgagtatcttttcctgtctgactttctgtctgcatcatggtgtgactctggaatctcaatttcttgctgtgtctggagctcagtctctctgggtgtctgttcctgagtgtcagtgggttcctgcccacgtgtgtgtgcagctctgccatcgtctttgacacagaggtaggaaccccactgggtgcctggacttctgcttttgtctctccctcaccacccctggctaggactggtcccaccctccctgttagtggggaatccaagtgaacttgtgccagaggtgactgtagcgggagggagagagtgagtgaaaggcagtgggaggcggaggagaggactgggggcatggaccctctgtaagtctgtgtgtcggtgcatgtgccactgtgcacatgtgtgctcctgtgtgtatttgcctctgtgcctatctgtgtgtgtgtgtgtgtgtgtgtccctgggcacttggtctgtgcatttctgtgtgtgtgtgtgtgtgtgtggttgtgcacgtatacctgagtctctgtatgtgtgcatgtatgcctgtggtatgtgtggggtcatctaggaatatttctggccagggaagggtcctggcaggctaagcctttccttctttccttcagccccaccacaaaaaaagataccctccagcgtcatgggggttctcctgggctc

SEQ ID NO: 5418 - DNA, 2300 bp, Homo sapien
gcctgggtttgaatcctggccctgccatttcctagctgtgtgacttgggcaagtttacttttcttctcagagcctctattttctcatctgtaaagtggggatgataataatagccttgcctcagggattgaggttgtacctctaaagatcttaaaatagtgtgcaggtccttaaggaacattagctattattattactgttatagttgttcttgacccccagggagctctttggagatgcaaggggctgaaggggttgaagtctctggcagcatgagaggctcaattcccttggtcactgaccagcaggcagtgaaggggcggggggcactctcccaggaaggagtcatctgttctgggctgtgtcccccccgagtggagccaccttcaacagtattccccaggagaggtctgcaccattggaagtgacccctggctctgtgcatgctgccttcctaggtcgctcagctagagcaatggccaggccctgggaggcagggcagggtggccagacggccggagctcctgctcctccctctccgatgggccttggcgggcggcaggcttcctgttgctgctgctatgatgccccacctaatgccggggatggccatctgggcccaggggctcgaagagggggcctgccgaccatctgcctgcttggcgtgggctgcttccgaagggcagcagggcgcctgcccacagtagctggggcaggaggaggcctcggggctggttctctggcctgggcagcctgtcaggctgcaagctgctgcaaggagcccaatccccagagcttcctgccctaattttccctgcatgtatgcacaggaaggctggctgcggtccctgccgtgtgagctcagggaagcctcgccctccccagctgcagtctttccatctgtacagtgggcaggctggatccagtgctcagatttccatccagtcggcgctgcctctgggccttggggctgactgggggtccactttttggggtgtgggagggtttcccaaatgtgtcctatcctcccagctctgaccctgggggccagctctccagccaaccgtggaattacatgagtccctaaataaccagctgcaggttaggtccagagcaggcgttcttgctcagcgacagcccagccctggttccttgcatggtggttgcagggtgaccagacactgcagaacacctctccagagaggcggagactggcgaggatggaggaggcagcttctcactcactcagcagttttctgagcattgtcactgtctgacgctgtgcctggtcccggggacatgatggtgacccgccctttacagtgtgatacattctagggtgggtgacctagcagggagcccagcctggcccagggggcctgaattacctctgagatgtgacgcctgagacctgaaggagaagttggagtgagccggggtgtttactctacataatcgcctacgagataggtagctgctatccctacttgacggatgaggaaaaagattctcagataaaacaatatagaagcggctttcctatggtcacccagtaggtagcagagctgggatctgaacccttccttgtctgacttcaaattccatcaggccctgacattctccagctttcatggtgttcctgcaatccaagtgccgcttatctctctacaggtgaggttaggggttgggaggatgtcctgagcagggagcaccaacttctctggctgcaggaggggagggagggggtggccggctgccctgggtgccctttctttcccttccatccagggctggaagaaagccatacttctgactccaggaagtgctttggtggagctggaccggcttctgagctgtctgtggcgtgaggctgggataagtgtttggtcacctgggatggggagccactggcctgaggtgacacagacaaaggggagccaggagaacctgtcctggctcactgtggagcaccccgaccctgctcccctgcagcaggctcagctataaggcattgccagcctagccccgcggtttcttttgctgggataaattcagtggaaggagctgtgtaaaggcacaggccctgccccacagagaatccttgtcacttacatgctccaagaggtctcagaactaggggacttcctcccctccctcctccttgtctggagctggcattaggccccacatcttccagacccaagaagggcatttactccaggagatggctgggcagaccctcagtaggtattccacgaaagtgttcatggcttaaacccaacacttgatttctccctgag

SEQ ID NO: 5419 - DNA, 2300 bp, Homo sapien
gggtgggagatgaggagagggtgtcctgggagaggcacagcacattcaaaggcacagagctgataagggggcaggtgttaggagccagcctagatggttttgctgggaaggtggcttgggagccaccagaaatgaggggctgcagaggttcacctctgctgtgggcacagctctcattcaagaaccaggcggtggcagccacccacctccaccatggggagagaacagcacactggcctctatccttatgacaggctcccacagtccagaaccaatagagggataaacctcactaatcgttaattaccatccgtggtgcaattttatgactttccagataaatgctctctgagggagtgtcagcattacggactcctagtttaatgatctggggtagtgatttaaggggtggggtcccaggtggctggaggatgggagcaaaagctggtggagcccctcagaatcgaggccagggctcctgtctggccgggggcagggatggcctgagccgagcattggctggagtgcagctggctgctccttcctgccgctctcctgagcttatgcatctagagagcacactccctgcctgctggctgcaccctgtgacccccgggctccagccaggcatcatgagacttttgggagtgggaggtctgagagtcgttccatctgccagctgtgggctgctacagctcacctgtctggcagcctcacacctgttagctcttcaaggcagggtgctcgtcaggactgccctctccctttctcaggacacatctccacctcccacatcctacctgcccttttgctgttcttttcccagaagcccctgcacattgggcaaccccactcccagctctatgttggtcttccctgaactagggacattcccaagtcagcctgattccctgcccaggctggaagcccaggctggggcggtgggggacatccctaaatctcccagagccagacttgtagtgggcacgtgggcttcctccatgttcactgcatttaggtttcttttagggagaagggctgccccaggtggaaaagagctgaggttgcccctccccgagccctactatgtgctgtgtgctggaccccaggccaggctcttgctatgcctttgcataaggttaagtgaaggactctggagccagcctcctgggctcaattcccatctctgccatatataaatttggtgacttagacaagagacttgacctttttgtgcctgaatttcctcacctgtaagtgcaggttacagtcgtacctactgcataggtttattgtgaggaacaaatgagtcaacgcatggaaagttcttattctggtttcagcacgtagactgggctcctagtttgctgtcattagcacatctccatgaatccttacaaaccctaagtggatgcgcctggcttgatgacagacagcacagtggccaaaggtttgcataccagccagtcacccatgcatagatctggtgctcaacctatagcaggacccgggaacattaaatttcctgagcctgaatttcctcctctgtaaaatgccaatcataataataatagcagctgcttcttaggattactgttctgatgacataagttcatacccataaagtaggtcacaaagtgcccggcacaaagcaagctcttaataaagcaaagtatcgacactcccatttgacagatgggaaacaaagtctcagcgaggggaagggacttacccaccagaggtagtcattaaactcagtttcatctgagtgcaaagccaaggcatgctcctctctagccccgctccaccgcccatggacaggggtcatgttcagaccttctcaggccctgaagccctctcttcaagggctcataattggaaaaccttgaccaccctcctcctgacccagcacacttattagctagttgaacccgggtgaattgaagttgccaaaggcaccctgtcttccaggaaacagggccagccaaggccactctgctgaccttggtgggtgtgacaggtccctgggtaatcaatcccctttatgaccaaggccaccaattttctccctctttgattccctctcctgaagcctggtgcatccactcagcacctggttaggaagctaggccaattttcctcccttttgatttcattctgctcctgtctggctgcccagccacatggagagtttgtcaaatggaatttctgtctcttgcggccgccctgccctctgcagagtgctgaacgggcaggcaggatcacccggctcagtgccgcagacatcactctcttgtgat

SEQ ID NO: 5420 - DNA, 2300 bp, Homo sapien
ctgaaggagttcaagccgaggtcagcgaagccctcagaaggatgttctaaaatgggggtggggggtagtgctccggcctgcttccccggttggcccaaggtccgcgctgatcaccgcccaagaggcccaggagacccgcaaatctgtgctgcacgtccgcactcccatgcgggcctcgtcaatcaggaggcggctccggccaggcctggacatcttcggcccgccccaggccccgggggagacccccgcctgggccgcctccgggtgcccgccccccggcggtgtcattgttctctgacgtcacgcctcagccccgcccctctccccccacccttcctcccccacctccggctccccgcgcccccgaccctgcagcctccgaagccccggccgtgcaaggctccccccgcagcccggccggggctgcgcccccttgcgctctccccaacttgcctttgttattccagctcccttcctcgcctcgcctccgacacggtggcagcctgcaaaacgtggagcgcggagtcactgccacacctggaatccgaagcgggctccgccggctcccggccgaagccgcccccgcctgccggggaggggagcgcgtgcgtgggcggcgcgtgtgtgtccaaagagggctgcgcgggcgccaattatgattgggactgggggtgccgaaaatcaggggtggggggcctcgaggaaggggtatggaagaggaagtgggagaggagggcgtgtgtttgtgtgtgtacgttaacgtgaggatttagtgcccaggggaacgtttcgtgttttgttttttgattgtatgtggggttgtgtacagcgatgtgtgtgtgtaactgcgtgtctctgagcgtgcctgctgtggccgtgtaagcgggcatctttgtgagggaaagtaagcgagtgtgtgggggcgcgtttgtggtttgggggggagcgtgtttgcaatgctgagggagcgaacgtgtgtgccgttcttgtaggagtttccgtgagagtggcagtggacgtgagccaaagtgggcgcgtagttggatgctctcggggggggggggtgggtcggctaggggaactcccgcgagtgggtgcacccaactgcgcctcgtgagtaccttagctctccgctatctctggcagtgcccagtccggggcagagggccaggccccagcctagcagctcccacgcagcccgcgcgcacagcgccccgggcgctccgcgccgggcctaggggaatccacgcgtctctggactgtgctaggtgccgcggatcaactgtggccaccacacccccgctcccccacagctgtcggggggccgcgctctagtctccctcaaagtcacccttggtggtggtggtcctcttcccaccccaaccaccagtccccgggctgtaggaacaattccaaagtcaaccccaggggaaggctttggaggtccagttaccaactcgcttaccccaattcgggtacctgacagcgcccggggccacgagtgcactccaggcgggggcgtgccagcgcggggcaggggctctcgggtgagcagtgtgattttggcttcctccccaaggtggtccctacctaggctcagcatttgttcccctctccaaacttactggggctggggcctgcaggggggctgggggctgcagggggcgtcagggagtagcggagggagtagggcaaggagagaggtgagtggactggtggcgtagcggggaaccaggagccaggagaagaaaagctgggagagcgccgagaccgaggagcgaggaagagaggaagagaaaggaaaggaaaggcgagggagagaacgaggagaggcgaaaaggaaaggggaaagagagcgcagagcgcgagccaagccgagcgccggcagcggcggcggcgcggcgcggcgctccactccggcctgactccgcaccggcttttgcgggcggccggcggcgcggggccctttggaaatagaatagccaatgtaatctgacacttcaacttgctcggctccgggcgagttgattcacttactcaccccctaacgccgagttccttttcactgtctgtggacattaaaaaagcgagcggcggcggcgggcgccggggagagcgggcggccgggcggcaggcgggcgagcagcgatcgggcggccgagcgagcgagcaacgccggcgcagcgcggtgaccccagccccagccggcgcggagcaggagccggagccgagcggatctcggcgccctcgctgcgctcctcccggcccgagcctgccctacccggcggtggcggcggcgc

SEQ ID NO: 5421 - DNA, 2300 bp, Homo sapien
cgctgccgccgctggaggacgcgccgccgccaccgccgggtagggcaggctcgggccgggaggagcgcagcgagggcgccgagatccgctcggctccggctcctgctccgcgccggctggggctggggtcaccgcgctgcgccggcgttgctcgctcgctcggccgcccgatcgctgctcgcccgcctgccgcccggccgcccgctctccccggcgcccgccgccgccgctcgcttttttaatgtccacagacagtgaaaaggaactcggcgttagggggtgagtaagtgaatcaactcgcccggagccgagcaagttgaagtgtcagattacattggctattctatttccaaagggccccgcgccgccggccgcccgcaaaagccggtgcggagtcaggccggagtggagcgccgcgccgcgccgccgccgctgccggcgctcggcttggctcgcgctctgcgctctctttcccctttccttttcgcctctcctcgttctctccctcgcctttcctttcctttctcttcctctcttcctcgctcctcggtctcggcgctctcccagcttttcttctcctggctcctggttccccgctacgccaccagtccactcacctctctccttgccctactccctccgctactccctgacgccccctgcagcccccagcccccctgcaggccccagccccagtaagtttggagaggggaacaaatgctgagcctaggtagggaccaccttggggaggaagccaaaatcacactgctcacccgagagcccctgccccgcgctggcacgcccccgcctggagtgcactcgtggccccgggcgctgtcaggtacccgaattggggtaagcgagttggtaactggacctccaaagccttcccctggggttgactttggaattgttcctacagcccggggactggtggttggggtgggaagaggaccaccaccaccaagggtgactttgagggagactagagcgcggccccccgacagctgtgggggagcgggggtgtggtggccacagttgatccgcggcacctagcacagtccagagacgcgtggattcccctaggcccggcgcggagcgcccggggcgctgtgcgcgcgggctgcgtgggagctgctaggctggggcctggccctctgccccggactgggcactgccagagatagcggagagctaaggtactcacgaggcgcagttgggtgcacccactcgcgggagttcccctagccgacccaccccccccccccgagagcatccaactacgcgcccactttggctcacgtccactgccactctcacggaaactcctacaagaacggcacacacgttcgctccctcagcattgcaaacacgctcccccccaaaccacaaacgcgcccccacacactcgcttactttccctcacaaagatgcccgcttacacggccacagcaggcacgctcagagacacgcagttacacacacacatcgctgtacacaaccccacatacaatcaaaaaacaaaacacgaaacgttcccctgggcactaaatcctcacgttaacgtacacacacaaacacacgccctcctctcccacttcctcttccataccccttcctcgaggccccccacccctgattttcggcacccccagtcccaatcataattggcgcccgcgcagccctctttggacacacacgcgccgcccacgcacgcgctcccctccccggcaggcgggggcggcttcggccgggagccggcggagcccgcttcggattccaggtgtggcagtgactccgcgctccacgttttgcaggctgccaccgtgtcggaggcgaggcgaggaagggagctggaataacaaaggcaagttggggagagcgcaagggggcgcagccccggccgggctgcggggggagccttgcacggccggggcttcggaggctgcagggtcgggggcgcggggagccggaggtgggggaggaagggtggggggagaggggcggggctgaggcgtgacgtcagagaacaatgacaccgccggggggcgggcacccggaggcggcccaggcgggggtctcccccggggcctggggcgggccgaagatgtccaggcctggccggagccgcctcctgattgacgaggcccgcatgggagtgcggacgtgcagcacagatttgcgggtctcctgggcctcttgggcggtgatcagcgcggaccttgggccaaccggggaagcaggccggagcactaccccccacccccattttagaacatccttctgagggcttcgctgac

SEQ ID NO: 5422 - DNA, 2300 bp, Homo sapien
ccccctgggctcccctcctggccggggcagccccgtccaggcactggcctgagcgcccctctggcttgcgaagccctgggagaaaaccctgcacacacacctccgcgtttctcgtttgtaccgcgcgccagctttccccgggcaattcccacacaaacaacttaaccgcgcccccacctcccatttacaaaagtgtatgttttccctggaaattcagacgcacaagttaacaccaccaccccttgccatcctgaaatccagcgctttccccagcggttcctgtacacacacaggcgcacaacttcgcatctccccagaggaggcgaaggagaccgaggcggtccttccctccctcctccgattcccggtcctgcccggcccccgggtgtagggagcgagggctggaggcgcgccggcaggaggcgggcaccgggtccgcgcgcgcacgaccacacttacgccccgcacaccctgacaaacccggcccccacgcgcagcccaagccggctccgcgcagccgggagctcgccggccgccgggcctcggcccccggccgccaaggagagcggagcggagcccgcgccgccggccggtcgccccgctccgggggacactttaagggaaaaaccccagcacccaatccccacgcttgcaccccgagagtccccggggagcgggaggtagccccggagccagcgggcgcctggctctggccccaaacttaccgggcgctgcgagcgccgctgccgccgctggaggacgcgccgccgccaccgccgggtagggcaggctcgggccgggaggagcgcagcgagggcgccgagatccgctcggctccggctcctgctccgcgccggctggggctggggtcaccgcgctgcgccggcgttgctcgctcgctcggccgcccgatcgctgctcgcccgcctgccgcccggccgcccgctctccccggcgcccgccgccgccgctcgcttttttaatgtccacagacagtgaaaaggaactcggcgttagggggtgagtaagtgaatcaactcgcccggagccgagcaagttgaagtgtcagattacattggctattctatttccaaagggccccgcgccgccggccgcccgcaaaagccggtgcggagtcaggccggagtggagcgccgcgccgcgccgccgccgctgccggcgctcggcttggctcgcgctctgcgctctctttcccctttccttttcgcctctcctcgttctctccctcgcctttcctttcctttctcttcctctcttcctcgctcctcggtctcggcgctctcccagcttttcttctcctggctcctggttccccgctacgccaccagtccactcacctctctccttgccctactccctccgctactccctgacgccccctgcagcccccagcccccctgcaggccccagccccagtaagtttggagaggggaacaaatgctgagcctaggtagggaccaccttggggaggaagccaaaatcacactgctcacccgagagcccctgccccgcgctggcacgcccccgcctggagtgcactcgtggccccgggcgctgtcaggtacccgaattggggtaagcgagttggtaactggacctccaaagccttcccctggggttgactttggaattgttcctacagcccggggactggtggttggggtgggaagaggaccaccaccaccaagggtgactttgagggagactagagcgcggccccccgacagctgtgggggagcgggggtgtggtggccacagttgatccgcggcacctagcacagtccagagacgcgtggattcccctaggcccggcgcggagcgcccggggcgctgtgcgcgcgggctgcgtgggagctgctaggctggggcctggccctctgccccggactgggcactgccagagatagcggagagctaaggtactcacgaggcgcagttgggtgcacccactcgcgggagttcccctagccgacccaccccccccccccgagagcatccaactacgcgcccactttggctcacgtccactgccactctcacggaaactcctacaagaacggcacacacgttcgctccctcagcattgcaaacacgctcccccccaaaccacaaacgcgcccccacacactcgcttactttccctcacaaagatgcccgcttacacggccacagcaggcacgctcagagacacgcagttacacacacacatcgctgtacacaaccccacatacaatcaaaaaacaaaacacgaaacgttcccctgggcactaaatcctcac

SEQ ID NO: 5423 - DNA, 2300 bp, Homo sapien
gcgcgcgggggaaggagcagcgggagggagggagggagggaggcaggcgggcaggctcaaagccccagttactcgggcactgcctacccaggaagctgacggctcccgggcaggcgcagccggggctccgggcaccgaagcagggacccggccgtcaggcctccccggtcaggcaagggtaccaagcacccttggcccacctgggagcggccctcgctctgtgacctgctggagggacgaggtgggaagggaaggcagagaaggaaaaagtttgctgcaggtagaggggtagggctgggcggcagtgccgaccggctgtccccggggaggggtggggggcccggaccggctgccctggcgcgctcccgtccgcccgccctcccgcccgggttgtttacattcctggagtgtcttttaaacccggggctgaggccggctcccggccttctccggcggctccggggcagtctcccgtgaaaatctgctggcgcacaatggccgggaaggcggccgcccctcgcccgcgcccccaccgctccagggcggggagcctgccctccgcaccgcgccctatccccgcccggccggcttcctggacagatgtccccagcgagggggcgacgcgcgcccgctgcccgcgccctagacgccgaggccgcgctccccactgttttttccccagcccagacgccaggaatgtgaagcaagcttccagaacccgcctcccccccccgaccccggctccagccccggccccccaacctccgccccggctggcctcccactcccccggggccaccgccgccggagacggagaggaagaaagaacacggggaaattactttcgtatttgcaacgcgcgcgcgcacacacacgcacatcttccccctgggctcccctcctggccggggcagccccgtccaggcactggcctgagcgcccctctggcttgcgaagccctgggagaaaaccctgcacacacacctccgcgtttctcgtttgtaccgcgcgccagctttccccgggcaattcccacacaaacaacttaaccgcgcccccacctcccatttacaaaagtgtatgttttccctggaaattcagacgcacaagttaacaccaccaccccttgccatcctgaaatccagcgctttccccagcggttcctgtacacacacaggcgcacaacttcgcatctccccagaggaggcgaaggagaccgaggcggtccttccctccctcctccgattcccggtcctgcccggcccccgggtgtagggagcgagggctggaggcgcgccggcaggaggcgggcaccgggtccgcgcgcgcacgaccacacttacgccccgcacaccctgacaaacccggcccccacgcgcagcccaagccggctccgcgcagccgggagctcgccggccgccgggcctcggcccccggccgccaaggagagcggagcggagcccgcgccgccggccggtcgccccgctccgggggacactttaagggaaaaaccccagcacccaatccccacgcttgcaccccgagagtccccggggagcgggaggtagccccggagccagcgggcgcctggctctggccccaaacttaccgggcgctgcgagcgccgctgccgccgctggaggacgcgccgccgccaccgccgggtagggcaggctcgggccgggaggagcgcagcgagggcgccgagatccgctcggctccggctcctgctccgcgccggctggggctggggtcaccgcgctgcgccggcgttgctcgctcgctcggccgcccgatcgctgctcgcccgcctgccgcccggccgcccgctctccccggcgcccgccgccgccgctcgcttttttaatgtccacagacagtgaaaaggaactcggcgttagggggtgagtaagtgaatcaactcgcccggagccgagcaagttgaagtgtcagattacattggctattctatttccaaagggccccgcgccgccggccgcccgcaaaagccggtgcggagtcaggccggagtggagcgccgcgccgcgccgccgccgctgccggcgctcggcttggctcgcgctctgcgctctctttcccctttccttttcgcctctcctcgttctctccctcgcctttcctttcctttctcttcctctcttcctcgctcctcggtctcggcgctctcccagcttttcttctcctggctcctggttccccgctacgccaccagtccactcacctctctccttgccctactccctccgctactccctgacgccccctgcagcccccagccc

SEQ ID NO: 5424 - DNA, 2300 bp, Homo sapien
cctctgggagctctcccggtaactgggaccacaagatttgcacctggaagggctaggggtgagcaggggaaggctgtactagacccatctctctccgagaggaggcaggagagcccagaggtcgtgagggctggaccctgggggaggacctctgagaggacgggccctcggctggggggggggtgctcctagggtgggcgctgtgggccctggcgcctctgccagcagcagggcctctcggcccgggctctgacagggacatttataactcacagctgtgcggtcctgggcccaactgactgtggtaaaccgatctggcttcaggaagtcccgtcccgaggccactccccatcccgacccccacactctccttcacctcctgacacccacatcctgttctcagcgggaggggcaggcggcgggcactgggccaggggcccagccagggtctccaacctgtgggcagagtgggaaaggacagagagcagcagtgaggccccagtgctgcggggtgcccaccattgccagcctcctctcaaagcacacacagggaggcagaggcccagaggcagtgcaaggcccccaggagcccacagggtcagagcgccaagagcataggttgtagggctcaggggaatgttctgcgcctccagatctacctagaaaggggattcgccttctggcctctgtggacccactccagccaaaaggagcctgaccggaggggcagagtgaaccagaggcctcagagaatgctgggaaagacgccattttgggccctgggccttgggctggccctcctttgggacaccccgtccccaagatgcttcgtgcccatcccacctagatcctcccagcctagttcaagtgtggggccaaaaatggtcttgcccagtgctagaaagagagacagtactaaaggctgcagcacaccatggctctgaccccttacatcccttggcctgatacaatgaccagttcttgggccccatcagccagcccgcccctcctccatgcctctccctcttcttctgcacaacgtttgccaaagcttggcccaggtaaatctggtagtctacagcaagattctagaattagatagtacccaacaggacatacatttttgttttactagttacaatttattaaagagtatcagaaatatataactagcctatcaaatcaattatttcaagggcatgattgctttggacaaggccagatttattggagcttaaaaaaaaagtgagtggaaggtgaacattaaattaagtcatcacacaggtagatctcagctcagaccaagaatcctaaagagcgtggaggaagagctgaagtttggggagcacaatctaactcatcaccaggactcttttctgctttaaactctgcatctgggcctcctctcccagttataagcaaaacagccagccctgaaccttgtaggaggggcaagggagtgagctggttttcccgaggtgcgtacacacataaaatggctccgagtgttggtcagggatctggtgagcaattcataatgaggaaagaattcaggcaggggtcacagagtggctttggaagtggctgccggccggccgtgtgagataattccccgaagccaggcacggcgcagagaggaggccacggcaagggctttgtacacccggctaaaaatacccccgacagcttctccctgtcaccctgcctgggggccgtacaggaaagtgatgctgttctgcttttcctactaagaagagaaagacaacacaaagtccccagtcctggaagaaacaaaacttatatttatatatttttcaaaatcccactaggaggaattggcttgctggttggagtgtggctgggcggggaagacacagccagctctgataaatcaggcatcccggggtgtgcttaagtgacccaagaggccgctgagattagcttggcggcagggacagaggtgggaggggagtggacggcacaccggcctgctctcacacacgtctcatctctcccctgtgtacccaggaggaagaggaggaggcccgttggcgtcggaccaatgctgcaaggggtgtgaggagaggagccgctgtttttcactgagctgccataccccgaaaggtaacaccagcccccgatgcccaggccataccatcacctttgcctaagcctgggcaggggcaagccctagcagcccagaagtgctgtggctggaccagagctgagggttttcagctgcttctcacagcctttcctgggcctggctgcagggcctctctataactccttgtgtggtg

SEQ ID NO: 5425 - DNA, 2300 bp, Homo sapien
ctcagctgccaagataattattttctctctgtcagcggctctgctggccagcttgcctttgggaaaggcctagctgtgggcggtggggaggcaggaggccgactccagttctgccccagtcactgactcactgcatgaccccagatgagggcaaacgctgcctgtctctgggcctcagtttcctcctcagtgaaagggaagtattggggtcagtgaaccccaaaactgtttgtatttccaaggtaagcagaatttgggggctgccagagccagaaggttaggatgtagagccacttcctctccccatggctggggtggggacactgggcctggtcccaggatcttggggtgtagggttccagcactcatggagcccagcaccagcccccacggggtcatccatgcatcagctgacgtgtgtggagagccactggtgtctggccctcgcatgcagtgcattacacagtctgcacagctctttgagggaggccttctctttatttctatatcccctacaacagttgaggaaactgaggcagagggaggcttaagaaacgtgtccaagtcacacacttggtacgagggcgaagccaagatttgaagcagatccttgtgattactgagcctgcctctcaatcaccaggcctctttgcctcttatcgaggccctgggcaccatttctccctgggagcccctgcctgtgcacagtgaggtggagcccaggctgaggcccttaccgagccccttggcgtgtatggaggcctatgcttcacgtgatgtgggcaccacctctcccgctgtgagccacgatctttgttctgagaggagctcagccctgcagtcaggtttcctggtttttagaggtgggcactccggtgcagagaggcacagtgactgttcacggccttgcatcggggcaccttcacagccatagcttgaattcagggttctgcacatcccagcctccagctgagaccccagagaagcccaccagccaggcctctgggtgtcatcctccctcctgccctcagggctctgtgggcagtagggggcgtgttggtgggccgttgaggagatgggccagctgagccccacccaacaaggatggttgtgtgcccacactcccagtgcacccgcaggccctgcacttctgcctgctgccatctctgccccgagcaccactgtctctggtctggaccctggagcagcgtccccactgctcttctgcctcctcctattcctccaagcccttctcccttcacagccatgggggcttcctaaactagaactagggtcacatccctcagctgcccagatgctgctgtggctcctgcccaccctctttcttactgtccctggcccctggtctccactcacggcacccctcccttgctcagtgcatctgctacaccacagaccccaagtcctccactgggccaggcacttttctctatcttggagtcttcacatatgctgttccctctgcctggaatgctgtttgctgcatcttggtctgcctctccctggcttgttgctcaacttcacttctccagagaggccacctgggaccttgagtctctgctgtgtggctcctggactcattgtttgtttctggcaagcactgcttttacttttgtatcatttgattctttgctctcgtctgagtctccgcaagggtagggatcactatcacatcagcatgcttgctgaatgtttgttgaatgaatgagtgaatgcgaagtgcctttgtcattgcatctccctggattctcccggtgaccttgagacatactttgaccccactttgacacgtgaggaaattgaaccccagagagtctgagagcatatctgtaatcacataaccagtaactggcaggtgtggggagtcaggggcctgtttatgccagggcaccccatcatgtcccttcagagtccccctctgtcagatggggatgatatggtggcagtgggcagtggcctcatggtcagtgccgggcctctactgtgggtagacccgctgacctcccactttcattgcagcaggatggagctggagtgaggtggaggggccgcaagctgctgaccggcgtgtggaacactggtggtttgcagatcactgaggtaggtgtgccacggggctggcgggaggtggctgggtcggacgcaggtgagtcctcatgagggcaggtgctagccctagcacgctggacctttgactcgggcctcagccctgaggggcaggagcgggcacaagccacctttgctgggacctcatcatgcccccaatgggctgtccctct

SEQ ID NO: 5426 - DNA, 2300 bp, Homo sapien
ctcaagttatgaagtacgaattaatccatttaaccagcttctcggagggaaagcccatgacaactgcattttcaaatgccatcctgaaagcgatatttcaagtggcagtgggtgggattagagcctgctaacgatttatgtcaaacaaggagcaagaacattatttctagataagtgatttgtcccagcaacttccagggccggcaggaaggtttaggggccagccagaggctgaggctgagaagaggggatggagtcaggagatgtcacctcaaaggccagtgaacctggtcagctcccggtgttggccagggcagcagggcacggcagtccaatacagaggagattttaaagacagtcatggctgcccttctttggggatgaatgatggggactcacttaccttcctaagtgtttggggcagttaggtcaccacacaagcaactttcacaggcaggtgggtggggctgggggagggagctataaaatacagtttctcccgagggggtaatgatgacagggagtgcccacgaaagaggaaggggcgaagatctctggaggtgggacagcaggtgggcttccaggggtgtctaaggggcagagaggtggggggtgagcaagcgctgaaagcccggagcccttgcgacagactggctggaaggaagaggcctcggccaccacaggatgcaatgtcaggaaggcagcagctcccggggcggggcagggccgcgcgcagccgcccccggcttccctcctgccgccagctcctggtcacaggaactccccgaagtcggggagcgggagcgtacgtgcgcgtgttcaccctgtcctgggcccctcgctcggggaatcccgggggtgccagggcacccagggtcagggaagtaagatgccgggccgcctaccttctccaccccgtagcccgttccgaaaatcctttaaaccgagatttaatctggatgcctagccccgccctcccctcccctcccctcccctccccccggccgaggccccctccagttcagctccctcctccaccccctccccgccgtggaccctcattagcatgcccacttgggaggattcgctggggggcgggagacacccgaagtcatccaccgccagcgccttcccggcggcctcctcgggcgacagcgctccgggagccccactcgcacaagtgttgcttccaattaattgcctgggcgggggaaggaaaggggcctcgtcgccgcccccgcccggaggctggagtgctgctcgtcgggtcgtgcgttcgctcggcagcggcgtgcaccagcaccacccctgcgtgcaagtttgaaatgtgagctgcctccgattcatactcgctcgcgctccctcgcagcgaagtggctgggctgacggtctgcgcgcgcgagtgagtgcgggcggcgggctggggggcggggtgcggacggcgaggctcgcggggcggggagggcgcgcgcgagccggggctccctggagacgccaaggcaggtctgctcgcctttcatcttcctcccgcgctcctcctcctcctccctcccctccccccgccgcggctggcctggcctcccccggagcccccagccccacgcgggcacacgcagggtgggtggtcacgcccgcagggtccgcgagcgcggcgcagagcgcgggccgtgggaagtttctccggcgcgccccgtgcgcccccgccccccgcgcgcccccggcccatccccgtccctggagagctgtcgcttgcgcccgggcgcgcggctggctgcctcctcggcggcggcggcggcggccccattagcggagcctccgcctatgattggcttcgcccgggaagctggagacgggcgatgaataattgatgtgtgcggtgcggtagccggacggcggcggcggtggcgggcagcagcgagcgggagcgcgggagccggagcgccctcggagcgggcagcgcggagcgagcgggcgccggacccgcccgggcccccgcgccgccgccgccgccggggcgcggagcggggatgcaggcggcgcccgctgcctgcgcgcagcctttgttcggcgctggctgaatcctacccggagtcgctcgccgcggccgccgccggccgggccccaagcccccgagggcgccagggcgggatcgcgaccggtgcaacttctaggtaagtgcggggtcggaggggtcggcgcctgggcgcccacgggccgggccctgggctccctccgggcgcgggggtgagtgtgcgtgcctgtgtgtgacagaggagggccggtgcattgtgggtagcgcc

SEQ ID NO: 5427 - DNA, 2300 bp, Homo sapien
tgcccagtgcccccgcacaagaggcggtacctaggggcctgggagaaggatggagtgggctggaggctcgtttttgtgtgtcctggcctgcccgaataggctgcctttccagctgtagcacatgtgtgctggacacccacataggggtgtttgttggtttctgtgcagacacacatgacagaggagagtgtctcttctctcatactgtcctccttttgagggtggtggcaaggtgaccccacggaggggggcaggacacatcttttaagacttagctcatccaccaggccccctcctggagggagaaacagggcccctcttggggaccacagcccctgcttgccttcttggttgggcatctttgtgtaccacacaagctgagcagatggagcaagcagctctggcgacttctcggggctttgggctgacgggaaccccgtccaggatctgggcggcttgggatggcagcctgcccagccactcccggtcactgtgcctatgggtgtcttccaccagtgccggccaaacgtggtggcgtacaagaggcctgaggggttccttattgagtcagaggggctggggagctgtgaacacctaggattttgccttctgaaggctttcacctcctccccaccttctggtccagcctcaggctctaccaccagggcatggggccaggagcaggagcactgtctctgtccctgctgactctggctgtggttactgtgagtagctttgcctgactgggcccccgtctactcatctgtagaatgaggataataatagctaatgatgtcctagatggtcaagaaaaaaaaaggatgcagaagcacgttgtgcagcatccagatgggagacccttgaaatgtggagtcggctttgcacccagccaagtggctgagcagttatgattcaaaatatgcctggccactcttgcccatcgactacttccataacgctcaggtcactcccagcaggagtaggacatcagctgaggtgtggccaccctttgtccagcattccacagacccagcaggcccccatccgtccctccctgcagcctgggaggaaggcaggacacgaggcattactcctttttacctctaagcaaactgaggcccagagagtctgtgggctcctgaagtcaaacagcaagatggtgactgagcgcagccagttccccagccctcagcgtcctcatgtacttcaggaggacaggccagctgagacacgatggacagcccaggctgagacacgctggcctgggaggcgcttttggctcctgtggccacgtggggacagtgaacagtgaaagaaaatggaagttttccccagtccccagttcatgtggggctctcttatcccggatgtggatggctgctctgtgctcctgccttgggcacccctggctgcctcctgcttggccccccaccaccctggccaccctctgctctggacatcctttgtcttcctaggcatttgtgcccagcagagcagggaccaaccgtgggtgtgaccagaaggtgtgtgctagggggccagtttctgggcaggagtttcagggacagccctgcagacactcctaggttgtcagcagattccaagattttgttcaaaccttgtgatgtttgagcccacccatggggagaagccacgctttgcctctgatcgaagtgtgagggagtgagcttccctgagggggatctggggtggtgggcagctgctaagcttgccctgactcaaggtctgtgtcaggccccctcactcctccagtttccacttggcaccatctctgccacccttcccatcatcctgactctccccctctttgcctccacggaccactacttcctgcacgcgggccattctgaccccctcttcatgacagaaacttttgtatcctccttcaagggtgtcagtcccatcttacagttgagaatactgaggcctcccaagagggctgagtaagtcttctggcgtcacacgaatctgggagcaaaaccagcatggatagcacccagtctggggagagttgggggggggtcttggtgtggcagagcatgatgaacaagcacccactgactgtcctgtccttcctgcagccttgttgtcctcctggtgcgaagagctcggccgcctgctgctgctccgacatcagaagagccgccagagcgatccccctgggaaactccccatgcagccccctctcagctccatgagctccatgaaacccactctgtcgcacaggtaagtgggtgggtgccatgggtgcaggtactgagcagacacccctctggtct

SEQ ID NO: 5428 - DNA, 2300 bp, Homo sapien
tgccgtctatttccccttgacaatcaagctttctcctgccttctgtgagccccgctgcctgcattctgtgtggcttgatctgagcctgtgagttgacctcagagccccttaagatgctctctagatggtcctgtcctccatttctgagctctcactagagggcaagcagacctggaagtgcggatgtgccaggccggtggggcagggcagtcacaggtaaacttctaccacacctgcccaggtggaggcagccacacccccagctgagcccaaggctgggaggcactgccatgcccgcagagactggccagagcgctctatccagatgctgctgcccccacagactgcccatacttggtggcgggttgacaggtgtgtcagcagtgctccaacagcacctgcccctccatgccggagacattccagccagatacgaagctgaggggcacagctgcctctgaagatccagggactgtctgtcttgagctgggctgcacagctggagtgtggagcccctccctgctctcccagggtgggcactgagggcatctacaggagtgggagccctaagctggcctctcactgaccatgggtggtggcccattcctccagcctcttgtatgtgtctcataaacgggtctcccaaggtctccagcagcaccgttgcgaggtcgtctcattcttggggcttggactggaagggcactgtgctccctaaggccgcatggggttggggccctacaccctgagaaggggacacctggaccgtgggcagagcccgacccatagcaaggcctgggaaacagttttaggagaaacaggaagaggaaggaagttggggatgggcaaagaccgaggatggtgtggctgcaaattctaaatgcacacaggaagaacatgtcagtgtgttctgtgtggctgccccaggatggggcagggtgaggggatgaaaagaccaaggaagcatgtgccaggctgctgttccagtggagcacctggagcatccgtgagcccctctcactggcagagcgaaagtggggctgggggctgtcagggatgcttgcagtgggatcagggcttggtctgcgaggattccccggcctttcactttgaaggaggatctgcttgggacagcaaacaggctagcaggggaatgttcacatctcacccacccacccacagacagcccagttttcagtgcacgtgcccacaggagggtgcgagtcctctagttatctgttagagaggcaccgccagcctcaccctcagcaagacacccaccattggtgaaccgtcactcagtctccttgtccttggagtcccagaggtgcctgcctccctcacaaccctgtgtttttgagggctggtgccgaccaagtgggatgtctaggaaaagggtctggcagggtgtgaagatgcccctggctggccaggtgcccacccagccctgctcctctgacagccaaattccacccgcgctgcagggcttgtgccaaggccccagctgctccacacttcggactggcagaaggcgccttcgtacccagcatcacccctgcccagggcccacttgggaggtgcagacccagtcctgagccgcacgcccgcccaatgctgtctgtctgtgtctgctctctgccgcccagcttgggatctgcaccacgctgaggcagccgccctcctgcctcccgctccccggaacatgcccattctgcttctccatcctgccctcgctgttgttcgttgtctgggcggggaggtggaggggcctgggggagcccaggcccagctccccgtgtctgtgcttgtgtcgaagccctccccacctcctggggctccacgtggcccgagaggtccccgccgtccccctgcagcctccctgatgggcggttttgggggagaaatttttctttgtttctctgcccagaaacaacgttcagcctcgtaccgggtggccacgtttcgggggttgtgacttccctggttgtgttgggtttcattttctccaggcatcatcgccgtgcctcctcacctcacctctcttctctcccgctctctcctcctccacagatgccacacgctggcagctctgaccagccccacccctccatacaacaaggtttgcacgtaccacaccccagcagccagtcagggcctccattacatcacagtggggctcctcctcctcctccttcccagcctccccggcagccgccacaggccgctcccagcagccatccacacagcgacctgacctttaacccctcctcagccttagagggtcaggccggagcgcaggg

SEQ ID NO: 5429 - DNA, 2300 bp, Homo sapien
tccaccgtttctatcttactgtgttgtctgcccaggcttatctctcttgcctccccaccctgtcccaaggaccagcttcgtggtgagagtgagaagggtttgacatgcaataaccctgattgtgaagtcagacagactggtcccagttccaacagcctgcccttgggcaattcactccccagcccctggggcctggcttccccatctgcaaaacagagctgtctctcaggcagagttcacagctgggaaagggttctgagaactgaagtggtcaagtgaatgaaggcagcactcccctggggtggggatgctcatgcttcatcaggatggggcataaactgagtccccccaggagcaggcttgagaaacaacagggtacgctgagctacctgctgtggctgaaggtcctgtgagctcagggcctggaactggccgcagggaagcctggggccttaaggaagcttcatgacaaggcacatggcgtgattcctccactctcaaatccacaggatgcactggtagaggaaggtctgggacatgtgctgagggctcaagtgggctccccactcaggcctgctcacctcagggcacaatcataagaaaggaggggctgctccccagggcagagtgaggccccattctgggctgggacctggaatgcatcccacctgggcttcactgggtgcctaggcccctcctaggccaggaatcggagaagggggctatgaacttccagaagccaagctagccaaacttccagaggccaagctagcattcttatgaagctagggcactgctctgacctcatgaatttgcttggctggcattttgctgcctgacctgttcccatgagcccattcaggatctggggcaggtcagtccagagctggtccctactcctgcccacctgcctccaaggctcagccccacccctttctctgacccctcaggcctctaactgagaccgcagctctctgaatcccaaactgtgagaaagacagtccagactctgtccatcacagatgcccacaggcacagtacttagttgacaaatccatgtctctctcgttcattttatcctaagaacagacacgagaaaaaagcaggatgaggagcatgatcgcacccttaccctccagatgggaaactgaggcccagagaggcctggagcactggtgcaagctggtagcaatactccagggctccctagccctagccagtgccttcctgtgtccaggcctcagcttcccctggggacagtacaagtgttgggccagatgctctctcaggtccctgcgtggcatccatttattgcagacctcccaccaccttgcagtgagggtggctctggctgctgggaagcccactttcagcacgtggggtttaaatgctcctgctgtgggtctccccactgagtcccctcccagggtgcatgctgatgggagggggcagctggcagtctgccccggggctgtcagtgtgggtcctaggaggagggatcagacccagtcctggggagggctgggggcctgaaaggagcatgatgagcccaggctgcgttttcagtcttgctagaagcaggtctggtccccagaaacaactagagacaggcccaggccgggacaagcaggctagggggcatcatgggaggtgtctcagcttatctcctccctcttgcgcctctagctcactaatcccgcctctcatctcacctttctctaaccctctcagactgcaggacctagggcagcagggaagcttatttggcctgagccttacctgcaaagggctcaaaggtagacttttgctattatattcaaattgcaacgtatagatgctcatattttggaattaattacgttttagcagtttttctttttttaaaaaaatctgctggtaccttaataaacatggaaccagcaaccttttgccaggtgtctgttctccgggtctctgggcctggaggcgggagtgtttcaaagcacttcacgctccgcggccccaccggctggctgcgctgcccgctgcggccggcaggggtagtccacggacaggcctggaggaggcgggacgggggcagggccgggaacctgggcaagccaataaaggctgcggcgcgcggctgcgcgggactcggccttctgggcgcgcgcgacgtcagtttgagttctgtgttctccccgcccgtgtcccgcccgacccgcgcccgcgatgctggcgctgcgctgcggctcccgctggctcggcctgctctccgtcccgcgctccgtgccgctgcgcctccccgcggcccgcgcctg

SEQ ID NO: 5430 - DNA, 2300 bp, Homo sapien
ggaaggtcttatcagtggttccaaatcctacctccatccttggaagctcaaagacagcagcagagttccagagataatcccaactatttcttttggtgtgggggcggggggtacaaagtttcactctgttgcccaggctggagtgcagtggcatgatctcgactcactgcagcttccacctcctgggctcaagtgatccttccacctcagcctcctgagtaactgggaccacaggcatgcgccactacgcccggctaatttttgcatttttttgtagagatgaggttttgccatgtttccagggcttgtctggaactcctgggctcaagcagtctgtctgccttggcctcccaaagtgctgggattacaggtgagccatttgcaagaaccgtgtacctactctttaaacaaataggtttaatactgtttaaaaatataaagggtactgtatagatgtgttcttgatgaatgaaaatatgaagacatgattgatacatatgctgtcgtttgtattaataactgcaaattgatagacaagatggagatctgagatccaagggcctcttggttggtgaaaaagggtggcatttggtcatcactgaaggccttcgtggtgcgagcgaccatagatgtggttaggtgccctgcaggtgatgtgagtaactcgtggagtgggtggcggggaagagctgtcctttatggaatatcttccgcttaccaaacccaagctgggaagcacacaaatgtccccggcggcgggaggatgactgctcccattttacagaggagaaaacaggcttgctcgcagaggttaggcgtcatgcagaggtcattccgctggacggtggccaagctggcactccaacgctgggcggaatggctccagagccagactgaaagtgggagaggtgactcggtcccagccaggcggtgagttcctctgggctaggtccccggtgctggcgcagcaaagaccacccggagaaagagacggtgaaggccccggggcttcctggggcgtcaggcggaggcggaggcgggggcggggctccctccaggcagtcttggactagctgagttgtcccagcgagatgggtgacagccgctttcccgagctcccccggcccaggctggtgtcctggcgactcgccaaggcaccggggcgggctagggctggagccggggtggaggaagagggtcgagaagcgaggcgggcccagagcagaaataggagaaggggggggggagggggcggggagtctttcctggggcaggaacccgggccccccttggcgcagccggcccgcaaagtgattctgcagatggaaggaattaagtaggagggggagggtccgatggtgatagcgagaggagggagttagaagtgtgtgcgtctgtgtacacgcgtctgagagaggagcgggagagacagggagaaacatcagaccagacggaaatagaagaaaggagacaagaagagtgagagaaagagaaggacatacacacacacacacacacacacacacacacggagggcgccacatacaaggacgacggacacaggagactagtactagtctaagagagagagaaagaaggagtatgagaaaggagggaaaataggaaaggaaaagtgagtgaaaaacaattgcagaggatttggaaagaacgagacaagagcgctgacgacagagggagacgaaattgattaggccggggctgcactgagctcccggcagctcggggagctgggttggccgggctgggacgaggtggggcttgggcggggcctcgcatgggcgggcccgcgccgtgctgcatatgcagatgagcctcactcccctctctccccacccctgacggttcatattcaacgagacagccaatgcagggcgaggacagtgccaggcggggcagggagtgggcggcggggcatcgtggaccccacccccggagccgccgctggaggggtcagccgcgaggcagatagcggatcgccgggcggggcgggacgcagtgggcggggcggaggggcggggccaaaagtttcctgcccaactttcgctgcctccttccaccgcctgcgcgcgccggggccgcagtcggggggaggcggcggcagcggcagcggctgcgggcagcgcgcggggcgcagggcgcggggcgatcaccgtcggggctcgggaggcgggcagtgggcacaggctccccggtgcccgcccctccgctgcggaggggggccgcgagcgggcggccggggaggggccggcaccgccgccacaaaatgagcctgctgtcgg

SEQ ID NO: 5431 - DNA, 2300 bp, Homo sapien
ttaaaatttgtccatcacaatcacctacctgtgctgcttgcaggcagccttcctctctgccatctccctctgcaaggcttgagcacagagctgtggggagaaaaatacatccatgtcccgacttggccgaaaagcaagggaaaaatgaacaaacttacccagttgttgaggcctttcttgcagcagaaggggcgatctgaaaaagccaacacatgagaaaatgtatgttgacagattctaggggcagtggcatcatcttgatgagcgtttaaggatcctgcaactgcaggaaggaaggctccttacctctcatctgtaggagtcctctacccactgctgcagctcttgtctgtcttgaatcgtttttctatggtttagaatcactttcatcagacacagcatcatctttagtatgattttaaataatctgccatgttcctgttgtcctcacaattgtacccttacacaatctatctatacatagaaaatgtatttcacatggctataaaagtacagtatgatcaaaactgttgctgtaatgcttcctcctcttttacttaatgcctgctgggttctgagttgacaatttccttacccattttcagtatgtccctaattcatgcttcattgggcatcttttatcataaagctctattctcctggaattaatatccttgccatatttcacagggcagaaacagctgagcttataaataggcacagtccttttgaaggatgggttgatcctacaacaacacactttcctaaggatgatgacaactcgcatcacccctagaacggctggtatgaaccgagtttccacacagtctggctggcattgcagtcaggagatgtttggctacttcacatgttttgaacactagtaaatcttaaggtacttgtgttctctggtgtgaattgtctctctctctaggtatcgcttctgaccatttgtttccatttctgtgttaactgggtctaaacattgtacaaagatttaaaacaaaacactccaccagcgcttccccaagaggctggtgtcggtttccgaacccacttgcagatgggtattttttctagagccaatttcatggtttcttccacctctgacagccgcctccccttttcttctcgttcacgttctttcattctcagcttcctgagtcgagaagggagagaaatgcatgcacgtgatccactggcctgtgtgggattccttgcggcatctgaaggccgtgattcaaaggtcccctgacaaccttcccataaatgaaccaactgatcctcacaactggagggagaattaacaccttccatgggacaaagaaaaagcacattctggcctgctggcaagtcacctgtcgtttccagctcatcttcatcgctctgtattcctactctttagtaaatatgaactattaaaagcttctatgagatgcgctatgtgtgcttctggggtcagtcttttgcctgacatagcgaaagctcattttagttcagtgtagaaaaccagacctcaccagctcatcacaactaaacccataaggacggagcagaggatcactcctcgtctgactcctcccacagggaaacctgattctccatcagaggctgatgccagaacccagacaatcagcctcagagagatccttccaggacatgctgtcattagccctgcggttcactactgcacatgtccatgattcaggactggaactcttctcatcgactttaaagatcctggttgagagaaaaggccaatctgagtgctgggtgcatctactgaattggaaatgatccaatggctctttagtcagggtgttatgtcctgaaaataggtgacaactgcaaaccatcctctggtgtccagagactttaacaaggtttgtttcacacagactgagggcagaaaaaaggaaatggcctaaaaaggtgggtttgctgtgttgcctcacactacttgattcatggttctgattctaaaaatctcacttgatacttgatttcatatgaaagacgtgtaaaatgcctgggtagaggcggcggcggcggcggcggcggcgggctcggaggcagcggttgggctcgcggcgagcggacggggtcgagtcagtgccgtttgcgccagttggaatcgaagcctcttaaaatggcagatgatttggacttcgagacaggagatgcaggggcctcagccaccttcccaatgcagtgctcagcattacgtaagaatggctttgtggtgctcaaaggctggccatgtaagatcgtggagatgtctgcttcgaagactggcaagc

SEQ ID NO: 5432 - DNA, 2300 bp, Homo sapien
acgcggcagagtggcctggcttggacactcggaactcagcagggactgcagcaattcttagtgctaagaatgacaagcttgtgtttcttaactacattctttagatttgctggtgccatgtgctggtaaactgtacctgtctcaacatcaaactcggatagtgtcccttgcagcacgcaggcgagtgcatggttccccctggcggtcggtggcaagcctcactcacgagtccacattgctacaaatcaatcaaagggcaacaaagagcgtgatgagggatgggatctttacaatagtcccaaagtgcgtccccacaacatagtcactgattaaaatcagaaaaagaataaatttgcagtggcaaattgtgacacccaccaccttaattaaatgatcaacacgaacatcatcagtcttggggcaaactaaagtcacatgctgccgggtagaatgggagaagagcgcagccgggtgtcgatggtatttctgccgaagttacagaacctgaatctaactgtaaggcaatacaaacaaacaaacaaacaaagtgaggggtattttacacagtaactcccctgtgatcttcacactgtgttcaggtcatgaaggtgaagggaagacagagggactttgtgggtttcaggaccctggagaagcgtgacaaccgaataaggcacatggctcagaaacggatcctttgctataaaggacactattggggcattgtgtacattttgcatagggcctgaaggctatttggagttattgtatccgtgtttatttcttgattacggttataatgcaaaaatgcctttgcgtgaaaaacacattaaagtattggggtgttggggtttcatgttgacaacctactctcataggttcaggggaaaaaaaagtcgtacgatactggcaatttttctgtaattttgatgttgtttcagaataataaaatgaaaaatgaaactgaccaaggccacctggttaataagtgacagctctgggtcaaaactcaggtgtgcctttcccctaaagccatgccctgccctgccaaccacaaggccctgcacatccaagttggcctctgttcctgctcatcacctgcaaaacagccctgcctccccacagccaagttgctggagcttcgccccacctgcccccaacctgcactggcctgactcccccattccacacctggcccagcacccaccacatggtgtggcagacagcactggggcagctgaaagactccatgctacaaattggcactgcccagcttcctgctcctgggagtggggtccgttgtctgagcttccgctccctggaagagctccaaactcctcaatggtttgggatttttcaaaccaattccaaataagccaggggagattttcctgtctgggttcccatcattaccacctccacagttggagattccctcctaatccagatgctcaaaccaggaccctaacaactagggcttcatatatcactgggacacttagcataatcaccattgcaggttgccagacatcacccaaagtgatgttctaccaaagacagaaactgcagctctcccatgaccttccaggtgctgccctgactcctccagctgaacctgctagggcagagggaagtggaacgtgcagcatatttgcctgccactctgtccatgtgcccaccaactcggctgcaggctccagagacactggctgggggtcctggggctcagagctgagcaaggttacagggcagacaggttggcctggatcaacctgaccaacctcagctgaagcagtgacttcttcattgtctgaaactaaaccaggaacccagtggagctccctgagtgcagagtgggtgaccttagccagtgaggcatttctcttcttacagacctggtatttttctttaccaggttctgtgctcccctcaagggtcctaagtattcctgcagcctgagtgttctgcagggaaatgtgctgtgtaaacactatgcctatttcctgcttggagaacaggttttgtggtagagctctcaggggtggggaagaagcctggcagcccacatgctataaattctgttgtccacctttatgctctaacttggaggcagagacccaagcagctggaggctctgtgtgtgggtgagtttagccacatcccctaggtgttctccagcttgaggatcgcaggcagagaggaccagcccagcagccacaggcctgaccaaggcccaggttgggaaggagggcaactccccattttccactgggaggtgtttcacagcatggtcaacatgg

SEQ ID NO: 5433 - DNA, 2300 bp, Homo sapien
ggagaaccatcttcttaacgacattctttagattcactggtgccatgtgctggcaaactgtaactgtttcaacatcaaacacacgtagtgccccctgcagcccgcaggtgggtgctcggcaccccctggtggtcagtggtaggcctcacgaacgagtccacattgctacaaatcaatcaatgggcaacagagacagtgtgatgaggaatgggatctttacaatagccccaaagtgcgtcctcataacatagtcactgattaaaaccagaaaaagaatgtatttatggtagtgaagcgtgacacccaccaccttaattcaatgatcaacaagaacatcatcaatcttggggcaaactaaagtcacatgccgcccggtagaatgggagaagagcgcagcaggatgtctatcgcatttctgctgaagttacagaacctgaatctaatcatgagccaatacattaaaaaaaaaaaaaaaaaagtgaggggcattctacacagtaactctcctgtgatcttcacactgtgttcaggtcatgaaggtgaagggaagacagagggcctttgtgggtttcaggaccctggagaagcgtgacaaccgaatacggcacatggctcagaaatggatcctttgctataaaggacactattggggcattgggtacattttgcatagggcctgaaggctatttggagttattatatccatgttaatttcttgattatggttataatgcgaaaatgcctttgcatgaaaaacacattaaagtattggggtgttggggtttcatgctgacaacctactttcataggttcagggaaacatatttgtaccgtgcctgcaattcttctgtaaatttgatgtttcaagataataaaaacaaaaaggaaactgagcctcaaaatgttacataacctgactgagtccacatgggtaataagtgacagctctgggtgaaaactcaggtgtgcctttcccctaaagtcacgccctgccctgccaaccacaaggccctgcacatctgagttggcctctgttcctgctcatcacctgcaaaacagccctgcctccccacagccaagttgctggagctgcgccccacctgcccccaccctgcactggcctgactcccccattccacacctggcccagcacccaccacatggtgtggcagacagcactggggcagctgaaagactccatgctacaaattggcactgcccagcttcctgcttctgggagtggggtccattggctgagcttccgctccctggaagagctccagactcctcaatggtttgggatttttcaaaccaattccaaataagccaggggagattttcctgtcttggttcccatcattaccacctccacagttggagattccctcctaatccagatgctcaaaccaggacctcaacaactagggcttcatatatcactgggacacttagcataatcaccattgcaggttgccagacatcacccaaagtgatgttctaccaaagacagaaactgcagctctcccgtgaccttccaggtgctgccctgactcctccagctgaacctgctagggcagagggaagtggaacgtgcagcatatttgcctgccactctgcccatgtgcccaccaactcagctgcaggctccagggacacaggctggtgggggggcctggggctcatggctgagccaggtcgcaggacagacaagttggcctggatcaacctgaccaatctcagctggagcagtgagttcttcattgtctgaatctaaaccaggaacccagtggggcttccttagtgcctgtgtaagggctctcggctttcactgctaaggagcttgctaggggcagggtgggtgacctcagccaagggggggatttctcttcttacagacctggagttcctctttcgcaggttctgtgctcccctcaagggtcctttgagatcctccagcctgagtgctcttggggaaacatgctgtgtaaacactatgcccatttcctgcctggagcacaggttttgtggtagggctctcaggggtgaggaggaagcctggcagcccccacatctataaatgctgcgtctaccttaccctctgacttggaggcagagacccaagcagctggaggctctgtgtgtgggtgagtttagccccatcccctaggtgttctccagcttgaggatcgcaggcagagaggaccagcccagcagccacaggcctgaccaaagcccaggctgggaaggagggcaactccccattttccactgggaggtgtttcacagcacagtcaacatag

SEQ ID NO: 5434 - DNA, 2300 bp, Homo sapien
catgcctttcaaaaaatagtatgccctgttttcctactcagtctggaggttccattaaagagtatttctggcaaagatttttagatctgaaaacacactccaaaatatactttcttctgactccattcccagagtttttcctaccgcattcaaatgatttctagaaatgtttttgttgtagccttgatcaatttcagtcgataaagcagcagatagtaagggaacaattccacactccccatccctgactctgcaacacagtgcagaattccagttggcaataaaaaactagtagagaagcaactcactgacttcagtttgtaataccttcagaagaaactttaatcgtcacatcctttctgctcatttgcaggattcctatcatctgtctccacgtgataacactgaagagccttcacgttgatgcagtcccagggcctcaagtgcagagtctgagagctctgcaggacacagcatggagccgccattcctctactgggtggaggagcatgtgtcctctgaacaggggatccaagccctgagatgttctttctcagctgtcagtgcggcccaggactttctgtggggatgctcagacagcaggggccggaggacttttagccaccacctcccatggccagtcttcacaaattacctttggctaatttgactgtctctcctcctggggtctaggacttcaaacatgtacagaagcgattgcagaattaagacaagacacttccacaatatattttttgtatcactggctcagaaaaagactcattcaaatcctgtatcaaagccacgtgtgagaatcttgagaaagcatcagctgactgacttgacaagggaggaagcaaccaaaaattctgcgcttcttcagtatctgagtatgatattttgcttcaacatccctcttagatgaagttattgattgaaaatcatttaagtttgccccatggtaaaagatcaagtcctcagaaagatctccaaagtgtttacggtttgttttgttttggtaagtttaccatgattttgcttgaattgctctccgttgatcttctcagctaagatggaggtagagttgcacagtggaagagggctgcatgtaagaaggcagttctgtctcagaggacaaaaggcctgggagcacccagacagtcactgcatggaggtcactcccctcccagtggccactgtggagacatttcacagaaatgcttgctggaccattcaggttcagagttgggacaaaaccgagaactcatggggatattggacaggagttaggaaatgaccttctcacacaactggggcagtgggggagaaccctgggcttgagacttgcaatccaccacttgcccctgcccctgcccctgcagtgtggccgctgttacattttcctgcaactctgccttcttgagtccaaatgtcttcaaaaggggcaaatgcttcgtaagtgccgacagggtgtgtttcagtgaatgtttgcagtgtgcaccggtctggctgaaggcctcttcccttccccaacaccctcccatcgtgcaaaattaccctgcccagcagggagtgacttgtgtgtctcagaagattttgttgctgtgctctgagttctcactcctcatctcctttgaccagtttcttctaatactccccttgttcacaacacagaacatgagtgctctttcctatcattttgacactaataaacggacagtgattctcagtgtggaaatgagaatgaagctttttttaaagacaggctacaataattcccatgcagagaaccacatgcgatgacactggattccaaacagcaagaacgtatggtgaagatgaggccaacagtgagctgagagaggccagccagggtgtgtttcagtgaagatgagaaacaatcagataacacctgtttcctccaggaaagaaaatgtggccagggaaaagagatgggaggaaggctggtcattgcctattccactgtgcacagtttgaatttggagccatgaaaagtattgcttggttaaattaaaatcattcaaaagataaaacataaacatttaacaccagcacaatatgctgggaaacaaaatgaaaggatttctggtctcggtgctgtaggtcacatagccactctttcctggattgaggctttccagcaaaggggctgggacgtaaggctggcctgctggtgtggacagagattccagcaacatgcatgacctgggggtacaaggattgcttcctaaacaatgataagcacacagccacctaatagtctggatcggctgagacca

SEQ ID NO: 5435 - DNA, 2300 bp, Homo sapien
gaaaggacagagtggatggattgatcctttctagaaggagacaggtcacgtcattgtgtgtttgtagggagtggtgggatcatgttgtgctggtggccccgggaggatgataggcaagcctgaaccctgtgccatatcttcaggcacctggaaggtgcccttccatagtgttcagagagatttggactggagttttctagatcttagggaggagtggggagaagtggtctcagccagaaaactgttgggtgggttggctgtgacagagcatgtagtgacagcccctgggtgggcgaggctgggggctgctgtaactgccacagcccagagcccctcagctctctccctagagatggcttctctgtcagttcaggtagctgttggctttgatttaacaggggtgggggcagatgaggaagttcaggcaacacagggcctgggtttcctgagttgttctgaattgtttgcccttttgtggaagctcaggtcttcagacccacttcctcttgtctgctagctcatggcctgtcctctgcactttgtgttactgtggagatgaagaatttgctcctattccatttatactacctcatgaacggggggcaggtgtggattcttgctggttctcagtggaagggtctggaaaggctggtttccttttcagtagaggaaggagagtagcgcacgaataggaagatggttctcttattattattattcaagttaggatatgtgtcctgaatgatgaggtgcatgtgctgtatcccttattccccttgactagagactgcatgaggtcctattgaacagggatgagttccagacaactttgcctcacccggcccatggcccaagaacccctggtttttggttggtcactatgttcagttattaggagctcaaaggagaagggccagggatgggctccttgtcccactacctattgtatcatgaccagcagctgtgaaaatccctagacacctcccctgttagctctgctgctcgccatttgctggctgtgttctaatcgtgtgtggcttttgctggctatgcagtgacactgtctcaggggactccaccactgcctctcagacctgctccctgggaacagagcttcctgagtggcagccgggaccatcgagtactgcggaaagggtggcccgaatctgacccctatttagcacttgctgtgggtggtgccaggacaatcacttgcatgctgggcatgacgagttatggattatcttcagggttcctagggcgctggcttgggaaagatttccatccagtggttttgttttggtatgtctgagctgggaaagaaaggggtttacaagagcgtcaggaaaaggaagattgaagaggagatggggccataatattcggaagcttctggcttcctgtcggccttctgagtgcggagcactgccctggggtaggcccctcacctgttgctgagcacgctgaggaccaccaggccgctgagagactcatccctgacccatggcttgggagatgcctgtgaggctgacagggtctgccagggacacccgagggagacgctcgggcagcaaaggcttggctgttacttcttgggagacaggggtcagggagtcttggtgaccggggccaggctctctagtggagcgactctccgtggaggaacagagcatccgatgcacactcagggacatttgcaagctgcagtttccctgtcatacgcccttagctgttgggactcccctctgattccccagtgactagtgtggacctggagaccccagctcattcacctctttcctttgtctccacagcatacccagtgctgggaccgggcgtgaccgcgaaccctggcacctccctgtctgtgttcacggctctgcccttcaccacacccgctcccggcccagcacacgggccgctccttgtgactgcaggggctcctccaggcggccctctggtgctgtctaccttccccagcacacctctggtgacagaacaggatggctgcggcccgagtggggccggggcttccaacgtctttgtccagatgaggacagaggtggggcctgtgaaggccgctcaggcgcagaccttggtcctaactcaggcccccctcgtctggcaggctccaggcgccctctgcggaggtgttgtgtgtccacctcccctactcctggcagctgctcctgtggtgcctgttatggctgcccaggtggttgggggcacccaggcctgtgagggaggctggtcccagggccttcctcttccaccaccaccaccaccggctgcccagctgc

SEQ ID NO: 5436 - DNA, 2300 bp, Homo sapien
tattgagataattatgtggtttctgtctttagttctgtttatgtgatgaatcacatttattgatttgcgtatgttgaaccaatcttgcatcccaggaatgaagtctatttgatcatggtggattagctttttgatgtgctgctggattcagtttgaaattattttgctgaggatttttgcattgatgttcatcaaggatattggcctgatgttttcttttttgttgtgtctctgccaagtttttgtatcagaatgatggtggcttcatagaatgagctagggaggagtccttcctccccagttttttggaatagtttttatagaaatggtaccagctcttctttgtacatatagtaaaattcagctgtgaatccatgaggtcctgagctttagtttggttggtaggctatttattactgacttacttttggagatcattattggtctattcaggggatcagtttcttcctggttcagtcttgggagggtgtatgtgtccaggaatttatccatctcttctaggttttctagtttgtgtgcatagtggtttctagtggttatttttatttctgtggggtcagtggtaacattcccttcgtcacttccagttgtgtttatttggatcttctctcttttcttctttattagtctagctagtagcctatctgtcttattaattttttaaaagaaccaactcctggatttgttgatcttttgaatggtttctcgtgtctcaaattccttcatttcagctctgattttggttatttcttgttttctgctagctttgtggttgatttgttcttgcctctctaattccttcatctgttacgttaagttgttaatttgagatctttctaactttttgatgtgggcatttcgtgctgtgaatttcccatttaacactgccttagctatgtcctagagattctggtatgttgtatttttgttctcattagattcaaagaacttcttgatttctgccttaacttcattatttacccaaaagccattctggagcatgtttagttttcatgtcattgcctgattttgaatgattttcttggtctttgacttctgtttttattgcgctgcggtcagagagtgtgtttcgtattatttcagttattttgcatttgctgaggattgttttacatccaattatgtagttgcctttagagtagatgccatatggcgatgggaagaatgtatattctgctgtttttgagtagagagctctgaagaggtatatcagatccatttgctccaatgttgagttcaggtcctgagtatctttgttaattttctgcctcaattatgtgtctaatattgtcagtggagtgttgaagtctcccactattaatgtgtgggagtctatgcctctttgtaggtctctaagaacttgcttcatgaatctgggtgcccctgtgttcggtgcatatacatttaggatagttgcatcttgttgttgaatcgtaccctttaccattatgtaatgcccttctttgtcttttttgatctttgttgttttgaagtttgttttgtctgaaattaagattgcaacctcagcttttttctgttttccatttgcttggtagattttcctccatgcctttattttgagccttttggtgtcattatgtgtgagatgggtctcttaaagacagcataccattgggacttgcttttttatccatcttgtcattctgtgccttttaagttgagcatttagcccatttacattcaaagttaccattgttatgtgtggatttgatcctgtcattgtgttgttagctgattattatgttggtttgtttgtgtggttgctttacagtgacactattctgtgtgtttaagtgtgtttttgtattagctcgtagtgatcttttctttctatatttagtgcttcttttgagatctctagtaaggcaggtctggtagtaaagaattccttcaacatttgcttatctgaaaagaatcttatttttcctttgcttgggaagcttagtttggctgcatataaaattattggttgaagattgttttctgtaagaatgttgaatataggcccccaatctcttttggcttatagggtttcagctgagaggtccactgtaagcctgatgggatttcctttgcaggtaacctgcgttttctttctggctgcctttaacattctttctttcatttttaccttggaaaatctgacaattatgtgtcttggggatgatcttcctgtgtagaatcttgcaggagttgtctgtatttcctgtatttgactgttgtcctctctagcaagg

SEQ ID NO: 5437 - DNA, 2300 bp, Homo sapien
gttatattttaatacattaactgaatcatgtcaactctttaggcaaaaagccttcagtgactttcttctaacttagaataaaattcaaactctttgtcagggtccttgaagccctacaaaactcacttccatttacttctctgaactcccctaataacaagtcccctcactcagcagggccctgctaaggagtttcaatctgcttcatggacgttcaacctgcctctccccttgtctggaatgatcttcctctgatgttccatccaccttactttttctgatctctttattcagtgtagctttcaattcacctcaagtaagttattaattattttatcctgtttatttcttatcacaatttgggataattttgttaatgtatctttttgcttgtttatgtcttagaccaccagaatgtagcaagataaaggcaggaccttggtccatttatgcaagactatattcccagctcccatgatattatctattctaccacacagagggttcttcatattaggttgaactatttggaattacccacatatgaccatttttgacctacaagaatggcgatttcatatggttcatttggtttataaatatttgctgaataaatgaatgaactgaaattttgagttgatgccaccaggaagagaatagacagttatatttgtgcgcagttagaaagagttcgctgtcctgagttcacttgatcactttttatcctaaattgccacccgctaccgtcgtagttttccacataataattttctattaggaaaattattcattaaaacagataacatgggtcacttaagtgtaaaacttaaaggtaacacttttttaaggaaatctaccagaagaaaatctttttctaatttttaaagtttaatgaaacataatttacatacaatgtaaatggctaataatttacgtacgatagctaatttttaactcttcatgtttttttgttggcaggcaacgtgttggaccttccggagcttctcagaagacagagggttttcttttgaggtaaatttgatagtacattttgatagtacgggaggcgatacggcatggtgacagaaaagcgccggcttggttagcaggaccacctggcagggctgcaggctgtgccacttaccaggcaggggaccttgggccagctgcttggcctcactcaccctgtttctcagctgcaattgggatgaacagactgcctgcttcggggttgcctaaaactcacattggttaatgatgtgaaatgcttagcgcagtgcctggcatagagagaattctcattagatgatacctcagctgggctttaggagctacagaagaagctgcatctccatgagctcagcgtgtttctagctttcctttttgttttctattcaacctttcacccaactcagcttctcaatccctaaatgacaaaggtttgggaaggaagacttggaccgaggcttgcatttgtttctgagaattaaacgttatgttttcttcaatctaaataggtttgcttgtacagccttgttgaatggttttttttttttttctccatgataaatgactctcaacttcttttccctcatctaattgcttatctacatacaatgcctggaaggaaataaatgtaatggcccgtagcaactggccttcaggtatcaagtttaagtccctttaagcagaacagcaaattgagcacagaatgaactggtttcatggtagcgtactgcaattagatgcaagaatagggaaagcagggtgcttcaagtggtgacacaattagtatagcactgagggacttctctttccacttcttcaactccgcctgcattccgctggctgaagagttgatgacatccctgaaaaatcttccctctcttgtttctctgatgccacctctgtgttctccgcctcactggccacacttcctttacctcccaaacttttaactctgagtgtcccaaacttgtctcatcacctacccctgctgcccagctccccagcctgttccccttctgacacgggcactctccttctgctctcttgggagagaaacaatgaaggcctatttggcacttttatttctattcaaggaaccagactgtgaacaagtttaccatttagtcctttggactgtgtcttgaattcatccctcttctccattctcaccagcaccatcatcatgatggctaatatttcctgagcacctttcattcaggcatgatgccaggtgcaccaacttacttaatcctcatagccaccacctgagcaagctcctgttttataaatgg

SEQ ID NO: 5438 - DNA, 2300 bp, Homo sapien
aactagctaagctctttttgttcttctcctttctcccatgtaaggatgctacagtgagaagatgccaggtcctcatcagacaccaaacttgctggtgccttgatcttggacttcccagcccttagaactgagagaaataaatatctataatttataaattacccagtctgtaatattgtgcagcacaaagtgactaagacatcgtatgtatactgatgacatacagatttagtcctcatctcttccttcaactgcaggcctctgtgtccaacttccttcttgactcctccacttggatgaataataaatagccgcctcaaatattttaaagtccaaaacaaacccttcattgaactgtttgttccctcttttcaaccatgccttgtccatgtggacacccccaccccaaaagtcatccttgatttctttttctttaccccctctgcccacatccaacccatcagtaagtcttgtcagttctacttccaaattatgtttttaatgttattcccatttctcagttccactatcaccaccacgactatttcttgccatagtctcatttcttgccatagtctcatttcttgccatagtctcctaaatggtctcccagtctctagtcttgctgtcttataaattcctctccagtcagtagccagagttatctttcataaaatataattttaattttacaaaaaaaaatacatgtgcagagtttaagcaggcagagttcaacaaatgataccaccaaaaggaaacaaacaaacaagacataccaatagcttccagataaataatttttaatggcttcagctcagagttatcttttcatttgtttgtttttggttaggttttttgaggtacaatttgcatagagtaaaatgcagcaattcacatatttaggtatacattccagtgagttttgacaaatatattcagtcatgtaaccactatgataaaaatatagaatatttcctttacccataagatatagatggatatagatatagatataaaagatacaaggtctccttctgttgcccttgaactcctgggatcaaacctcctgcctcaacctcccaactagcagggattacaggtttgagccactgtacccatcaccataagttatattttaatacattaactgaatcatgtcaactctttaggcaaaaagccttcagtgactttcttctaacttagaataaaattcaaactctttgtcagggtccttgaagccctacaaaactcacttccatttacttctctgaactcccctaataacaagtcccctcactcagcagggccctgctaaggagtttcaatctgcttcatggacgttcaacctgcctctccccttgtctggaatgatcttcctctgatgttccatccaccttactttttctgatctctttattcagtgtagctttcaattcacctcaagtaagttattaattattttatcctgtttatttcttatcacaatttgggataattttgttaatgtatctttttgcttgtttatgtcttagaccaccagaatgtagcaagataaaggcaggaccttggtccatttatgcaagactatattcccagctcccatgatattatctattctaccacacagagggttcttcatattaggttgaactatttggaattacccacatatgaccatttttgacctacaagaatggcgatttcatatggttcatttggtttataaatatttgctgaataaatgaatgaactgaaattttgagttgatgccaccaggaagagaatagacagttatatttgtgcgcagttagaaagagttcgctgtcctgagttcacttgatcactttttatcctaaattgccacccgctaccgtcgtagttttccacataataattttctattaggaaaattattcattaaaacagataacatgggtcacttaagtgtaaaacttaaaggtaacacttttttaaggaaatctaccagaagaaaatctttttctaatttttaaagtttaatgaaacataatttacatacaatgtaaatggctaataatttacgtacgatagctaatttttaactcttcatgtttttttgttggcaggcaacgtgttggaccttccggagcttctcagaagacagagggttttcttttgaggtaaatttgatagtacattttgatagtacgggaggcgatacggcatggtgacagaaaagcgccggcttggttagcaggaccacctggcagggctgcaggctgtgccacttaccaggcaggggaccttgggccagctgcttg

SEQ ID NO: 5439 - DNA, 2300 bp, Homo sapien
agaattaaaacactgttttctttactagacagtcaaagcttcatcttaaaacaaaaacatccttaaaatttgtccatcacaatcacctacctgtgctgcttgcaggcagccttcctctctgccatctccctctgcaaggcttgagcacagagctgtggggagaaaaatacatccatgtcccgacttggccgaaaagcaagggaaaaatgaacaaacttacccagttgttgaggcctttcttgcagcagaaggggcgatctgaaaaagccaacacatgagaaaatgtatgttgacagattctaggggcagtggcatcatcttgatgagcgtttaaggatcctgcaactgcaggaaggaaggctccttacctctcatctgtaggagtcctctacccactgctgcagctcttgtctgtcttgaatcgtttttctatggtttagaatcactttcatcagacacagcatcatctttagtatgattttaaataatctgccatgttcctgttgtcctcacaattgtacccttacacaatctatctatacatagaaaatgtatttcacatggctataaaagtacagtatgatcaaaactgttgctgtaatgcttcctcctcttttacttaatgcctgctgggttctgagttgacaatttccttacccattttcagtatgtccctaattcatgcttcattgggcatcttttatcataaagctctattctcctggaattaatatccttgccatatttcacagggcagaaacagctgagcttataaataggcacagtccttttgaaggatgggttgatcctacaacaacacactttcctaaggatgatgacaactcgcatcacccctagaacggctggtatgaaccgagtttccacacagtctggctggcattgcagtcaggagatgtttggctacttcacatgttttgaacactagtaaatcttaaggtacttgtgttctctggtgtgaattgtctctctctctaggtatcgcttctgaccatttgtttccatttctgtgttaactgggtctaaacattgtacaaagatttaaaacaaaacactccaccagcgcttccccaagaggctggtgtcggtttccgaacccacttgcagatgggtattttttctagagccaatttcatggtttcttccacctctgacagccgcctccccttttcttctcgttcacgttctttcattctcagcttcctgagtcgagaagggagagaaatgcatgcacgtgctccactggcctgtgtgggattccttgcggcatctgaaggccgtgattcaaaggtcccctgacaaccttcccataaatgaaccaactgatcctcacaactggagggagaattaacaccttccatgggacaaagaaaaagcacattctggcctgctggcaagtcacctgtcgtttccagctcatcttcatcgctctgtattcctactctttagtaaatatgaactattaaaagcttctatgagatgcgctatgtgtgcttctggggtcagtcttttgcctgacatagcgaaagctcattttagttcagtgtagaaaaccagacctcaccagctcatcacaactaaacccataaggacggagcagaggatcactcctcgtctgactcctcccacagggaaacctgattctccatcagaggctgatgccagaacccagacaatcagcctcagagagatccttccaggacatgctgtcattagccctgcggttcactactgcacatgtccatgattcaggactggaactcttctcatcgactttaaagatcctggttgagagaaaaggccaatctgagtgctgggtgcatctactgaattggaaatgatccaatggctctttagtcagggtgttatgtcctgaaaataggtgacaactgcaaaccatcctctggtgtccagagactttaacaaggtttgtttcacacagactgagggcagaaaaaaggaaatggcctaaaaaggtgggtttgctgtgttgcctcacactacttgattcatggttctgattctaaaaatctcacttgatacttgatttcatatgaaagacgtgtaaaatgcctgggtagaggcggcggcggcggcggcggcggcggcggcggcgggctcggaggcagcggttgggctcgcggcgagcggacggggtcgagtcagtgccgtttgcgccagttggaatcgaagcctcttaaaatggcagatgatttggacttcgagacaggagatgcaggggcctcagccaccttcccaatgcagtgctcagcattacgtaa

SEQ ID NO: 5440 - DNA, 2300 bp, Homo sapien; identical to SEQ ID NO: 5432

SEQ ID NO: 5441 - DNA, 2300 bp, Homo sapien; identical to SEQ ID NO: 5433

SEQ ID NO: 5442 - DNA, 2300 bp, Homo sapien
tattatttattttgagacggagttttgctcttttcgcccaggctggagcgcagtggcgctatgttggctcactgcaacctctgccttccgagttcaagtgattctcctgtcggcctcctgactagctgggattacaggcacccaccaccacgcctggctaatttttgcttcttttttttttaagtagagatggggtttcaccgttggccaggctggtcctgaactcctgacctcaggtaatccacctgccttggcctcccaaagtgctgggattacaggcatgagccaccgtgcctggcctgaagatggcacttttaaaaagatttttttctaagtaaaatggcccccaaagagcccaatgatttttttaagggtttatttttcattttaaaaaaactggataaaaatgaaagctgtaaaatatgggaagaggagcaagagagctgctgagtttgcatttgaaattgtgaggggctggggaggacacgaccaggtagagaggacccctacccactagtccctgctctcacagcttgcgctccccacactcaggctgcaccaccagggaacacaggacagaagtctagaggacaagagaccaaactcaagtcttctttcttgtggttggttgggtgtttacatgtgcaagtgtagtaagccacaccccacagacataaggtgcctgtctgtggatgccataggcatgctcctaagctcagtctctggtgaccccgagtctctgggcaggccacgggccttcacttctccactttcttggctttcttgaggatgttgcattttttcctgttagggcagtggcactgctcgtcgttgctggggatacattcgcagtgccacacctcctccaccttctccacggggtagacggcttccacctagtggcagatgagccgcagctgcgtagggtccagctgcttcttgttgcaagcccgaaaattgttgtactgcagccggaggttctcggcggtggaggagccccgcggcaaagttgcccacggagaggctctgctgcatgatcttgcacacctccttgtcggacagcaggtagggagagcgcaccgggaagctcagtgagggaccaccacctcatccaaggggatcttgcagaagtccttgctgctcctctcgggggcagcgggggaccctcagactcctctctgaacctctcaggattgattgcatagctcctcatgtctttacactcggggccagcacgtggaccttgcactgctgctggtaggagcgcctctgttcctgttccagtgcaggttgcccatgaactcaagggtccagacgcgattgtttttggtgcagaggtagagcaggtgcacttagtggcgaatgagcttgatgcaggacgggtccagctgcttcttgcccagggagtcgctgcagctgtgctgcttgtgcaggttgtcatgggtgaagagcttggggaataggggcaccagcaggcgcgaggtgaagttgccgatggacaggctgctctcgtagatactgtgaagatgctcgttgctgagcaggccgtcggcgccgggcacctccaagttgggctggggatctccaatttgaccaagtcgataggtaccagtcagatcttcttggagcggcaccgctcgcccttgaagctatcctccaccctgattactgagatgtcatcgggcaggctggaggagttgtagcagttgtcgcgtggggggctcgccttcgctgcctgcgtccagccccaggccctgaagcttgtcgttgatgcactgggcgcaccgctgcagccaggcctcctcctcctgcatgtgggggaagtagacctccgtgaagttgcagatgatctgcagcctctgcgggtccaggtcctgcttgccgccaggcctcctcctcctgcatgtgggggaagtagacctccgtgaagttgcagatgatctgcagcctctgcgggtccagctcctgcttgccgccgtccccgtagcagctgtcctgctcgcccagcttgcggtagtggaagagctcagggaagagccagtggaggaggaagacggcaaactcacctgtgaagaggcttcatgcaggaactaagtgagggcctacatgtccaccacgtggtctgaggcgatggtgctgctccagtccagagacaggccctcctcctcgtctttgtggtccaggaagtggccggggtccactgctcagcctcaagctggcagcctggccaccgggctggctgttctccatctcccgctgggcccagaagtggctgaagaacttattcagctggggcaagc

SEQ ID NO: 5443 - DNA, 2300 bp, Homo sapien
catgcctttcaaaaaatagtatgccctgttttcctactcagtctggaggttccattaaagagtatttctggcaaagatttttagatctgaaaacacactccaaaatatactttcttctgactccattcccagagtttttcctaccgcattcaaatgatttctagaaatgtttttgttgtagccttgatcaatttcagtcgataaagcagcagatagtaagggaacaattccacactccccatccctgactctgcaacacagtgcagaattccagttggcaataaaaaactagtagagaagcaactcactgacttcagtttgtaataccttcagaagaaactttaatcgtcacatcctttctgctcatttgcaggattcctatcatctgtctccacgtgataacactgaagagccttcacgttgatgcagtcccagggcctcaagtgcagagactgagagctctgcaggacacagcatggagccgccattcctctactgggtggaggagcatgtgtcctctgaacaggggatccaagccctgagatgttctttctcagctgtcagtgcggcccaggactttctgtggggatgctcagacagcaggggccggaggacttttagccaccacctcccatggccagtcttcacaaattacctttggctaatttgactgtctctcctcctggggtctaggacttcaaacatgtacagaagcgattgcagaattaagacaagacacttccacaatatattttttgtatcactggctcagaaaaagactcattcaaatcctgtatcaaagccacgtgtgagaatcttgagaaagcgtcagctgactgacttgacaagggaggaagcaaccaaaaattctgcgcttcttcagtatctgagtatgatattttgcttcaacatccctcttagatgaagttattgattgaaaatcatttaagtttgccccatggtaaaagatcaagtcctcagaaagatctccaaagtgtttacggtttgttttgttttggtaagtttaccatgattttgcttgaattgctctccgttgatcttctcagctaagatggaggtagagttgcacagtggaagagggctgcatgtaagaaggcagttccgtctcagaggacaaaaggcctgggagcacccagacagtcactgcatggaggtcactcccctcccagtggccactgtggagacatttcacagaaatgcttgctggaccattcaggttcagagttgggacaaaaccgagaactcatggggatattggacaggagttaggaaatgaccttctcacacaactggggcagtgggggagaaccctgggcttgagacttgcaatccaccacttgcccctgcccctgcccctgcagtgtggccgctgttacattttcctgcaactctgccttcttgagtccaagtgtcttcaaaaggggcaaatgcttcgtaagtgccgacagggtgtgtttcagtgaatgtttgcagtgtgcaccggtctggctgaaggcctcttcccttccccaacaccctcccatcgtgcaaaattaccctgcccagcagggagtgacttgtgtgtctcagaagattttgttgctgtgctctgagttctcactcctcatctcctttgaccagtttcttctaatactccccttgttcacaacacagaacatgagtgctctttcctatcattttgacactaataaacggacagtgattctcagtgtggaaatgagaatgaagctttttttaaagacaggctacaataattcccatgcagagaaccacatgcgatgacactggattccaaacagcaagaacgtatggtgaagatgaggccaacagtgagctgagagaggccagccagggtgtgtttcagtgaagatgagaaacaatcagataacacctgtttcctccaggaaagaaaatgtggccagggaaaagagatgggaggaaggctggtcattgcctattccactgtgcacagtttgaatttggagccatgaaaagtattgcttggttaaattaaaatcattcaaaagataaaacataaacatttaacaccagcacaatatgctgggaaacaaaatgaaaggatttctggtctcggtgctgtaggtcacatagccactctttcctggattgaggctttccagcaaaggggctgggacgtaaggctggcctgctggtgtggacagagattccagcaacatgcatgacctgggggtacaaggattgcttcctaaacaatgataagcacacagccacctaatagtctggatcggctgagacca

SEQ ID NO: 5444 - DNA, 2300 bp, Homo sapien
gaaaggacagagtggatggattgatcctttctagaaggagacaggtcacgtcattgtgtgtttgtagggagtggtgggatcatgttgtgctggtggccccgggaggatgataggcaagcctgaaccctgtgccatatcttcaggcacctggaaggtgcccttccatagtgttcagagagatttggactggagttttctagatcttagggaggagtggggagaagtggtctcagccagaaaactgttgggtgggttggctgtgacagagcatgtagtgacagcccctgggtgggcgaggctgggggctgctgtaactgccacagcccagagcccctcagctctctccctagagatggcttctctgtcagttcaggtagctgttggctttgatttaacaggggtgggggcagatgaggaagttcaggcaacacagggcctgggtttcctgagttgttctgaattgtttgcccttttgtggaagctcaggtcttcagacccacttcctcttgtctgctagctcatggcctgtcctctgcactttgtgttactgtggagatgaagaatttgctcctattccatttatactacctcatgaacggggggcaggtgtggattcttgctggttctcagtggaagggtctggaaaggctggtttccttttcagtagaggaaggagagtagcgcacgaataggaagatggttctcttattattattattcaagttaggatgtgtgtcctgaatgatgaggtgcatgtgctgtatcccttattccccttgactagagactgcatgaggtcctattgaacagggatgagttccagacaactttgcctcacccggcccatggcccaagaacccctggtttttggttggtcactatgttcagttattaggagctcaaaggagaagggccagggatgggctccttgtcccactacctattgtaacatgaccagcagctgtgaaaatccctagacacctcccctgttagctctgctgctcgccatttgctggctgtgttctaatcgtgtgtggcttttgctggctatgcagtgacactgtctcaggggactccaccactgcctctcagacctgctccctgggaacagagcttcctgagtggcagccgggaccatcgagtactgcggaaagggtggcccgaatctgacccctatttagcacttgctgtgggtggtgccaggacaatcacttgcatgctgggcatgacgagttatggattatcttcagggttcctagggcgctggcttgggaaagatttccatccagtggttttgttttggtatgtctgagctgggaaagaaaggggtttacaagagcgtcaggaaaaggatgattgaagaggagatggggccataatattcggaagcttctggcttcctgtcggccttctgagtgccgagcactgccctggggtaggcccctcacctgttgctgagcacgctgaggaccaccaggccgctgagagactcatccctgacccatggcttgggagatgcctgtgaggctgacagggtctgccagggacacccgagggagacgctcgggcagcaaaggcttggctgttacttcttgggagacaggggtcagggagtcttggtgaccggggccaggctctctagtggagcgactctccgtggaggaacagagcatccgatgcacactcagggacatttgcaagctgcagtttccctgtcatacgcccttagctgttgggactcccctctgattccccagtgactagtgtggacctggagaccccagctcattcacctctttcctttgtctccacagcatacccagtgctgggaccgggcgtgactgcgaaccctggcacctccctgtctgtgttcacggctctgcccttcaccacacccgctcccggcccagcacacgggccgctccttgtgactgcaggggctcctccaggcggccctctggtgctgtctaccttccccagcacacctctggtgacagaacaggatggctgcggcccgagtggggctggggcttccaacgtctttgtccagatgaggacagaggtggggcctgtgaaggccgctcaggcgcagaccttggtcctaactcaggcccccctcgtctggcaggctccaggcgccctctgcggaggtgttgtgtgtccacctcccctactcctggcagctgctcctgtggtgcctgttatggctgcccaggtggttgggggcacccaggcctgtgagggaggctggtcccagggccttcctcttccaccaccaccaccaccggctgcccagctgc

SEQ ID NO: 5445 - DNA, 2300 bp, Homo sapien
agttatattttaatacattaactgaatcatgtcaactctttaggcaaaaagccttcagtgactttcttctaacttagaataaaattcaaactctttgtcagggtccttgaagccctacaaaactcacttccatttacttctctgaactcccctaataacaagtcccctcactcagcagggccctgctaaggagtttcaatctgcttcatggacgttcaacctgcctctccccttgtctggaatgatcttcctctgatgttccatccaccttactttttctgatctctttattcagtgtagctttcaattcacctcaagtaagttattaattattttatcctgtttatttcttatcacaatttgggataattttgttaatgtatctttttgcttgtttatgtcttagaccaccagaatgtagcaagataaaggcaggaccttggtccatttatgcaagactatattcccagctcccatgatattatctattctaccacacagagggttcttcatattaggttgaactatttggaattacccacatatgaccatttttgacctacaagaatggcgatttcatatggttcatttggtttataaatatttgctgaataaatgaatgacctgaaattttgagttgatgccaccaggaagagaatagacagttatatttgtgcgcagttagaaagagttcgctgtcctgagttcacttgatcactttttatcctaaattgccacccgctaccgtcgtagttttccacataataattttctattaggaaaattattcattaaaacagataacatgggtcacttaagtgtaaaacttaaaggtaacacttttttaaggaaatctaccagaagaaaatctttttctaatttttaaagtttaatgaaacataatttacatacaatgtaaatggctaataatttacgtacgatagctaatttttaactcttcatgtttttttgttggcaggcaacgtgttggaccttccggagcttctcagaagacagagggttttcttttgaggtaaatttgatagtacattttgatagtacaggaggcgatacggcatggtgacagaaaagcgccggcttggttagcaggaccacctggcagggctgcaggctgtgccacttaccaggcaggggaccttgggccagctgcttggcctcactcaccctgtttctcagctgcaattgggatgaacagactgcctgcttcggggttgcctaaaactcacattggttaatgatgtgaaatgcttagcgcagtgcctggcatagagagaattctcattagatgatacctcagctgggctttaggagctacagaagaagctgcatctccatgagctcagcgtgtttctagctttcctttttgttttctattcaacctttcacccaactcagcttctcaatccctaaatgacaaaggtttgggaaggaagacttggaccgaggcttgcatttgtttctgagaattaaacgttatgttttcttcaatctaaataggtttgcttgtacagccttgttgaatggtttttttttttttctccatgataaatgactctcaacttcttttccctcatctaattgcttatctacatacaatgcctggaaggaaataaatgtaatggcccgtagcaactggccttcaggtatcaagtttaagtccctttaagcagaacagcaaattgagcacagaatgaactggtttcatggtagcgtactgcaattagatgcaagaatagggaaagcagggtgcttcaagtggtgacacaattagtatagcactgagggacttctctttccacttcttcaactccgcctgcattccgctggctgaagagttgatgacatccctgaaaaatcttccctctcttttttctctgatgccacctctgtgttctccgcctcactggccacacttcctttacctcccaaacttttaactctgagtgtcccaaacttgtctcatcacctacccctgctgcccagctccccagcctgttccccttctgacacgggcactctccttctgctgtcttgggagagaaacaatgaaggcctatttggcacttttatttctattcaaggaaccagactgtgaacaagtttaccatttagtcctttggactgtgtcttgaattcatccctcttctccattctcaccagcaccatcatcatgatggctaatatttcctgagcacctttcattcaggcatgatgccaggtgcaccaacttacttaatcctcatagccaccacctgagcaagctcctgttttataaatgg

SEQ ID NO: 5446 - DNA, 2300 bp, Homo sapien
ataccaaatccacatataaaataattgacttaaataatttaagatgctcttttatatatttatattaaaaactttacagagaataaaaaaagcattatacaggctacttatggtttttgatgtttggatctacaatacatgtatcaaagattgtggaaataaatcaaacaatatattcaattggacttaattgcattattacatgccaagtgtcgtataccatctatttgcacataacactttttaatttaggtaaaattattatcataaagctacatgaatttattttattccatgttattatttatgtattgttaggaacatttgcttaaaaatcatatttggacatagttagtatcagatactttacatcctttgaatcagttattttataacagtatatactaaacatcattactccttttcaaacataaataacgcaatacaaattggacaaaaaattcaggaaagatctgggatcaaaaaggaggtattgaaacatcacatgtactccataattatatacaaatattttgtacccataatatttaaaatacagaaaattaaaaggtgcattttcctcaaagtgcatgcttcttttgctatgcaaaactgcaagatatggaaagaagtgtattaaaacactaaatcactttatgtggaagataaaagggatggtacccaatgtaagacttcatgtagtgcactgatacattcaatacaaatgatgtattaacttcaagataacatgagaaagttaaattatctaacttatttcaaactaggggatagtatgttctcattattagaagccagaattctgcttatccatttctattattagaaaaaaacataatttttattcttgtcttaaaaatagacaccatgatatcattctctgtaaatgtagcatgatagtctgtttacagagtttatatcattccaagactgcacttctaaagtgagaaaatattaaaggatataaactcactcctctctacaaaattccttattttttatgcaatggctttaaaatgtatggaaggggagttatggaaacaatccatacctggaaagcattctatccatgcctttgaaatggttatctagtactagattcttatcagtgcctagctatgtaatgtgtgtagcttaagatttttaagaaagaaggataaaatgctcaatataaatttaaaaagcacttttattggaatattgaatcatatatttgctttctgtaagtccttttatctataaaataatagttgagaaaggcaaatagaatatgtggaggaattaaatattcagttgtagggtggtaaatgaaaaccaaatttttcattcaccacattaaatgtaaatgggtattatactcaatttaagcagcaaagttgcttcttttttttttttttttttttgagacagagactcacactgtcgcccgggctggagtacaatgttgccatctcgcttcactgcaacccctgcctgctgggttcaagccattctcctgccgcagcctcccatgtagcttcttaagatgtgaagatttttaaattaagatgactcttgggatgaaccatcttgtgttggttaaagacttttactgacatatttttaataatctttttaacttttattttcaggtcaatggcacatgcgtaggtttgttatgtaggtaaactagtgtcacagggatttgttgtgcagattatttcaccacccagctattaagcctagtacccattaattgtttttcctgatcttctgcttcctcccaccatccaccctcccagaggccccagtgtctgctgtttccctctatgtgttcatgtgttctcataatttagctcccatttgtaaatgagaacatgcagtatttggttttctgttcctgcattagtttgttaaggataaagacctccatccagctccatccatgttcctgcaaaggacttgatctcactctcttttatggctgcctaacattccatggtgtatatgaaccacaaaataaagatggttcttaacttttaaattaagatttttaaattaagatgaatcttgatttttaaattagtatggttttaagatagttttacagatagattagataatctatctagagatagatagggagagatatctatcaatacatatctctatctagatatagatagatggttttctatatagacctatctatctatatatgtatacatctatatatgtctacacatatctctatacacatatatatatttatatctacatctatatttctacatgtatatagg

SEQ ID NO: 5447 - DNA, 2300 bp, Homo sapien
ttattattcatcatctaagtatttctcaattttatctcttcaaagattcaaactttggatctttaaatttctttattgttttttgttttattttctgtttgattgatttctgctctaatctgtattatttattcgtttttcttgctttgtgctcagtttagtcttccttttctaatttctaaggttgggagaaagaattattaagaactctctttttaaaataacctttaaattttgatataattgtagatttacttacagttataagaaataatatagagagatttcttgtaaccttatctcagttctcccagtggtaacatcttgcaaaagtatagtacaatatcataaccaatatgtggaggttgatatagtcaacatacagaatatttccattaccacggaatccctcatgttgttctttcctagccacatctattttcctctttttcacctcatctttaacccttgataaccactaatctttcctccattctcataattttgtcacttcagtaatgttctacaagggaaattctacatcatataatcttttgtggtcagatttatttactcagcataattctctgaaaatttatggaagttgttgtctatatcaatagcttgtttctttttgttgctaagcagtgcttcattgcatgaatgtaatacattttgtttaaacttattcacaccttcaaaaatgtctgggttgtttccagtttggggttattaaaaataaagctgttctgaatatttgtgtaaagtttttgaattaacgtggtttttaaaaattactctgctgtaaatgcccaggagtgaaatcactgagtcataaagtcattgcctgttaaactgtttgtttgctttttaaagaaagtatcaaattgttagagaatggctttgttattttacattcccatcaaccatgcaccagttatgtagtttctttgcagccttgctagcactcagtgttgtcattattttttattgtaactattccattgggtatatattgaaatcccattggggttttaatttttcattccctaatggctaatgatgttgacgtcttttcatgctctgattttccaaacatatattcttttcagtgaaatgtatattcatgtcttttgcccactttctaatttgactttgttcactcttaagttttgaaagttctttatatattcttgctactagtctttttcagacacatggcaagcaaaaggggaaggaaggagcacctttttactgtcaagttgagatgaaggtcaaggttccccattaggcctcctttgccacacaaaaagtaaatactctgtgtttttaagataaagtgatggatgccaagaaagactcaaatttttttatgtactaatcataaaaatgaactatgatttataattcttctcttccattttcattatacataagaaaacaaaatacatcattctcaataataagaattctgagtgaaactcaccagttcaccttagctatattttcccttttgggtttcttttcttttacttttttttctctctctcctttttctttaaaaattttggagtgtgcagagggataagggtgagggagcgtggcaaggagaggagttcagatcaggacagggaatggaggagggcaaggagtgaagggcacaacccacagcctgggaaagagaggcatgaaacccagcgtgtcaggtggacggatcatggaatggggggccagcggaggttaaggaaggagggcccaaaggtaggggtgggaaaaagagaagaggaggaggaggaagtgcgcgtgtgaagagtgttaagaaaacgacaggacagagcggggaggggaaaagcgggccgagggacagggtgaaaggtgagaaacgagggtaagaggaaagagggcccggggcgctggggagttggggagacgatggagcgacaggtagagcagcttgggccgagccgcgggggtggaatccagacgccgggcgggggagggggcggcggggcggcgggacggtgggtgggggccaccaggcggcgccggagaccaccaaacattacagcgagcgagcctgcttcctggagggagtgcagacaaggaccaggagcgggagccgagcctcgcggcccggggcacggcgccgcctgcccctccccggcagtgcctcccgaccccctgccctccgctgggacatggcctgaggccccgcccgccgcccgggacccctcccccacgctgcccccggaccctcgccccaggaccgcggggtctcttcccggccccgccgcccgccc

SEQ ID NO: 5448 - DNA, 2300 bp, Homo sapien
attattttttattgtaactattccattgggtatatattgaaatcccattggggttttaatttttcattccctaatggctaatgatgttgacgtcttttcatgctctgattttccaaacatatattcttttcagtgaaatgtatattcatgtcttttgcccactttctaatttgactttgttcactcttaagttttgaaagttctttatatattcttgctactagtctttttcagacacatggcaagcaaaaggggaaggaaggagcacctttttactgtcaagttgagatgaaggtcaaggttccccattaggcctcctttgccacacaaaaagtaaatactctgtgtttttaagataaagtgatggatgccaagaaagactcaaatttttttatgtactaatcataaaaatgaactatgatttataattcttctcttccattttcattatacataagaaaacaaaatacatcattctcaataataagaattctgagtgaaactcaccagttcaccttagctatattttcccttttgggtttcttttcttttacttttttttctctctctcctttttctttaaaaattttggagtgtgcagagggataagggtgagggagcgtggcaaggagaggagttcagatcaggacagggaatggaggagggcaaggagtgaagggcacaacccacagcctgggaaagagaggcatgaaacccagcgtgtcaggtggacggatcatggaatggggggccagcggaggttaaggaaggagggcccaaaggtaggggtgggaaaaagagaagaggaggaggaggaagtgcgcgtgtgaagagtgttaagaaaacgacaggacagagcggggaggggaaaagcgggccgagggacagggtgaaaggtgagaaacgagggtaagaggaaagagggcccggggcgctggggagttggggagacgatggagcgacaggtagagcagcttgggccgagccgcgggggtggaatccagacgccgggcgggggagggggcggcggggcggcgggacggtgggtgggggccaccaggcggcgccggagaccaccaaacattacagcgagcgagcctgcttcctggagggagtgcagacaaggaccaggagcgggagccgagcctcgcggcccggggcacggcgccgcctgcccctccccggcagtgcctcccgaccccctgccctccgctgggacatggcctgaggccccgcccgccgcccgggacccctcccccacgctgcccccggaccctcgccccaggaccgcggggtctcttcccggccccgccgcccgccccggcgagaacaggcccggcgggcaaggcggcggcggaccgagggaggcctggcccggcagcggggagaagggtgcggcgcagcccgagtttcccaccttttatcctggcccagacgcggctggggcggacgggacctctcgcgctctgcctcctcctcttgcttcatggagccatgcgcctgggtgggggctcccgagagaagctggcctgcgggcgggccggacgcgctgcgcggacgggacggggcgaaggaggccggcaggcggaggaggaagcggcggggcggcggcggcggcggcggccgggaagaactagaggtattccccgggcggctggaggactgagtcgagccgggacccgagtcctccggtatcccagcagccaccggaggcagtgaggtaatggaggaagaatgtagggagtcctccggtggaccacactccttctagcgagccgcggaaaccatagagatcagggctcagccggagggccggcccactgctgtcacgtggcctccatccgtgcgctttattggctggtgctggctttacggggttgaattttggacgctgcctgccattcgtgggaccgagtttcaggcagctggaataaagagagatatcgggggaaagccgcgagaaggccagcgtccctcgctgggagcagagctagccgagtagggcgcccggctgtcaaactggccggcgcagtgcacgctgggccgccccggagcgatcgcagagcccgtcgggagtcgtagtcccggacgggcccgcggcatcgtccgcgacgcagctcgggatccgggtcggggtgtcggccgggttgctgccgggcaccgtcgagcgttagccacccagcattgagctgccagcggctgttctccctaagcaccctcgctcacgtcgcctcgcctcgcctgaccggccgcagccttggataccagccttaaatcgagccgactacggcccagccccg

SEQ ID NO: 5449 - DNA, 2300 bp, Homo sapien
aaaaattttttctacttgagataagaaaaatatagagtgtgacagaaggtattctaccaatataaaaacactttaccaggaaaactgagaagggggctgttaaccttccgggaaatgtaggtcttcagtggattcttgttacagacataaaaacgtagagagaagactttcagttaaaagcctcataccttcagcaaagtatattctgattccattatcgtgttaggctcctatacagttataagtaatcccatgcggttttagaattcttaaatattcacacacatagtcatctgaaaatgaataaatccatgaatgactaaacaaatttattcctatatcattttcaatatccttaaattatgcttacatccttaaatcagttgcctcattctgaaagcacatagtctgtaactcataaaaaacacctgtcggccgggcacggtggctcacgcctgtaatcccagcactttgggaggccgaggtgggcgtatcacctaaggtcgggagtttgcgaccagcctgaccaccatggagaaaccccgtctctaataaaaacacaaaaaattagccgggcgcggtggtgcatgcctgtaatcccagctacttgggaggctgaggtaggagaatcacttgaacttgggaggcggaggttgcggtgagccaagatcgtgccagcctgggcaacaatagcaaaactccgtatcacaaaaaaaaacaaaaaaaaaaaaacaaaaaaaaaaccactaaataattcatttagtatgggagagtgtgaggaagcagaaaattaaaaaaaaaatagaccagcaataatgtcactttttcatgaatttgttagttctttctgggctccacttacagttactttcccattcttccctgcacaccgtcaacacataaggactcaaattaagatgatgtatatgtttacactccaaaattttttttttttttttttgtgagcatggggctgtattttaatacaagaaagacattgctctagaacatggctcgcctttgcttcagggcctagcagtttattttagccataagggtaagggagcaggtcagaaatgacttttagtgtaatcctatctgtaattaaaaatacaaatgctgtcataagatcaaatgttatcaaaaatcagtatttaaaattaaatttacccccaaatttctttcaaaaaagttgtaatgttctttttcagtgaagcctttgcactgctagagctgaagaatgtgatcaatcggcttgttgaataatcccgcacagtaggtattccgctgaagccaactctagctgggggctcgagagcgaaagacacagatggggccctgccgcccctcgaagagtcggatgggcgcgcccgtccccggtgcatcaagaggctggcccggccaggggcgaggggctcgcaccgaaccccgcgcacctcgccgcgggcggggctgggccgtagtcggctcgatttaaggctggtatccaaggctgcggccggtcaggcgaggcgaggcgacgtgagcgagggtgcttagggagaacagccgctggcagctcaatgctgggtggctaacgctcgacggtgcccggcagcaacccggccgacaccccgacccggatcccgagctgcgtcgcggacgatgccgcgggcccgtccgggactacgactcccgacgggctctgcgatcgctccggggcggcccagcgtgcactgcgccggccagtttgacagccgggcgccctactcggctagctctgctcccagcgagggacgctggccttctcgcggctttcccccgatatctctctttattccagctgcctgaaactcggtcccacgaatggcaggcagcgtccaaaattcaaccccgtaaagccagcaccagccaataaagcgcacggatggaggccacgtgacagcagtgggccggccctccggctgagccctgatctctatggtttccgcggctcgctagaaggagtgtggtccaccggaggactccctacattcttcctccattacctcactgcctccggtggctgctgggataccggaggactcgggtcccggctcgactcagtcctccagccgcccggggaatacctctagttcttcccggccgccgccgccgccgccgccccgccgcttcctcctccgcctgccggcctccttcgccccgtcccgtccgcgcagcgcgtccggcccgcccgcaggccagcttctctcgggagcccccacccaggcgcatggctccatgaagcaagaggaggaggcagagcgcgagaggtcccgtcc

SEQ ID NO: 5450 - DNA, 2300 bp, Homo sapien
gcctttcaaaaaatagtatgccctgttttcctactcagtctggaggttccattaaagagtatttctggcaaagatttttagacctgaaaacacactccaaaatatactttcttctgactccattcccagagtttttcctaccgcattcaaatgatttctagaaatgtttttgttgtaaccttgatcaatttcagtcgataaagcagcagatactaagggaacaattccacgctccccacccctgactctgcaacacagtgcagaattccagttggcaataaaaaactagtagagaagcaactcactgacttcagtttgtaataccttcagaagaaactttaatcgtcacatcctttctgctcatttgcaggattcctatcatctgtctccacgtgataacactgaagagccttcacattgatgcaggcccagggcctcaagtgcagagtctgagagctctgcaggacacagcatggagccgccattcctctactgggtggaggagcatgtgtcctctgaacaggggatccaagccctgagatgttctttctcagctgtcagtgcggcccaggactttctgtggggatgctcagacagcaggggccggaggacttttagccaccacctcccatggccagtcttcacaaattacctttggctaatttgactgtctctcctcctggggtctaggacttcaaacatgtacagaagcgattgcagaattaagacaagacacttccacaatatattttttgtatcactggctcagaaaaagactcattcaaatcctgtatcaaagccacatgtgagaatcttgagaaagcatcagctgactgacttgacaagggaggaagcaaccaaaaattctgcgcttcttcagtatctgagtatgatattttgcttcaacatccctcttagatgaagttattgattgaaaatcatttaagtttgccccatggtaaaagatcaagtcctcagaaagatctccaaagtgtttacagtttgttttgttttggtaagtttaccatgattttgcttgaattgctctccgttgatcttctcagctaagatggaggtagagttgcacagtggaagagggctgcatgtaagaaggcagttctgtctcagaggacaaaaggcctgggagcacccagacagacagtcactgcatggaggtcactcccctcccagtggccactgtggagacatttcacagaaatgcttgctggaccattcaggttcagagttgggacaaaaccgagaactcatggggatattggacaggagttaggaaatgaccttctcacacaactggggcagtgggggagaaccctgggcttgagacttgcaatccaccacttgcccctgcccctgcccctgcagtgtggccgctgttacattttcctgcaactctgccttcttgagtccaagtgtcttcgaaagggcaaatgcttcgtaagtgccgacagggtgtgtttcagtgaatgtttgcagtgtgcaccggtctggctgaaggcctcttcccttccccaacaccctcccatcgtgcaaaattaccctgcccagcagggagtgatttgtgtgtctcagaagattttgttgctgtgctctgagttctcactcctcatctcctttgaccagtttcttctaatactccccttgttcacaacacagaacatgagtgctctttcctatcattttgatactaataaacggacagtgattctcagtgtggaaatgagaatgaagctttttttaaagacaggctacaataattcccatgcagagaaccacatgccatgacactggattccaaacagcaagaacgtatggtgaagacgaggccaacagtgagctgagagaggccagccagggtgtgtttcagtgaagatgagaaacaatcagataacacctgtttcctccaggaaagaaaatgtggccagggaaaagagatgggaggaaggctggtcattgcctattccactgtgcacagtttgaatttggagccatgaaaagtattgcttggttaaattaaaatcattcaaaagataaaacataaacatttaacaccagcacaatatgctgggaaacaaaatgaaaggatttctggtctcggtgctgtaggtcacatagccactctttcctggattgaggctttccagcaaaggggctgggacgtaaggctggcctgctggtgtggacagagattccagcaacatgcatgacctgggggtacaaggattgcttcctaaacaatgataagcacacagccacctaatagtctggatcggctgagacca

SEQ ID NO: 5451 - DNA, 2300 bp, Homo sapien
gaaaggacagagtggatggattgatcctttctagaaggagacaggtcacgtcattgtgtgtttgtagggagtggtgggatcatgttgtgctggtggccccgggaggatgataggcaagcctgaaccctgtgccatatcttcaggcacctggaaggtgcccttccatagtgttcagagagatttggactggagttttctagatcttagggaggagtggggagaagtggtctcagccagaaaactgttgggtgggttggctgtgacagagcatgtagtgacagcccctgggtgggcgaggctgggggctgctgtaactgccacagcccagagcccctcagctctctccctagagatggcttctccgtcagttcaggtagctgttggctttgatttaacaggggtgggggcagatgaggaagttcaggcaacacagggcctgggtttcctgagttgttctgaattgtttgcccttttgtggaagctcaggtcttcagacccacttcctcttgtctgctagctcatggcctgtcctctgcactttgtgttactgtggagatgaagaatttgctcctattccatttatactacctcatgaacggggggcaggtgtggattcttgctggttctcagtggaagggtctggaaaggctggtttccttttcagtagaggaaggagagtagcgcacgaataggaagatggttctcttattattattattcaagttaggatacgtgtcctgaatgatgaggtgcatgtgctgtatcccttattccccttgactagagactgcatgaggtcctattgaacagggatgagttccagacaactttgcctcacccggcccatggcccaagaacccctggtttttggttggtcactatgttcagttattgggagctcaaaggagaagggccagggatgggctccttgtcccactacctattgtaacatgaccagcagctgtgaaaatccctagacacctcccctgttagctctgctgctcaccatttgctggctgtgttctaatcgtgtgtggcttttgctggctatgcagtgacactgtctcaggggactccaccactgcctctcagacctgctccctgggaacagagcttcctgagtgacagccgggaccatcgagtactgcggaaagggtggcccgaatctgacccctatttagcacttgctgtgggtggtgccaggacaatcacttgcatgctgggcatgacgagttatggattatcttcagggttcctagggcgctggcttgggaaagatttccatccagtggttttgttttggtatgtctgagctgggaaagaaaggggtttacaagagcgtcaggaaaaggaagattgaagaggagatggggccataacattcggaagcttctggcttcctgtcggccttctgagtgccgagcactgccctggggtaggcccctcacctgttgctgagcacgctgaggaccaccaggccgctgagagactcatccctgacccatggcttgggagatgcctgtgaggctgacagggtctgccagggacacccgagggagaccctcgggcagcaaaggcttggctgttacttcttgggagacaggggtcagggagtcttggtgaccggggccaggctctctagtggagcgactctccgtggaggaacagagcatccgatgcacactcagggacatttgcaagctgcagtttccctgtcatacgcccttagctgttgggactcccctctgattccccagtgactagtgtggacctggagaccccagctcattcacctctttcctttgtctccacagcatacccagtgctgggaccgggcgtgaccgcgaaccctggcacctccctgtctgtgttcacggctctgcccttcaccacacccgctcccggcccagcacacgggccgctccttgtgactgcaggggctcctccaggcggccctctggtgctgtctaccttccccagcacacctctggtgacagaacaggatggctgcagcccgagtggggccggggcttccaacgtctttgtccagatgaggacagaggtggggcctgtgaaggccgctcaggcgcagaccttggtcctaactcaggcccccctcgtctggcaggctccaggcgccctctgcggaggtgttgtgtgtccacctcccctactcctggcagctgctcctgtggtgcctgttatggctgcccaggtggttgggggcacccaggcctgtgagggaggctggtcccagggccttcctcttccaccaccaccaccaccggctgcccagctgc

SEQ ID NO: 5452 - DNA, 2300 bp, Homo sapien
agtcttactttattatatataagaacttaataatttaccaggtattcaaagatacccaggaacatttatcttcttcaaaatatttcctgattttcacttgccattccatttctcatctggatccagatcagaacctttacctacttttctgcaggttactcactcctggctttcttcgtgcttgtgtggctctcttttaaacacttcacactgagttgtgaacacctatcccttcttttttcaaaaggtcttttttcccttcttttttcaggaggcaaggaagggggaggcagtaggaaggactgaacagagaggaagacgtgcaaaatactcatttggaacaatgggagattgaatagaccggacaaagaatgattaaagtgaggactgctggcatggccctgttttcctccagccatgtttagttgcatcgttgtggcatggaatagatggagagctgggtttatccagggctcccatcttactaagcagataggaggtgacagggaggcgggtgagttgaggaggtgtgcaagggaccaatgagaatggttggccatggagtttaagctggctcactagagagggaaaagtcataaaggaaggaagaaacagtgaacaggtagtaagatcttgattggaggtgctggtaaggttgcaggagttttgtttcagggcagtatagggagtaacctggatagctaggaggtggtggtcagagtgggctactgtggggtttgcagtccttggacctgacaaggtctaaggtctgatcatggagggagggggaagctgaggtagggcagaggacaggagtgggcttcatgagatcaaaaggatgtcagaaggattatctacccagatactgacatctccatgaagtaagaggcctagtgtgaagaagttacaacatcctaagctcttcagggataagggaatcatgtgccacgtgggtagcctccccagtctagcacccagtatatagcctatgcagaatgaatacctgagggctgctgggggcgaaaacaaggtccctgtgacaggacttgaagcctgggggtctcggtgacaggagtgggcctagtttttaggtgtagaattgagccttgcgtgcactggtgggatcttattgaaaggatcccctccaagactagaggaagatgcatcctgacaatgtaggctctgtaggcgtcccaagtacctgggctgggggttagatggactccaaggcatttcctcaggtggcaatgggaggatccctgggaaggcaaagctgtgcaggaagaaaatggcaagatgctacattccctcagggaaagcccctttaccgggagcagggaaggcgaggtagtttaggctgggtcagtttgtccctgccctcagagtctgttggtcctggaaaaagaaggccttattttatttatttatttttctttgagacagtgtcttgctctgtcgcccaggctagagtgcagtggctcgatctcagctcactgcaacctccgcctccaaggctcaagcgatcgttctgccttagcctccagagtagctgggaccacagggaccacaggcgcccgccaggacgcgggcttgcttttatttatttatttatttattgagagagagccgtagcctccctatgttgcccaggctggtcttgaactcctgggctcgagcgatcctcccgcctcggcctcccaaagggatgggattacaggcatgagccaccgcttccggccaaaagagggctttagggcacccccagaacgcgagatctccctcatctgtcatctttaaagaggaggaagtggactcccagtccagccatagtccattcgtccggagcacggtcactccggggtggccaggaccaaatgtgcctccttctggcttttgcaccgcaccaactaatccgcgccaggccgcacagctgctctggccttcggggaggactcctggagcgcggtgtacactgctccggagtccctccgcaggagttgaggcagcgagttccgagggcggggtggggcggaatccggaggcacgcggacccggtggaacgcactgcgcagacggcgccggcgcctgcactcagctgttgacgagtctttcttccagctctaccctgaaagtcctccaggcaccggtcttttttttctgccttttgtttccctcccggcgagtcggcgcgacagtgaatttccgtttcccgcggtgtccaagcggacctgaggagttgcagctgtgagcaggttcggtggtgccgcgggctggggtaggcggcggtggggtccctggct

SEQ ID NO: 5453 - DNA, 2300 bp, Homo sapien
caatataaaaattttgaaataacaaataaagaatttaagatatgagttgtaaggaagctcaatgagatacaagagaaagttgaaaactaacataaggaaatcagaaaaataattcaggatattaatgaaaaatttacaaaagagatagagattaaaaaacaaaaaccaaatagaacttctagaaataaaaatttattgaaggaactataaaatatagttgaaacttttagcaaaagactagaccaagcagaagaaataatttcagagcctgaaggccagtcatttgaattaacctagtcagacagaaatacagaaaaaataaatttttaaaaatgaacaaagactttgaaaaatatagaattacataaagttaccaaatatacaatatatagacattcctgagggagaagaaaaaaaattaaaagcttggaaaacctatttgagggaataattcaggaaaacttccctggtcttgctagagaattagacatccagataggagatgctcagagaacacctggaagatgctttacaagagaaacctcataaaggcatatcgtcatcagactatccaaagtcaatgtgaaggaaaacatcctaaaagcagcaagagagaaatgtctaatctatacaggaaaacccaacagactaacaatggacttcttagcagaaaccttacaagccagaagagattggggtcttatgtttaatctacttaaacaaaaatcctgccagccaagaattttgtatcctgctaaactaagctgcataaatgaaggagaaataaagtttttcccatacaacaaatgcaaagggaatttgtcaccacaagaccagcactacaagaaatgcttaaagttctaaacatggaaatgaatggacaatactcctcatcataaaagcacattaaagtgaaaaactcacagattatataaagcaattacataattgagactaaaaagcaactgggtaacaattatcatgacaggaacaaaacatcacatatcaatattaaccttgataataaatggagtaaatgttccacttaaaagatacagattggtgctgggtatgatggcttacacttgtaatctcagaacttcggtaggctgaggcaggagaattgcttgagaccaggagtttgagaccagcgtgggcaacagagtgagaccccatctctgtaaaaaattaaaaagagaaattagccaggtgtgatcatgctcacctgtaaagaggctgaggcaggacaatcacttgagcccaggagtttgaggctgcagtgagctataaatgcattatggcactctagcctgggtgacagagtgagactgtctcaaaaaaaaaaaaaatacatacagactaaaagattggataaaagtagcatcagctcaggggtcctaactagttacaagaacagtgcacaagacaaacaccagctaagatggcagggagaacaagcctgaacaaggcaaggcagaggtctgctaagggaaatccatcccacaaaagacaagcaaggcaggggctctctgaggcctagagcagcatgcaaaagagcaactctttccaggtggcagctccctagctgctgcccccacatgctgctgcctctgcagccactctacctgccccacccctgcccaggtattccaagcagctctcagctctttcccaatatctgggcagtgctgttgagacaaaggaagaggagaagtggacacagcaggtcttggctcttaagatctgcagttgtgagttccttttgcaatcgctgtaggtcattgtgcaacctgctggtctctggactcctgatttctagacatctataaaatacagacactgatgatgccacttaattcacagagctgcagtgagaaaggtgcagatgagttcaaggcctgatagtgttctgcaaactatagtgatggatgtgcatagtattgtgaatatcagtggcaggtttccagaacgcaggtggggataagagtgagtgagtcaataaagaagaaaattgccccacttcttgaagggagtttttggggctgggcagctcagggtacagggcaggcataaatagtgagtgcctgccaagcaaaggctagtttgcttggagctcctggggcctaacaaaaagaaacctgtaagtgtctctgttcttgccttctttttattttctccacatcctataaatatccctctgccgacctgggcaattcaacctattggtgtggagggtctgtgtagctgttctggtctaggaggcatgggcgcaggaggtggggagcacaggaggtcttatg

SEQ ID NO: 5454 - DNA, 2300 bp, Homo sapien
tgtctttgaggtgtgagtaatctttggtaaaggtgaccaactgggaagaggtgagggctgaagagattattttagtcagctgaaggtgaaaattgaatctgataggtactgaaaacacaaagaagataataagcaaaacttattctaggagagaagaaagaaaaggaaagctgagaaaacaaggagttattcagaaggaggagaagaataaagagggtggtgtgatcaaggatgataaggactaagaaaacaccaattgttacaattgttactgttaatcttgatattcaagagcactgtggtctacctgggaaatggatttcctcacatattctgaaattcattctttaagactttatatcccaagatactcacgtaaaaaatgaggaaagagaaccttggttggttccagagtgccctctctggaactggaacactcagctgccaattgttttccagtattcctcacccacttgggcatgacaggaccctgtgctgtttcttcttctttgaaataaggacaatagtttactgcctaggattgttttaagaattaaattagttaattattgtatagtacttagaacaatgccttgaacatagtaggtgttcaataaataccagctacagtatagtaactttttttttttttttttgacggagtctcactctatagcccaagctgaagtgcagtgattggatctcggctcactgcaacctccgcctccggtgctcaagcaattctcgtgcctcagcctcccaagtagttgggactatagacacgcgccaccacccccagctaattttttgtattttagtagagacagggtttcaccatgttctccagggtggtctcgaactcctgagcgatccacccacctcggcctccaaaagtgccaggattataggcttgagccactgcgcttggccagtaacccatttttaaggcccaggtgaaatagtttttctatttctatgattttctatttctatgattaaatagtgtttaatcagacacttcagctgcatatacctcccacagctcattgatgatacaacagttcgcacagggcctggcacacatgctaaaggctcagcagtattgataatcacccacacttacaaagcactatgggccagacactgctgtgctttctttacagatatcaactcatttaacccaccctaaaaaccctgaggttcccaaaactggcatatcctcatgttacagatacagaaactaagacacagccgggctaagtaattaatctaagcttacacaaatagccgagacagagccaggacttaaatccaggcagcctgtttcacagtccctgctcataaccatggtgctgtatagttccaaacatcttaactaatgaggacagcattatttctcaaggtgcacagcacagagaacttcaaaaattagactcttagtaaaacaccatcttttttttttttttttgagacagggtcttgctgtgttgcccaggctggagtgcagtggcgtgatctgggcccactgcaacctgcacctctcaggttcaagagagtcttgtctcagcctctggagttgctgggactacaggcaggcaccaccgcgcccagcaaattttttgtatttttagtacagacggggtttcaccatgttgaccacgctggtctcaaactcctgacctcaagtgatctgcccgactcggcctcccaaattgctggaatttattccaacacctcattcattcattcattcattcgagacagagtctagctatgttacccgggctggtctcaaactcctgggctcaagggatctttctacctcagcctcccaacgtgctgagattacagggacacgccaccgcgccagcccgaacatctttatcttaaacccagaaaagtgacaggagtgtctcccctacaagatgatgaccagccctccagacctgagcccaggtgtgattccaaggcccctgtactggggccagacagggagactcgctctcagggacttcccaaccagcaccatcttctccctgcggggatggcgagggagcgcgggccggccccggccctgcctccgcgctcgcgctcgacggtgtcctgaagcgcgctcccggggaggtgttgcagccatggctacggcagccggcgcgacctactttcagcgaggcagtctgttctggttcacagtcatcaccctcagctttggctactacacagtaaggacagccgctggagcgctacggtctgacgaacgagcgagcgctcggttcaccccaggacctgggctcacaggc

SEQ ID NO: 5455 - DNA, 2300 bp, Homo sapien
tcacgtaaaaaatgaggaaagagaaccttggttggttccagagtgccctctctggaactggaacactcagctgccaattgttttccagtattcctcacccacttgggcatgacaggaccctgtgctgtttcttcttctttgaaataaggacaatagtttactgcctaggattgttttaagaattaaattagttaattattgtatagtacttagaacaatgccttgaacatagtaggtgttcaataaataccagctacagtatagtaactttttttttttttttttgacggagtctcactctatagcccaagctgaagtgcagtgattggatctcggctcactgcaacctccgcctccggtgctcaagcaattctcgtgcctcagcctcccaagtagttgggactatagacacgcgccaccacccccagctaattttttgtattttagtagagacagggtttcaccatgttctccagggtggtctcgaactcctgagcgatccacccacctcggcctccaaaagtgccaggattataggcttgagccactgcgcttggccagtaacccatttttaaggcccaggtgaaatagtttttctatttctatgattttctatttctatgattaaatagtgtttaatcagacacttcagctgcatatacctcccacagctcattgatgatacaacagttcgcacagggcctggcacacatgctaaaggctcagcagtattgataatcacccacacttacaaagcactatgggccagacactgctgtgctttctttacagatatcaactcatttaacccaccctaaaaaccctgaggttcccaaaactggcatatcctcatgttacagatacagaaactaagacacagccgggctaagtaattaatctaagcttacacaaatagccgagacagagccaggacttaaatccaggcagcctgtttcacagtccctgctcataaccatggtgctgtatagttccaaacatcttaactaatgaggacagcattatttctcaaggtgcacagcacagagaacttcaaaaattagactcttagtaaaacaccatcttttttttttttttttgagacagggtcttgctgtgttgcccaggctggagtgcagtggcgtgatctgggcccactgcaacctgcacctctcaggttcaagagagtcttgtctcagcctctggagttgctgggactacaggcaggcaccaccgcgcccagcaaattttttgtatttttagtacagacggggtttcaccatgttgaccacgctggtctcaaactcctgacctcaagtgatctgcccgactcggcctcccaaattgctggaatttattccaacacctcattcattcattcattcattcgagacagagtctagctatgttacccgggctggtctcaaactcctgggctcaagggatctttctacctcagcctcccaacgtgctgagattacagggacacgccaccgcgccagcccgaacatctttatcttaaacccagaaaagtgacaggagtgtctcccctacaagatgatgaccagccctccagacctgagcccaggtgtgattccaaggcccctgtactggggccagacagggagactcgctctcagggacttcccaaccagcaccatcttctccctgcggggatggcgagggagcgcgggccggccccggccctgcctccgcgctcgcgctcgacggtgtcctgaagcgcgctcccggggaggtgttgcagccatggctacggcagccggcgcgacctactttcagcgaggcagtctgttctggttcacagtcatcaccctcagctttggctactacacagtaaggacagccgctggagcgctacggtctgacgaacgagcgagcgctcggttcaccccaggacctgggctcacaggccgcgggccgggggaagtcgtgcaagcacaatcccgactcccgcgcgctaggagcggaggggaggggaccagactccgcaatgagagcaagcatactggtccgccagggtcttgggcgggcgcccagggccctgagaaaccggctagccaggcttttcttatatgggggcggggacggctggggagctcccagccaactctgtgtctgggtttttcaagaggatggtgaagtcggaggccagcaatgcggctaccgcctatttccgtccagcaagacccttgccctctctggtcacagtcctggggctgggctacttcgcggtgaggcgtggggtggggcggggcgggcctctgttttggcccgccgggccc

SEQ ID NO: 5456 - DNA, 2300 bp, Homo sapien
ggtgttcaataaataccagctacagtatagtaactttttttttttttttttgacggagtctcactctatagcccaagctgaagtgcagtgattggatctcggctcactgcaacctccgcctccggtgctcaagcaattctcgtgcctcagcctcccaagtagttgggactatagacacgcgccaccacccccagctaattttttgtattttagtagagacagggtttcaccatgttctccagggtggtctcgaactcctgagcgatccacccacctcggcctccaaaagtgccaggattataggcttgagccactgcgcttggccagtaacccatttttaaggcccaggtgaaatagtttttctatttctatgattttctatttctatgattaaatagtgtttaatcagacacttcagctgcatatacctcccacagctcattgatgatacaacagttcgcacagggcctggcacacatgctaaaggctcagcagtattgataatcacccacacttacaaagcactatgggccagacactgctgtgctttctttacagatatcaactcatttaacccaccctaaaaaccctgaggttcccaaaactggcatatcctcatgttacagatacagaaactaagacacagccgggctaagtaattaatctaagcttacacaaatagccgagacagagccaggacttaaatccaggcagcctgtttcacagtccctgctcataaccatggtgctgtatagttccaaacatcttaactaatgaggacagcattatttctcaaggtgcacagcacagagaacttcaaaaattagactcttagtaaaacaccatcttttttttttttttttgagacagggtcttgctgtgttgcccaggctggagtgcagtggcgtgatctgggcccactgcaacctgcacctctcaggttcaagagagtcttgtctcagcctctggagttgctgggactacaggcaggcaccaccgcgcccagcaaattttttgtatttttagtacagacggggtttcaccatgttgaccacgctggtctcaaactcctgacctcaagtgatctgcccgactcggcctcccaaattgctggaatttattccaacacctcattcattcattcattcattcgagacagagtctagctatgttacccgggctggtctcaaactcctgggctcaagggatctttctacctcagcctcccaacgtgctgagattacagggacacgccaccgcgccagcccgaacatctttatcttaaacccagaaaagtgacaggagtgtctcccctacaagatgatgaccagccctccagacctgagcccaggtgtgattccaaggcccctgtactggggccagacagggagactcgctctcagggacttcccaaccagcaccatcttctccctgcggggatggcgagggagcgcgggccggccccggccctgcctccgcgctcgcgctcgacggtgtcctgaagcgcgctcccggggaggtgttgcagccatggctacggcagccggcgcgacctactttcagcgaggcagtctgttctggttcacagtcatcaccctcagctttggctactacacagtaaggacagccgctggagcgctacggtctgacgaacgagcgagcgctcggttcaccccaggacctgggctcacaggccgcgggccgggggaagtcgtgcaagcacaatcccgactcccgcgcgctaggagcggaggggaggggaccagactccgcaatgagagcaagcatactggtccgccagggtcttgggcgggcgcccagggccctgagaaaccggctagccaggcttttcttatatgggggcggggacggctggggagctcccagccaactctgtgtctgggtttttcaagaggatggtgaagtcggaggccagcaatgcggctaccgcctatttccgtccagcaagacccttgccctctctggtcacagtcctggggctgggctacttcgcggtgaggcgtggggtggggcggggcgggcctctgttttggcccgccgggccctcgtagggcgaggggagctctgggaacggggcctgtgcgcacgcgcatctgacggttgtctcggttactcatgtaagcggaaattcggtgggctcttaggatagtttctgctttctagtgttcctgtctttgggtcctcacctctgcatggttactaacgggttatccgagcctaagcctctcacgaagcggaaagtcaagttaacagactgccataggcctgccaagtcagaa

SEQ ID NO: 5457 - DNA, 2300 bp, Homo sapien
gagtgcagtggcctgatcacggctcactgcacccttgacttcccgggctcaagcgatcctcccaactcagcttccccaagtagctggaatacaggcatggctaccacgactgactaatttatttatttatttatttattttagatggagtttcactctgtcgcttaggctggagtgcagtggcacgatctcggctctctgtaacctccgcctcgcggattcaaacgactctcctgtctcagcctccagagtagctgggactacaggtgcatgccaccacgcccagctaatttttgtatttttaatacagacagagtttcaccatgttggccaggctgatctccaactcctgacatcaggtgatccgcccttctcggcttctcaaagtgctgggattacaggtgtgagccactgcccatggctaattttgtgtgtgtgtgtgtgtgtagagatgaggttttgccatgttgcccaggatggtctcgaactcctgggctcaagcgatttgcccgcctcggcctcccaaagtgctgggattacaggggtgaaccaccatgcctggctgactcctattaatacattccaccaaaaccattattttataaaagatattagcaaattttgagtttatgtgctttggctagtttctttactgcagaaactggctccagccaaacctctgtttaatttagaattcctttctcggctttccctttttgtacggctaaaactgagaatgatccactgcatagagatggaaaataagtgagataaggttgtgacattttaatagcaactgcttaatcacataaatttttcgtaatcttaactttcagcctctgtattgtaacttctgtcagctaagacttttctgagaataactcaacagtttcaaaatgtattgtcccattcaaatctttgtcaagagcagtactacctctctcacgatgttgtttcacatctgaaagttaaataatgcacaaatatcactgcatcctcccaaaccaaagggaaaggggagcatctgccagctccacaagatcccaatttgaagtccccaaagctttcctccaactatattctaactagtcacagacactaaatcgtagaacagaaatgcacctttgaaaattttcagttcaacacctccattgtacatatggggaaatcaggacataggttgtcagatttgacaccaacaaacaacactgtggacaagacaaatctccaatctccaggatctattggtatacccaaatagcttcgccttccttcaaaattttaccaccttatcacttgacgttaggagttcgaggccagcctcaccaatacccatgtctactaaaaacacaaaaaaatagctgggcatagtgtaatcccagctacaggtaaagacatgagaatcgcttgaacctgggaagcagaggttgcagtgagccgagatcgccccactgcactccagcctgggtgacagagcgagactccgtctcaaaaaaacacaaaactaccaccttagcccccaacctacttttccacgcatctttctcgttatcctttaaacagattatttctcagccaaacaaacgtcgctctttttctaggtacagctttcttcttgcttccacacctatgtcagaacagttatagcctctttatcctcccttaccacttaaatcctacccatcctttagatttatccccgttttccaaacaattcctattggctcaaacattctgcttcggaagccctattctgacttggcaggcctatggcagtctgttaacttgactttccgcttcgtgagaggcttaggctcggataacccgttagtaaccatgcagaggtgaggacccaaagacaggaacactagaaagcagaaactatcctaagagcccaccgaatttccgcttacatgagtaaccgagacaaccgtcagatgcgcgtgcgcacaggccccgttcccagagctcccctcgccctacgagggcccggcgggccaaaacagaggcccgccccgccccaccccacgcctcaccgcgaagtagcccagccccaggactgtgaccagagagggcaagggtcttgctggacggaaataggcggtagccgcattgctggcctccgacttcaccatcctcttgaaaaacccagacacagagttggctgggagctccccagccgtccccgcccccatataagaaaagcctggctagccggtttctcagggccctgggcgcccgcccaagaccctggcggaccagtatgcttgctctcattgcggagtctggtcccctcccctc

SEQ ID NO: 5458 - DNA, 2300 bp, Homo sapien
cgcgcccagcgcagaagtattttatgtaaatggcgccccctgcagcccaattcctacctagactaacatgctcaggtgcaccttggaacagcgctggaagaccccttgcccctcctgtgggcttagtaacaatttggggaacagtttttggcctatctggcaaaatgtaaaaggcctttgacgcaatgattcctcttccagcctttcagaaatatgtacatacaggaatatgtactacgtacatgaagatatatgcaaaggaatgtttattaaagcttattttatattggagagaaaaaggaagcaatctacatgtctgtcaataggggactgtttggataaataatgctccttgtatccattcatgggatattttaactcttaaaaggaatgaagtggatttatctgtacccacatagactgatctccaagattattttcttttattttaagatggagtcttgctctgttgcccaggctggagtgcagtggtgcaatcttggctcactgccacttccgcctcctgggttctgattctcctgcctcagcctcctgagtagctgggactacaggcgcccaacaccacgccctgctaattttttgtatttttagcagagacggagtttcaccacgttggccaggttggtctcaaactcctggcctcaggtgatccacccacctcggcctaccaaagtgctgggattacaggcgtgagccactgcacccagccaagatttaatgttatgactgagataaacatgaatgaaagcaaatcttcaaaatatctatgacttgatctcatgtatatacatttgtgtctgaatatacattaggtagatggggaatgcatagacgtggaacaggcagagcctaccaagttgaggggactggacctgaatcattggacggagggaattcgtaacagaaaagactttcatgttttactctgtatacttaattactttatgctctaccgcaacaataatgtattgtatatgtttttgtgtgtgtgtgtgttttcttagtcttaaattcaaaatataaggtagcccactggctctaagctacaagaatccttatgagttgggcagttctttgacaactttttttcccacctggcgaaactatcaaggaatgtcctaccaccaagcgtgagaaatttttggcattcctgaaataaattcttcttctgagccagctcatgtgggcatcataatctccttgaaggcttttaaaagatttagatctgagtctgtctcagattctcgggctcagaaccagaatttctccgtctgaggctactatcttgctctggaggagggagtgagaactggatcactggttagcgtggtaactgttttggacaattgcatagccacagccaggaacacagaaggcagagaggcagccttgatctgcaagagctccaggtaatcccaacggggacccttgatggacaaaggcattctcccaggcttggtgatgaatgtgttccacttacagccagacgagacactcactcagggctctgcagcagagaagttagagctacagcttttttgctttgtgtttttactaaaacttaatttgttgttgcacttgttggatgggcatgtcccataggggaagtttccactactgtgctctaaactttgggctgcttgtaccatcttacttatcccctcattaataatgaattgaataaaatctttagtatatgctaatttcatatctttgcgagagttacgattttaccttttctttttaaaattaccttttcatatttctatcactcccttaccagagcagtgagtttctgggtctccctcttaggggcagacactgttccatgtaattagaattaatttcttgttcgtaggtagacagagaaaagctgccaaactcccaggagacaggggttcagatcctgtgctatggctgagagtgatgccgaggaagacacttccctccgagtcttagtctgcccgcctgtgaaactggctcgtaacaaacccctgaccccaggctcggtcgccttgagcccaagacctcacccaatgccccccgccccgccttccctcccgggctcccaggaggtgcggggactcggggggcggccccttcctcgggaggcgcccaggtggcacgtcggtgcctcagctcccggggtctctgggctccgcgctgcccacggggtgccgaggggcctctggagggggcgggttctctcgagccagaaagtccggagccgcccaggaattttggctcgaactgagtgcatttcctctcgggccggccgg

SEQ ID NO: 5459 - DNA, 2300 bp, Homo sapien
cacacacacagtgttaaagagagatatttggaaggacacacctaagagtgggctgggggagtggagggaagagtgaatctcaatttttactcattttttgaattttttatttttagttttttagagactgggtctcactatgttgcccaggctagtctggaagccctgtcttcaagccatcctcctgtcttggccttccaaagtgctgagattacaggcgtcagccaccactcattaaaaaaaaaaattgtatacctaccatatatgcatatattacctgggtgaccttttaaaaatatgctttatttttagaacatctttagatttacagaaaaagtgtgaatacagggaattctcataaacccgggcttttcctattattaacatcttaagtcatttttatatctccgtgggttcctcttggctgtgacagtgtcctagactttccttgtttttgatgaccttgctagttttcaggagtactggtcatgtatatggcaagggcctcaattgatttgtgatgttttcctcatgattacagtggggttaggtgttcttgggaggaagaccacaagcggtgcatgcaatcagtatgatttacccctgtcgaggtcaccttgacggctgggtggtttgtcaggtttctccacgatagtcactgaccgctcccttcctcacatactgtgcgtgaccttcccccctccaccaccaccgagtgttgctataaaggaaatgcgtttgaccttttcagtgtaaaaagttttctcgaccttaaagagagtcactaaccgacgcacacggggctggagaggacttaggaaatgcccacccctgcaggagggcgaatgcggctctgcgcggcactgggcgccgcaggggttaggggcggcagagggacctccggagcccgagacttcctggagcagctccgcagccggaaggctgctgctcctcgcgggcccgccgtgcccagtcctcatcttgggggcggggccgcgctcaggccccgcccctcccttgcactgcctctggcacctggggcagccgcgcccgcggagttttccgcccggcgctgacggctgctgcgcccgcggctccccagtgccccgagtgccccgcgggccccgcgagcgggagtgggacccagcccctaggcagaacccaggcgccgcgcccgggacgcccgcggagagagccactcccgcccacgtcccatttcgcccctcgcgtccggagtccccgtggccaggtgagtgagggtcccgagccggctgggggcctgggaccaggcggcggcagtgcaccgcggcgccgcgggtgaggcccggggctgcctggcgcccagcccagcgcggccctgcggcttcctggttgcactacaggcgtgggggtggggggcaggggagggcgtcggcgggtcgcgggcgggccgtgtcggcctggcagccccctagatcagcctcggcgtctggggctgctccctcatgtgtggtcggggtgcactcgccgtccccccgggctcaggggtcggggtctcagtctgggcctgggtagggccaggggccgtgaccctgggcgcaggaggcaacgggtggcgggaggggtgccggaggcccggccccgcagccctgcggagccctccagggtgcgcgcgcccttctaggcgaggcttggggagattaagcagagaaggctatcttcaggaactttcctccgaaactgggagcacgcacattcctgggagctgctaccattgcagtttatttgtaaggaactctccccagtgtttgagggaatgcgggagccatcccaggtgctgtgcgtgccttcgccccttccccaaccttgatccccagtttcaggaagggattcctggacttgtatctcccatgggtgcaggccaggcccttaagacttaggtaaaatggtctgttggtttaaaggagacacgcgaagtttgttacctagagactttggaggggaaaagttaagccagccagtgctagcccaagctggaaacagtcagcccggggcatttctgtctctgccctccaatccttgacctctctgtagagattcggcgtttgtggtagctctcccctctgttctctgcgctgggcatggagtggagctgtgaggccgagcccctgccctgccctgccctgccctgcccacgcaacagggactaggtttgcagggcagggcctggtatgctcacccttcactggctctcattgctttcctcattccttttatgcggcagtcaattgttggggattccaggggattaacagggcccc

SEQ ID NO: 5460 - DNA, 2300 bp, Homo sapien
gtattctaggagcattcgctcagccacggagaaaaatgggcctttcgaagaagctggccttcgcggtcgctgtggggcggcagagcaggcgcaggcgtccaggcagtgggggctgggtaggcgccaggagaccttcccggaccaatccccgggcccagagagagcgcctggagaccttacctccccaggaaattcacacagatttcttgggggcttcacacccgcgcccccagtcccgccatctcctacgccgcagcaggcgcccccaccagggtaataacccactctgagagtctctggtggtgcctctgatcctctgctcttctgttccaggcagcgttttctccgagcggctctggagactttggcctgagtttcaccctcactcgccgactcatgtccaaaaaatgcagtccagccccgaaagagagccgcgcctgctggtgggggtagggggtgttggagcggccacggaatatgactgagcgcccggggcccgttgtgaggccggggccaggctgtcccaaggcaccgttcctgcccggcaccagcacacctgcccagacagggagaaggtcggagcctcccctccagtccttccggattttattgttcagagcgactttaaaacgcaaatcgggccgggcgcggtggctcacgcctgtaatcccagcactttgggaggccgaggcgggcggatcatttgagcctaggagttcgagaacagcttggccaacatagtgaaaccccgtctctactaaaaatgaaaattagccgggcgtggtggtgggcatctgtagatccagcaactcaggaggccgaggcaggagaatcgcttgaacccgggaggcggaagttgcagtgagccgagatcgcgccactgcactccagcctgggcgacagatcgagactccgtctcagaaaaaaaaaaaaaaaaaggaaaatcgaaccagcagcttgtttgtaacagccaaacataggcaacaacctaaatgtccttcagtaaggagctaggtaatgaagaatggtgaagcgcacgatggcgcgcagtgtgcagtggatgggaagaaccaggtctgttcaggagcacttgtatggaaagaccctccaagatatagtgagtaaaaaaacatgttgcagaaaagtactgcaatatcgttttgtaaacaatacgtttatgtaaacacacacacacagtgttaaagagagatatttggaaggacacacctaagagtgggctgggggagtggagggaagagtgaatctcaatttttactcattttttgaattttttatttttagttttttagagactgggtctcactatgttgcccaggctagtctggaagccctgtcttcaagccatcctcctgtcttggccttccaaagtgctgagattacaggcgtcagccaccactcattaaaaaaaaaaattgtatacctaccatatatgcatatattacctgggtgaccttttaaaaatatgctttatttttagaacatctttagatttacagaaaaagtgtgaatacagggaattctcataaacccgggcttttcctattattaacatcttaagtcatttttatatctccgtgggttcctcttggctgtgacagtgtcctagactttccttgtttttgatgaccttgctagttttcaggagtactggtcatgtatatggcaagggcctcaattgatttgtgatgttttcctcatgattacagtggggttaggtgttcttgggaggaagaccacaagcggtgcatgcaatcagtatgatttacccctgtcgaggtcaccttgacggctgggtggtttgtcaggtttctccacgatagtcactgaccgctcccttcctcacatactgtgcgtgaccttcccccctccaccaccaccgagtgttgctataaaggaaatgcgtttgaccttttcagtgtaaaaagttttctcgaccttaaagagagtcactaaccgacgcacacggggctggagaggacttaggaaatgcccacccctgcaggagggcgaatgcggctctgcgcggcactgggcgccgcaggggttaggggcggcagagggacctccggagcccgagacttcctggagcagctccgcagccggaaggctgctgctcctcgcgggcccgccgtgcccagtcctcatcttgggggcggggccgcgctcaggccccgcccctcccttgcactgcctctggcacctggggcagccgcgcccgcggagttttccgcccggcgctgacggctgctgcgcccgcggctccccagtgccccgagtgc

SEQ ID NO: 5461 - DNA, 2300 bp, Homo sapien
agatgaggactgggcacggcgggcccgcgaggagcagcagccttccggctgcggagctgctccaggaagtctcgggctccggaggtccctctgccgcccctaacccctgcggcgcccagtgccgcgcagagccgcattcgccctcctgcaggggtgggcatttcctaagtcctctccagccccgtgtgcgtcggttagtgactctctttaaggtcgagaaaactttttacactgaaaaggtcaaacgcatttcctttatagcaacactcggtggtggtggaggggggaaggtcacgcacagtatgtgaggaagggagcggtcagtgactatcgtggagaaacctgacaaaccacccagccgtcaaggtgacctcgacaggggtaaatcatactgattgcatgcaccgcttgtggtcttcctcccaagaacacctaaccccactgtaatcatgaggaaaacatcacaaatcaattgaggcccttgccatatacatgaccagtactcctgaaaactagcaaggtcatcaaaaacaaggaaagtctaggacactgtcacagccaagaggaacccacggagatataaaaatgacttaagatgttaataataggaaaagcccgggtttatgagaattccctgtattcacactttttctgtaaatctaaagatgttctaaaaataaagcatatttttaaaaggtcacccaggtaatatatgcatatatggtaggtatacaatttttttttttaatgagtggtggctgacgcctgtaatctcagcactttggaaggccaagacaggaggatggcttgaagacagggcttccagactagcctgggcaacatagtgagacccagtctctaaaaaactaaaaataaaaaattcaaaaaatgagtaaaaattgagattcactcttccctccactcccccagcccactcttaggtgtgtccttccaaatatctctctttaacactgtgtgtgtgtgtttacataaacgtattgtttacaaaacgatattgcagtacttttctgcaacatgtttttttactcactatatcttggagggtctttccatacaagtgctcctgaacagacctggttcttcccatccactgcacactgcgcgccatcgtgcgcttcaccattcttcattacctagctccttactgaaggacatttaggttgttgcctatgtttggctgttacaaacaagctgctggttcgattttcctttttttttttttttttctgagacggagtctcgatctgtcgcccaggctggagtgcagtggcgcgatctcggctcactgcaacttccgcctcccgggttcaagcgattctcctgcctcggcctcctgagttgctggatctacagatgcccaccaccacgcccggctaattttcatttttagtagagacggggtttcactatgttggccaagctgttctcgaactcctaggctcaaatgatccgcccgcctcggcctcccaaagtgctgggattacaggcgtgagccaccgcgcccggcccgatttgcgttttaaagtcgctctgaacaataaaatccggaaggactggaggggaggctccgaccttctccctgtctgggcaggtgtgctggtgccgggcaggaacggtgccttgggacagcctggccccggcctcacaacgggccccgggcgctcagtcatattccgtggccgctccaacaccccctacccccaccagcaggcgcggctctctttcggggctggactgcattttttggacatgagtcggcgagtgagggtgaaactcaggccaaagtctccagagccgctcggagaaaacgctgcctggaacagaagagcagaggatcagaggcaccaccagagactctcagagtgggttattaccctggtgggggcgcctgctgcggcgtaggagatggcgggactgggggcgcgggtgtgaagcccccaagaaatctgtgtgaatttcctggggaggtaaggtctccaggcgctctctctgggcccggggattggtccgggaaggtctcctggcgcctacccagcccccactgcctggacgcctgcgcctgctctgccgccccacagcgaccgcgaaggccagcttcttcgaaaggcccatttttctccgtggctgagcgaatgctcctagaataccacgtttataataaatcatgtagggtggaattcctgctggatgtatacacctttctgcatcagagctcttcaaacccagaatggtgaatagctacccctgggcttacccttttataattttcaacaaacctg

SEQ ID NO: 5462 - DNA, 2300 bp, Homo sapien
aatgctgagcactgcattgggaaggtggctgaggcccctgcatctcctgtctcgaagtccaaatcatctgccattttaagaggcttcgattccaactggcgcaaacggcactgactcgaccccgtccgctcgccgcgagcccaaccgctgcctccgagcccgccgccgccgccgccgccgcctctacccaggcattttacacgtctttcatatgaaatcaagtatcaagtgagatttttagaatcagaaccatgaatcaagtagtgtgaggcaacacagcaaacccacctttttaggccatttccttttttctgccctcagtctctgtgaaacaaaccttgttaaagtctctggacaccagaggatggtttgcagttgtcacctattttcaggacataacaccctaactaaagagccattggatcatttccaattcagtagatgcacccagcactcagattggccttttctctcaaccaggatctttaaagtcgatgagaagagttccagtcctgaatcatggacatgtgcagtagtgaaccgcagggctaatgacagcatgtcctggaaggatctctctgaggctgattgtctgggttctggcatcagcctctgatggagaatcaggtctccctgtgggaggagtcagacgaggagtgatccgctgctccgtccttatgggtttagttgtgatgagctggtgaggtctggttttccacactgaactaaaatgagctttcgctatgtcaggcaaaagactgatcccagaagcacgcatagcgcatctcatagaagcttttaatagttcatatttactaaagagtaggaatacagagcgatgaagatgagctggaaacgacaggtgacttgccagcaggccagaatgtgctttttctttgtcccatggaaggtgttaattctctctccagttgtgaggatcagttggttcatttatgggaaggttgtcaggggacctttgaatcacggccttcagatgccacaaggaatcccacacaggccagtggatcacgtgcatgcatttctctcccttctcgactcaggaagctgagaatgaaagaacgtgaacgagaagaaaaggagaggcggctgtcagaggtggaagaaaccatgaaattggctctagaaaaaatacccatctgcaagtgggttcagaaaccgacaccagcctcttggggaagcgctggtggagtgttttgttttaaatctttgtacaatctttagacccagttaacacagaaatggaaacaaatggtcagaagcgatacctagagagagagacaattcacacaagagaacacacgtaccttaagatttactagtgttcaaaacatgtgaagtagccaaacatctcctgactgcaatgccagccagactgtgtggaaactcggttcataccagccgttctaggggtgatgcgagttgtcatcatccttaggaaagtgtgttgttgtaggatcaacccatccttcaaaaggactgtgcctgtttataagctcagctgtttctgccctgtgaaatatggcaaggatattaattccaggagaacagagctttatgataaaagatgcccaatgaagcatgaattagggacatactgaaaatgggtaaggaaattgtcaactcagaacccagcaggcattaagtaaaagaggaggaagcattacagcaacagttttgatcatactgtacttttatagccatgtgaaatacattttctatgtatagatagattgtgtaagggtacaattgtgaggacaacaggaacatggcagattatttaaaatcatactaaagatgatgctttgtctgatgaaagtgattctaaaccatagataaacgattcaagacagacaagagctgcagcagttggtagaggactcctacagatgagaggtaaggagccttccttcctgcagttgcaggatccttaaacgctcatcaagatgatgccactgcccctagaatctgtcaacatacattttctcatgtgttggctttttcagatcgccccttctgctgcaagaaaggcctcaacaactgggtaagtttgttcatttttcccttgcttttcggccaagtcgggacatggatgtatttttctccccacagctctgtgctcaagccttgcagagggagatggcagagaggaaggctgccggcaagcagcacaggtaggtgattgtgatggacaaattttaaggatgtttttgttttaagatgaagctttgactgtctagtaaagaaaacagtgttttaattcttctacaagtcaactcttt

SEQ ID NO: 5463 - DNA, 2300 bp, Homo sapien
cccctttcccagggccgtgtgtgtgcacagcctggcatttgaggacttctctcagctcacgatgtctgtgtgcatcgggccatctcatgcagatcttacatggccaggactctttctcctacttcttctggaccttccttgttgctccttagaccaggcagaacacagagtaggagtttgatacagatccagggtttgatggatacctgagtagccttggggaggtagagagtttgctgcaggcacagtcccagggagccactgtttgctgccccgtggttctgtccaggccctgggatgggagcagtcccatactcactggccagtgtccctcccagggccatctggcagagctgcacccctgcgggcaccacatgtccctaaaatcctctgagccctgctcttgtgggtccatgctgctttcggcagtattgggcctgtggccagcacagggtcttgagtggcatccaaccttcttcttggaagagccctgtctaccagcccatgcagctccaggtcagatcccagctcttccgactgtgtgatcttgaccaagacatttacattttggatccttggctttcttatctgcatcattggcaggaggagagatacctcctgggctatagagggtcaagaaagggctttggccagggggacatttgctggcacctggaagcctctgagacagaagaggagacatgtagtgggtcagaagttgagaggaaactcaagtctccaagcagtgctaattgtggccccatgtgggaatagctgggccttacacccagtcctcccacagcaccaggcaattttttgaacgtaagaatgtgtcagattaactcccccaacaccctttgaagacaggaggccccacttggctcctgggagccctgcccacctcctgggtgcctgtgtctggccacgatgtgccgttcgctcagcctcagcctcacagtatctcccccacccttctgatggacaggtgacagttcagtacatgcaggacaatggcgcagtcatccctgtgcgcatccacaccatcgtcatctctgtgcagcacaacgaagacatcacgctggaggagatgcgcagggccctgaaggagcaagtcatcagggccgtggtgccggccaagtacctggacgaagacaccgtctaccacctgcagcccagtgggcggtttgtcatcggaggtccccaggtgcattcttgtctctgaacgaagccctggtttgtctttgttactggggttgcttatgtctcagagcaggaaaacctcaagagatagcttggagggggtcagctgactctggccatggactaaatgtaaagtcggtgaattttggcctctgtacatttagtgcactctctggggaggtctgctatgtgtctgacagtgtgcaagaaatgggggatatgtccctaggattcctccacttagcgccactgggccctcccactcctgccatctcaagtgaccatcgaccttacccacggctgctgcacctcaccctgctctggtgcacattccccactgcagcatttgcacgtggacagctgttcccgggtggctgtttccagatcttcaccacaggctgcctctggctgttgtgggcaccagagtgggacagggtgttttagacagggcaccactgccccctctcttgtactgcaagtgtgaggaggtggaggttgagggcactgctgtgaggctgctgcccactgcctgggccctcagccgtgtgtgctttgccagagttgagctccatcccgggttccagtagcaagtagagtgtagaaacacagagtagaaggaggtaacacttattgttttttcttgcaggacttctcaaagcctagacatactagtatgaactgtggatctctaaaagggggagtagagcaggcagacttccccaaatcatttaacatagaactcccacccttttaaagacatcactattgactggtgttgcccagaggacacttgggaagtgggcagcatggcatttgctaggtggcaccagccagggttgtatttatgacagtgcagttcctgcctgcagttggatctctccattgtgatggactcagtaacaaaggcattagggagtggctgtgaccccagagaacccctggcccaccttctgcacttgctaatgaagctttggcaggttacctgttttcaatatgttgtcagtgactgagctgggagtggagtccagagttctgggctaaggggtcttaggaaaatgtctgtgggcagccccaggacatccttcctgagttgcagttca

SEQ ID NO: 5464 - DNA, 2300 bp, Homo sapien
attgtgtgctagcactttgtccaatactcatcatacctaaatgacctcatttagttctcaaaataacactaggaggtaggtaattatttaacccgctttacagcagaagaaacaacagattagaaaggttaggaagccttctccatgctgcatgggaggttacaggcaaaagttggaccctagtccagaagcctgcacttccatccaccatgctccgtgtactgcttcttaacatttacttgctagaagaatataaggcatcctagtatttagttggggtcttaaatgaaactcatacttgagatgagtttttaacgaggtgcctctcagatccctccctcacaccctcaattggcatccaggctgccaaagccccctgcacacatatctgtgtaacagatcgtctccccaccctgacgccttccaccccatggtgctgttacttatggaattcagaaggcagctactgctttgttttctgtcttcctgataactctaggaaccttgaagagtacctgctacttacacatcatcttgttcttaaatcaaatttggaccataattgttatcatacaattttaactgctaaggtcacctagttctacagttcaaattaaacattagctcatattgcctctaggtttaaaactaatgtacccagaagaaatttactaagggccagcaatgttgaaatagcttaagtgcaaacagaggagtcctgtgtgctggcaatgacaaggcgatgttgtctaaagtccctatttgattcctcgtttgtccatcccttcccagtggccttttcctctctgaactttcaacagtcttgtgcctaagcacttcagttcactccttgttaaatgccgttgattggctatgcatatgtaacatcccttactttattccagaagaggtcaccttaatactgctttaattccctgaagggatgatgtttggtcatcagttagcaaaactcaagctttggagcaccagaatgtgtgccagaaaaaatttttccaaatgcttgataataaactcagaggggggtttggtcaccagaattgttaggtgaggctattgcttcctaacttttgcttcccacagtccaagctttgatgcacaaggttatggttgattactttttattgcattctagtgggaactggtttctccacccatcctcattttctgtggtctcaattccccattgttccttgggtctgaggatgcagctggatctgagagtgtgagacgctgtcatttagtacatgaactaaagatataatcctgtttactactttttttggtcaaagcaaaaaataatgcaagagttatgtgaacacgatgtttattacatgtatagaactgaatatgtagatgtttataatccggaagctttgggaaactggactttgataatttccctgtaatgaatccatttctcaaaagcatttttttctaaaaaaaacacacacacacacacacacacacacacattgttctctgtaacctccccagatagatactttttaaagatcttgcttgttaaaatgcctgccagccttttagagaagttgacaggttaggtggtttctgttagcagaaacacgtggactcaaagcttttcctctaaaatgaatctgttgtgtaacatcacagctggctcagaatacaggtgcgtgctcctgctctccctgagaagatagaatgggaagagaccaatccagatgagacgcaggggaggaggggacacccaacagcaaaggcactgttgcaatcttagcctaaaccatatctctgagaaagagtttcttgttgcctgcttgtatctctgggtgatcacagacccctgctctccaaggtgggttgtgaactctggagcactaccaagattggctaagagctgaaggagagtcccaaaggagcttcaattctgcagaactatacagccttctttaccttaccttgaccaggtgcttagagtttggaaagtcagggataagaattgaaattcctccaggtaagaagacccccctcttaggaaatggactcctccaattttctcacatgatttttcaggcactttcgcttttccatatataggagtcgctcaggagcaagctgtggcaagctggagggagggacacatcccgtgttccatccactccctcccttctcagcagtcctcgcctgttctcacgtgctcacaggcagttaggcagaagtgatccccgtggctctgccaaagacaagcctgttgggttgaaagaagaagaagaagaagaaaaaaaaactcaggcaaa

SEQ ID NO: 5465 - DNA, 2300 bp, Homo sapien
ggtcttcaaatagccacacactggttgtggaagagtgggtgagaaactcttcagaatatcatctgatggctcatgcctgtaatcccagcactttgagaagccaaggtaggcagatcatctgaggtcaggagtttgagaccagactggccaacatggtgaaaccctgtctctactaaaaatacaaaaattagctgggcagggtggcacatgcctgtaatctcagctactcgggaggctgaggcaggagaatcgcttgaacctgggaggtggaggttgcagtgagccgagattgtgccattgcattccagcctaggcaacagagtaagactccctctcaaaaaaaaaaaaaaaaaagaaaagaagaaaaaagaatatcatctgaaatcattactaaccaacaatatatttgctcccaactcagcatatctgtcacactagaatagggttcagcaataaagcctgtgggccaaagccaacccacctcctgttttttatagcttacaaagaaagaatggcttttacatttttaaatagaaaaaatttaaaagaaataatatttcatgacataggaaaacggtatgaaatgtaaatttcagcatccttaaagctttattgaaacacagccatgctaatttgtttacgtattgtctacgagcgcttttgtgctgccatagcagagtgtagtagttataacagagaccacatgtggtgcactcaccactttgcctggctgcccagcacactacaaaccgcagtaacatcattgtaacagcagtgtttggagtgccatggtatcactatactgtgacatttaaaaaaattatatccattatgtcaaaacaagaaagccagggatgggtggcttattcctgtaatcccagctactcaggagcgaggcaggaggattacttgaagccaggagttcaagaccagcctgggcagcatagcgagacccccatctctaaacaaaattttgagaaaaaaaaaagaaaaatagtgaattttgaatgtcgcacttttaaggcacactagagtgtgtattattttgtcatcaaattaaatggcaaaacatgtttcttgctatacagtgccactgtaccaaaagaatataataaatatcaacattaccagactaagcactcatcacaatagtcccagctcacagagcacaaaggccaaaaaaaattagaaaatgtaaaacagaattggctgggcatggtggctcacacctgtaataccagcacttggaaggcctgaggacaggagttcaagaccagcctggccaacatggtgaaaccctgtctctactaaaaataccaaaaaaaattacgcgtggtagcaggtgcctgtagtctcagccacttgggaggctgaggcaagagaattgcttgaatctgggaggtagaggttgcagtgagctgagatcgcaccactgcactccagcctgggtgacagagcgagactctgtcttaaaaaaataaaaataacaaaaacagaattatcacagcagaatttatttacaaaaattaaaaatgaaaataagtctgcaacaaaagtagggttccaagaggctcatttgttatgaaagcaaggaaagatatttaccaatgatgagtgaattaaaacatgttttatttcagtggccaaaaaaaatgtgtccaggaaaaaacaaacttgtctaagattttagccttttggtgagagcagctgctcagagttgacactgggagcaacatcagtagtcaactaataacaaggcacatgattctgagtggctttccttggctcctgataagcagacagatgttcccaacactgctcagttgttgtttatggaaagggtcaatgctgagtttgaagtgactgaaaaaccaaacctctatgaatagtctttgatatggtttggctatgtccccattcaattctcaacttgaattgtatctcccagaattcccaagtgttgtgggagggacccagaaggagttaactgaatcatgggagctggtcttccctgtgctattctcacgatagtgaataagtctcacgagatctgatgggtttatcaggggtttccacttttgcttcttcctcattttctcttgctgccaccatgtaagaagtgcctttcgcctcccaccatgattctgagacctccccagcaatgtggaactgtaagtccaattaaacctctttttcttcccagtgttgggtatgtctttatcagctgcttgaaaatggactaatacagtcttcatggaacaattacagacaagagcattttcaaagtcgtgtagaaacac

SEQ ID NO: 5466 - DNA, 2300 bp, Homo sapien
gatgggagagcgtgctctcactctctgccatctgagaataaaactagaagacagccacctgcacaccagccagagggtcctcaccagacaccagaaatgccaatgccttgattttagacttcccagcctccagaatggtgagaaataaatgtgtattgtttttaagccacccagtgttggtaatttgctacagcagcgcaaactaaaacaaaaacagtctctgccttcatggagcttatagatgagaaaggaagataaatatttaaatcaataaatatgaaattgcagttaaaataagtactatgagaccagacaagaggagtagctgatcaagtcaggaaagtaaaaaaaaagcttctttgggggtgacatttgagctaagcttacatttactgaaaaaaaaaaacagtaaaattaacacgacaaagaagagaagagtcttctaggtatgaggaaaggccctgatataggaatgagcatggcaattacaggggatagaatgccactgtgtctaaacttgtccctggacaaatgcatctagcattttgcataaaatttcagagacagtgacatcctggggtccgtccataacccccaatttttattctatggatgaaccccaggatgtcagtgtctctgaaattttatgccataactatgtgcatatgccatatgacagtggtgggagggcaaaatggtataactcctatggaggagaatttgacaacatctagaaaatcacatatgcattcaccctttgactcatcaatcttgcttcttggatcctatctcaaagatatagttgcaaaaatatgaaatggcatatgcacacagttatttgcagcattatttacaatagtcacactgaagcaccatctaaatgttcatcaaattggggattaataagagcaacacaatggattattatgcagatgtacaagagaatgaagaaactagagagtgatctctaagacacagaataaagaaaacgaggtgctgaaattgtatatggtctgtcatcttttgtattagcaacagcagtggggaaaggaatgtgtatgtgtgtatatgtaaacatagtcataaaaactctaaaaacggaaaacaaactggcacaaatgaacctaattccaaatgaggttgatattggtgtctcaaccatacagagaaaagaattattacaactgactttggaacacagtatcttcactgtatttcttcagtaggatatacctgaaagaccaaaacgctacacagacatctcaaagtcatttgaagtgaagttaaaaaaaaaaaaaaaaaaaggtgcacagactcctgttgctgctccagaaggataaaatgtgggaagggaggaaggggaccattatccctaaagagaaaacttctggcctaccagcggggccaggtcaggggaggctctgtctcggatttctgggcatatcagtgggacccaggcaaggcctgccaactcccttagcatgttcctgtctgtgaaacgaggataatacccatctctcctgtggtaagcaatgttatttttcacatacaccaataggcatcttggctcaacataagaaagccctttcccacagaaacagctgcctccagcgtgaagaaggtgccacagagatggaaggagattccttacccacacctgggagacagctagccagccagccagccaactgggcgggggcacccgggcaggggtgccagatacagtattgtatctggcaacctcccggggcgctcagtgtggttttcccacccgggagtctggaagggtctcccgcagcccgcaggagacgcagcgctccccgctcagggggagcaggaggacagctggccgctttcgggagccccaggcgcgaagcggcctctctccgcctcaggtgagtcctgctcgacgcccaaggcccaacggtcagaaccgcctctgcccgccggacccagcgaagctaggggaacaaatcccaaaaacagttcgggcctttccggtgcgctcacccctacacacgcgcctgctcgccacccaggagcggcgtcccgttgccaggcaacgagagctcgcgcctcaggagccagtgtaggcgccgcaaagcggaaggggcgcgcggataggtgagcagagggcacgcggtgggcagcgaagggggaacgcgcagcagagaggagagggcgtgcaggagtaggagcaggcggcagagtagagggggcgcggcagagtagagggggcgcggcagagtggagggggcgtgcaggagtaggagcccgccgcagagtagagggggcgcggc

SEQ ID NO: 5467 - DNA, 2300 bp, Homo sapien
aactctggacacgccgcctttaagaactgtaatactcactgtgagggtccacggcttcattctagaactcagtgagaccaagaacccaccaattctggacacattgggacttgttgagatgcagaatctcaggtcccaccacagattcagaacctgcatgttaataaaatctccaagcgacctgtagttaccaatctactttgcctggatcactgtagaactgtccttccccgaaggcagaatcaccaactctgcattctctagtcagggggtggctgccacactggttacatgtggcaagccgtattggcatacctccccctactctaaattgcccattttcaacaatgatctgaaggaaatgtgtttgcccaacagtcgctaaaatatggtacaaagacagtagagccagcatagagccataatctgagggctggaggggaaggagtcaaggggatgccttttattttttatttttaagagagagccttggtctgtcgcccaggctggagtgcagtggcacaatctcgtcttactgcaatctctgcctccttggttcaagcaattccgctgtctcagcctcctgaggagctgggattacaggtgtgcgccaccacacctggctaatttttgtatttttagtagagatggggtttctccatgttggccaggctggttttgaattcctcacctcaggtgatccgcccacctccgcctcccaaagtgctaggattacaggcggtgagccaccgcgcctggccaaggggatgccttttaaagcccactcagaccaacttagggtacactcaccaatggggggagaggctatttttcagtgtttcccagagctcctctgagggtctgcttacacagttcctggacttgcactcagtaggcaaggtgataagaataggggttgtctttgtttactgtataccgcccacgcttggcacactgggagctctgtaaatatttcttgacttattcattgagagagttctgccacctgccctcatgcttccctttgatttttccacgcccaatctggcatttactagctcaactaacatctattaaggcctctcttgcctggcactgccccgcccataagctgaaagagagcacaggaaaggctagcacatgcacagacgactaggccagggaagactgcaagggtttgggcctggtggagactggacggcttcccggtggtggggcacccgaattggttctgaaaggaaccaagcagaggtcaccagcaagagcaaaggtgcagagttgtgaaactgccaagctattagcagcttgcagtgacggtcttccagggactctggaaggtcttccacccttttccgattggctgcccttcctggttcctcctcaaagcccgccacctctttgtctctcccagagcatgccgggctgccagtcagggtcccttgctcttttgtgtgcccctactcctccaggtttctgtgtagcaagtctcctcggctcacccaccccgcgcgcctccacatacgcctttcctcgacccctcacgagcacacgcccgtcccgcgtgcccgctcctctctgcctcccgccccgatcctacgctccccctcctccctggaccccgccccctggagcgcgcccgcttctctctgccacgctccccttctttcattccctctcctctctgcccgttgccccctcgtgcgcgctctccctcctgcacaccgcctcatctctgccgcaggcccgactcctgaacgccccctcctctctggccccctcccctggcgcgcgcccccttccgcacgaccccttctctctgccgggcgccccgcgcctgcacgccccctcctctctgccgcgccccctctactctgcggcgggctcctactcctgcacgccccctccactctgccgcgccccctctactctgccgcgccccctctactctgccgcctgctcctactcctgcacgccctctcctctctgctgcgcgttcccccttcgctgcccaccgcgtgccctctgctcacctatccgcgcgccccttccgctttgcggcgcctacactggctcctgaggcgcgagctctcgttgcctggcaacgggacgccgctcctgggtggcgagcaggcgcgtgtgtaggggtgagcgcaccggaaaggcccgaactgtttttgggatttgttcccctagcttcgctgggtccggcgggcagaggcggttctgaccgttgggccttgggcgtcgagcaggactcacctgaggcggagagaggccgcttcgcgcctggggctcccgaa

SEQ ID NO: 5468 - DNA, 2300 bp, Homo sapien
caccccagaattctgctatcctcaacccctgaatggctctgtcattaatggtcagtctccaagaactcatttcccaaggaaatgacttcctgttttgttctaagtggccttccctgcaaaccctcctcacctttgaacttcctattttgggatggaaagattgacccttctcccgctcctcttcacaaggtaaggagaaacaagggagaagaaagaaaggtcctctggagagagatatatgtatcatacatatcttatacatatatcatatatatcttatatatctcatatatatcttatatatatcttatatatcatatatatatatatatatatatatatatatataaaactacacccgcattgcaccaaagtatacgaaatattttctggccttcaaatcatatgcctaactcctgcaggaaaactgcatgggcactcaggctgatctcccttaccccacaacttagatccacctctcacgttttctaagtttatttccacgctgtccctgggccaggctctagggtcccagaggtgaagtggaggaattcacagtttggttgaggagagacccccttgaatagatcaagctccccaagtgttgctgtaagtttacatggaacatggagtctgagtgggaagtcagggaggtgaatcacggaagcctttggactttgtacacctgtgggcagctcccagatgaaggggggaaggtgttgcaggcaaatgaccacctttgacgggcggacatcggcctgctttgccacttcaccttatgctgccctgtgactggtctttgcactgtgtcaccgatatgtcttttttttttttttttgagacggaatctcactctgtcacccaggctggagtgtagtggcaccatctcggctcactgcaacctccacctccggggttcaagctattctcctgcctcagcctcttgagtagctgggactacgggtgcgcgccaccacacccggctaatttttgtatttttagtagagacgaggttttgccatgttggtcaggctggtctcgaactcctgccctcaagtgatctgcccgccttggcttcccaaagtgttgggattacaggcatgagacaccgagcccggccaaccactaatatgtatcgtgagtcagctctgctgtctctgaaagtccaacctcctactttttgttttttgttgttaagacagggtcttttttttgttttttaaagacaggctggagtgcagtggcgcgatctgggctcactgcaacctccgcctcccgggttcaagcgatcctcccacctcagctccagagtagctggaaatacaggcacgcgccactatgcctggctagtttttgttttttacgtagagatggagtcttactatggtgcccagactggtcttgaactcctgggctcaagcgatcctcccaaagccctgagattacaggcgtgagccagcgcgccggacacaacctcctactttcatgaaagagtgggcacttccaacaggaggagtaagtggatgagcggtgtgtgacacacccgcctcagcgtcgcccggagtccgcaaggctgcggctcaccgttctctgccccatagctggcattgtggagtgaaagggaacgtgggtggaggattgaggttggaaattctgaatctgtacatacagcttgaaggggctcatcgaatgtgtcggtcctttagattccccctgcccatggaggttaaaaaaaaaaaaaaaacctatcaaaagagctattcaaaaccaggctgaagattggaaggaagttggccagcctcggctgcaggacaggtgcttccaggctccattaggggtgtccagcgccttcttttgccctaggcagcgccctgaagaacgcgtcggggcctcggttcgcggacttgaggagtggaccgaccgagcgctgtgcgtaaaaggaccgctggggcacacgcccgagcgccaccggagctaggagaccgcggcccggaggtcggcgagtcgggggcaggcccggagctcctcccacggggggcggggcgggtcacatggcggtggcgcggtagcgcgcgatgcagcacaggctagaggctgcgcaagcgcggggcccgcccctgggaccctccgggccgggcggtttggccccttagcgcccgggcgtcggggcggtaaaaggccggcagaagggaggcacttgaggtaggtgctgcgcgccggggctccgcgaggcacgtgatgtccgtaggcggggcctgccgcggcgtaggtggggaaactgaggcagtgcagggccggta

SEQ ID NO: 5469 - DNA, 2300 bp, Homo sapien
gtcctcccatgttgtccaggcttgtttcaaactcctgggctcaagcaaccctcttgcctcagcctcccaaaatgctaggattacaggcaggagccaccgcactcaaccaaggttctctcttattccttttttttttttttaattattttagattcatggggtacatatgcatatttgttacatgggtatattgtgtagtgatggagactgggcttttagtgtacccgttatccaatagtgacccttatacctgataggtaattttcaccccaccctcccctcttcagctgtccccagtgtctgttatttctgtcttcatgtccatgtatactattgattagctcccacttgcaaatgagaacacgtggtatttgattttctgtttctgggttagttcacttaggatgatggtctccagctccatgttgctgcaaaggacatgatttcgttctttttttatggctgcctcttttgtttcttaaatctgaatttccatgtggcttcaatgctagtctggcctaccctttccttcccaaagtcaccaccaactcactcccacccccacctcatgcagtgcacccctcacagcccccacccttggcagtgacatttggatttccagggcctttcctgatcctttagagacatcctctcccggccaagtcctgcaagggagacttgagtcagaggttcgatgggctggggtgaggtgggccacacaattaccacacccactcccaggcctattcccggtgatctaagcacacagaagcaggctggtacttagggaagaaggcaccagtgtatgccagagcttaggatggcgtgaggaccaaatggaaagatagatattgtaagtggttgttgggagaaggaaggctggaggtgggggtactttgtgggctgcttccaggagctcccacccacaggcacaagtcttcctagctggcagaagaagccaggaacaaggctgaattctgacagaacccgcctggagctccatttcagttgcagagacctttatcttatgcagctgtcttttgcccagcctcctctgcagatgccataggacctcctctttcttttcttttctttctttttttttgagactgagtcttgctctatgaccagactggaatgcagtggcacaatctcagctcactgcaacctccgcctcccgggttcaggcgattctcctccctcagcctcccaaatagctgggattataggcatgcgccaccatgcccagctaatttttgtatttttagtagagacagggtttcactgtgttggccaggatggtctccatctcttgacctcgtgattcacctgcctcggcctcccaaagtgctgggattacaggcatgacccaccgtgccctgccaggacttcctctttctttttttttttttcttttttttttttgagacggagtttcactcttgttgcccaggctgaagtgcaatggcacgatctcggctcaccgcaacctccgcctcccaggttcaagcgattctcctgcctcagcacccccgagaagctgggattacaggcacgcaccaccacgcccggctaattttgtatttttagtagagatgaggtttcttcatgttagtcaggctggtctcgaactcccgacctcaggtgatccgcccacctcggcctcccaaagtgctgggattacaggcatgagccaccgcgccctgccaggacctcctctttctgatataacacctgcatttgtttggcagacatctgtgtagttctgttcacaggagaaaaaagtcagattactaaacaccagtgtttaacagtggccatcagtaggtggtagcttcagagagtatttgctttcttatcgactatggtttcatgtattctctgttttgttttttactataagcatattttgtttttatataagggagaaataaagctcttctcaattgggagaaattactgcctgcctataatgaatgaggccctgctgggcactggctgggggcttgatgagtaggatatggtccctgtttttggagggtcgtcaaactaaagaggaaagaagataggggaacaaaacagtgcggttggtgttctaagtatcctctgatcacagaagagaaagctgcccctacccagggacatgatcctgagccacctggattgtgagggagaatcaggcattgatgaggaggggaatgaggaagtagtctgcctacaggggacatagctcggcacagctccacagagctaggggctgcaacttggggcatgagaagagagagcagcaagagaaccat

SEQ ID NO: 5470 - DNA, 2300 bp, Homo sapien
tgaccaccactttggttcaaaccaccatcatctttggcctggattgtggcaagcctaattggctccctgcttttatttttgcctgacacccacacacagccttaaatcagaacatgttagtcttctgcataaaacccttccaaggctcaacaaagtctccattctttgacacagcccacaggccctgcatgctttggcccccacccaccttctcactccatcctgggcctcttcccctaggcttaaaacttcagccacactgattttctttcagttccctgacccatccagaacttaccctgaaaaggcacctactgctctcagcgaggaatgtctctgcccaacttttcccaaggctaactccttactcttttgacttcaatttcagcatcgcctcctcactttccctgactgcttcatctaaggtagcttttattctctattctagccccttgtttttgtcccagcctttacttcaacttgtgattatgtatttgtcttctccactaaaaattaactttattgggcaaaaggcctcagctgtcttgttcactgaagtatcccaccatgcacacagggcctggcatattatcaggcactcagacaaacactcactatctgctgaatgaatggacaggttcccagggagtttccagagctgcctgggctgtcacagacaggttgcatccctcttaattaaacaaacaaataaaattagccaggcaccgtggctcatgcgtgtaattccagcactctgggaggcagaggcggaaggattgcttaagcccaggaatttaagaccatcactggcaacacagcaagatctcgtctctacaaaaaaaaaaaaaaaaaaattagctaggtgtggtggcctgcacctgtggtcccagctacttggggaagctgaggcgggaggtcgaggctgcagtgagccatggtcatgccactgcactccagcctgggtgacaaagcgataccttagctcaaaaaacaacccaaacaaacctgggaatggactgaacagtctccatttcaagatttcctccttccattggaattaacctgttggttgcttgtactggcatgtggcaaccagtcttagcccagttttaatagatccctgtttggtgttactcaacagagaagaccactcggccctcagccaccgaataagtttaagaaacagaggtgtggcatgcttcattctacaggtagggaggctgaggctggggagccgcccctggctatccctggaaacccctctaccccacaggaatcgtcccagccatctctttagcgtaaaggtgaggaacaaatctcagccacgatccaaagaggggcgccacccctggctgtccctggaaacccccctacaccacaagaatcgtcccagccacctctttagcgtaaaggttaggaagaaatctcagccacgatccaaagaaagcttggtatttttagcaccaaggccagaaggagcgtgtccttactccttggtttacaaagaaataaaaaccttttccccatccttcttttgattgaagactacccccgcccccaggctccaaagccgggcaggaacgcctcttatctccaccacagccattttcctaatccttcgcccgctctccacggtcatcccgtgtatccctcgagacgccgcctcccacagctcgtgcttctcccaggttcggctccgacaaggccagagcggcgtctgcgcagcgcaacggctcagagcgctcccggcggctacaagtgcccggccccgggccaggcccggcctgcgccgcgcacccactgggagggcgcggaccggggccgccccaagcctccggcaccgcccagagcgggacaaaggggcgggccggcgacccggcctcgcggtccccggtgccgcgcgggccgggaggcggggtgcggtgggggaggggcgaggcggctgggggaggggcggggccagggcgggcccaggcgcccggggccgcaccgggcggcgcagggaagcggcgccccttcctcggcagacggcaggcgccgcgcctccggccccgcccctccgcgcccctccgcgccccgcccccgccgctcggacggcccgagtcgcgccctcccgccccgcgccgcggaacttgctctaacttcctcggccgagccgggccgcgccgccgctgccgccgccgcgcgcgggtgagtagagcgcggagacctggctggggcgtcgggccctgcccctttctttgtctgaggccgacttccccgagcgttctccgggggcgagggctgctccttaggtccct

SEQ ID NO: 5471 - DNA, 2300 bp, Homo sapien
ctgggttacaggctttgagaaggcagagcatcaccactattatatgggcaagttctgcagcccaggagaggctcagatttgctgaagctgcacagctcttctgaggtctccactgcgactgtgaaatgtaccagtcttgtaagtgttgcttttagcacatatagttcttacctccaagtataggtcttacctcctagcaaactgtggcccccaggccaaatctggcttgctatttttccatgacctgtgagttaagaatgcattcagatgtttttaaatggttggaaataaatcaaaagaagaataatattttgtggtacgtgaaaattatatgaaattcaaatttcagtgtccataaagttttcttgaaatacagccattcctgtttgtttacagattgtcagtgccggctctcatgcaacaaaagcggaattgagtctgtgtctgaagtactcactctctagcccttcacagagaaagtttgccaccctgtcctggtctgaaggattagttggtggcatgattgaaggacatgagctgtaatggaatttgcacaaatgtttgctagtgtttggttgtgactttactagagcctcttagcaccagcttcttgagacgccagaagcaactaatttttctgcttttcttgcagcaaaaagttgtgaacacacagtgtggatatgatgtcaggattcaggtgagaactcccatgtatacaacttgaagagttctttaggttttattccctgtggttcaacattctgatttagcacgagtgcaaattgaagtgggaaaactcagggcagtgaagctcttgatgccacctaagctgagcataggcacagggtcacatacactgcttcctgagctggcggcaggactcctgggagcagtaatggtgattctaagccttgtgagctgcagtcccaacatctaggagttgctgcatttaaagaggtgggatggaagttttgagggacaaagactgcatttttaggaggctccttggcatcccagaagacgtctctcgttaaggggacagctgcaggagtgtaggtgccttgttctggcctccgtgtggaggcagtagtgacaaagagggaggcaggcctggggcaggggcgaggctctgtcctccaggacttcctttaggctgtagggagtgtgctcttagatgcaaagagaaggaagaccccaccccactccagtccttgttctagtggtctttggtgatatgaatgactgctgttctaaaagggaggagtctcgaggaatcttcagagaccccacctgttagccgtggatatgagggatgtgtccctacagcttggggaactgtcctcctttagggacctgcatttcacagggagaaagtgctgtaaactgaatgtgtgtgtctctccaaaattcacatgttggaacttaaactccaatgtgatggtatttaagaggtggggtcttggggaggggattgggtcatgagggcagagtccttatgagtgggatgagtgtccttatgtaagaggcccagagagcttatttgtcactccactgtgtgaagacacagtgagagggtgccatccatgaaccagaaagtgggccctcatccgacactgaatttgccagtgtcctgatcttgaacttcccggcctccaggactgtgagaaataaatttctgttgtttataagccacctaatctatagtattttattctagttgcctgaatggactaagataagaacctatatcaacatcagcttccctaattatgattttttttgccacttatattaatttgctaaggctgctgtcacaacataccacagacagaaatttaagccacagcaggcatttattttctcacagtttggaggctagaagtccaagatcaaggtgctggcgaggtgaggtgggtgccttcagagggctgtgatggaagggtctgttccaggcctctctcctggctgcaggtggctgtcctctccctgtgtcctcacgtgggctcccctctgtgcatgtctgtgtcctgatctcctcctcttagcaggatgctcttcatattggattagggggcaccctgatggcctcattttagcataattacctctgtaaagagcctgtctacaaatacagtcaccttctgaagtcctgggggttaggacttcagtgtatggattttgaggacacaatttagctcctaacacctctaaaattaggggctaatactccatcatgttgccatggaggaggctgataggtgtgagggggctggggccgattgccctgtgtggggtgggca

SEQ ID NO: 5472 - DNA, 2300 bp, Homo sapien
cccacatgggctggtgaaaaatgaaagcaaaataagaccagttgaaaggcggcagaaaacctgtgtgactactccgtggctcccctgcctggtttccagccgcggactctgctcttcggcgcgacccctgctcctggggtcctctggggtcctctggggtcctcccgcacacccaggccaggcacacccaggttgcgaagccgagtgcctccccgtgcggccgccagggagcgccccaggcctggccgagtcccccgccctccaccccgccaggcccaggagaattgataggcgggccccgaagcacgtcttcccggaaaccggacttcacccgctcccgggctgccatccgcggctgggtgacgctcacgtccccgcgattcggtgtctcttggcctcctgccccgctgacctgggagtgccagggatcaccccgcccccagcgagatcccctctatcgcacaaaatgggcgctagcgggggtcattctagtccggctgcctcactctcccgacggtcctccagggtggcaccatcaccgttctcgcccgcctccagccggcccattcctgctgctccctacagcgttgtccctgccccgtgccctcttgtggtcgtaggtatctggcggcccgggaaagacaaaaagaagctgcccgcaggagcccagaccctgggggccttcctccccttgtctcctctttggactcgggggtctcccaccagccacggcgagggggagaaagagaatagctgggcagaggctagggaagacccccggtctcagaaactgaggggagccaggactcccggtgggggagtcggtgcaagccctgaggtgggtggatgggagtccagggccacagctctgcagcggacaggcgagtcctgtggcggctctaggaaggtctgggcacactgggaccagctagctggacctgggtggggaggggtggggcgtctgactccactcctgtgacctggacattgcctagctgagcaggagctttgaccctatgggcttacagctcatctgaatctgcttagtccatcttcctgttgtgttaaccttgcagagggggaagaatgccaactctccacccctcttccatcactcttgggtacctgatccaccttccaccctcatgggcaaggaaggggacaggaaggtcaccaatccaaccaagccacagtgccaaatcctgttggttcgtttgttttcccttggttgggttatgttttcaaaccatcaacagattcatagttgctagtggatgtcaaatttcaaaacgggggagtcccaatacagtgacttgtccattaggaagccataggcaagccacttactttctctgagcttcaatatccttgtcccaataagaaggcatctgtgatttgctctgagcacatatttagggtgagctttcaccctaaagatctcagcaacggcagcttctacccaccttcacacaccaaagagagggtggcttccctcccagcagaaggcaacatcccgccattccagtgtgcttctgatcagggcacagagaagagccagtttcatcttctttctttttggtcaactccaggcatctgcaacaaacaagattaacaacgaccattaaaactggcccctggagggtttatctgtcagccacgcatggctgcaggatctcattatatataggccaaagggaaaggatgtctgcttcctttctgtcctggaattccaagataaaatcccctccagttgtctctactgattccattttgttttctttcttggctgtaacacagataggaggaaaaatctttcctcccccaaggcagagttttaaacgcatcatctcagaatgccaaatgttctggaaaggaagaaagttggcagcgaaggaacccgcagagagaggggctgagagggctgaggggcccagcagcttctggcaggctcctctggtctgtgtttgaaattggctgaaaagacatggaatttagtaggcaagtctgcctccttctcctcctcttatctgcagaggagagatcagttcccagctggccggggcagtgtcattgatatagctggtgtcattgttaccttccactaacagatcactcgacacctaccagcccaggcagggctgggactgggcatttcctggctgagctggaggcttgggcccttcccattgtctcagaaccccaggtgatgccaagacatgggctctcctgggatgccgtgcttggtgacccaggagaaggactagattgctcctggtggttgctcccccttgcagagtccc

SEQ ID NO: 5473 - DNA, 2300 bp, Homo sapien
cagaggctgtccagcggcccttattggagtcggggagttgggacttgctttgtcttgttgtggaaggcccgagttctgggaagacaccattgagacttcagattgtgctccgacgtggttggcaatggtagggtgaacgacggcatatttgtgacccttgccattggttctgggccagagtgtggtgtagatatgcagttcctttctccttggcatgcgtggcacaccagttcttggctagggccccttctgtggactgtgcctctccctccagatcctccggcaggaggatgctgtgggttgtctctggagccccactgggcatccggagagagggcatcagggaacgtcccacacaatgaatgaccatccccaaatggtcgtagcaactgcagatgagaagcaagggcctagcctacatttcaggtgttttgtatgcaaagtcatgtgccagtcaatcctatggactggtacacctgtgggtgaaggaaatcatccaggacccctgggccagaaactggcaggctgctgaggcttggcttggcacaggactcaatcctgccagggattgtagtttctgtggatgctgcatgcactttacagtttgcaaggcttatgtgccttcaccctttgaagttttcaatccagaacaaagtcctgtttcagggctgagcacacagctcccttggtgatctggctcttctccatgccaggctcactgctggccagtccccaccaggtgccacaggccacacccacatcatctggacatgcttgctcttgtctctggtcttcacatgagtggctctcaccgttgggaatgtccttctgccttcatccacctgacagactccatcaggagtggcccccctgccctggagtgttcagggatgctcttgcatagggcagtacttgctcctctgtggctgcctggcatgtaggacccacgcctgccctggcatttgccaccctgtcattgtcattcctcatctgcttgcctggctctccgatgggctcaaaggcactggtgtgtgagggcttcctccactctatcttcctcccctgggcccagcacagaggtggcacatggtgttaaatccttgttttgaacaagacacagcaggaccctgccggggaggttggggcagagctgtgacttggctgcaggtggctgctgccaaagctggggccttccgggctgggctgcgctggcagctgcatcactaactggtgaaatgacaagccaccttgccagcaccacccggcctgagccctggggactcatgatgcctgcatgatgactcttcttggagggagacagatgcctaaaaatttaactgcaaaaatatttatacagagatttgtcacacatagacatctacattttcatgtataaattatacattaaactcatttgagtttctggtgcagaagatcctttttctggtaattaattttctgatttataaagaatggaaaagcaggaaagcacgccgaggaatgtgtgtatcccaggtcaggatcccgcttggatcctggctctttgcttcggtcctgccttttggaactgtctgggcatgccactggggagcctgggggctggccctgcccaggagccggaagagctttcggccggagggtccaggatatacagtatctgcttcatgtcctggggtcgtgatgaagggtggcaacaacttgtgagctttacgttgactgggtgcctacccagcccttgctgctcccgtgtccctgcggggtggcagggcaagctccctgatttcattgcagataaggaaggtgaggctcagagaagtgatgcgctacatccaaggtcatccagctgctacatctcatgacttggatctggggtctggtgactgattttttttctgttcattcacttccaaactcggaactccaattaaacaagtgagctgtgcacacattcacttgttcactcattcaccaattcattcacttatccagcattactatgtgctgatttcagtgaatggggcagtgcttgtcctggagacggtgggtagatggatcatagggaacacagccaactcgagtgccaagggtgaggcttggttcaaagcagccgtgccgtgtcccagggcgggaattgtgcggggacgggctccacggaggaatcttctcttccttcccttgatgttgccagaggactcaggaggctctccagatgctggtgagaccccagccccagttgatgtccaggctcttgaaactgtcttgagaaagaactcgggaatgagtcagaatgataggaaagg

SEQ ID NO: 5474 - DNA, 2300 bp, Homo sapien
ttctgctctggtttctccccatctttgtggttttatctacctttggttgcaatattggtgacctacagatggggttttggtgtggatgtcctttttgttgatgttgatgctattcctttctgtttgttagttttccttctaacagtcaggtccctcagctgcaggtctgttggagtttgctggaggtccactccagaccctctttgcctgggtatcaccagcagaggctgcagaatggcaaatattgctgcctgatccttcctctcgaagtttcatcccagagggccacctgcctgtatgaggtgtcagtcagcccctactgggaggtgtcttccagttaggctacacaggggtcaggtatccacttgaggaggcagtctgtctgttctcagagctcaaacaccatgctgggagaaccactgctctcttcagagctgtcagacagggacgtttaagtgcagaagtttctgctgccatttgttcagctatgccctgctcacagaggtggagtctacagaggcagcaggccttgctgagctgtggtgggctccacccagttcgagcttccccatccactttgtttacctactcaagcccagcaatggcagacgcctgagggaggcatcttaaccccatttcacagattaggaaaccagggctaagttttcatggttaggaccaagagttaagcctcaggctgtttgcctctaaagaatgtactttttccactaaaccatattgtttgcttttcctgtataatagaagctgctttagcaatgatgagctccttgtccctggaagtgtttcaagcaaaggataaatgctcctcactcaggacagattccagagaaaggctagaccagagatctctgaagatctttattctcttccacatcaaaacctttgagactcacagtttcatttctaacactaaggagagatatcatttatgccaatgtggagatctggtggccaacttctatcaattaaaattttaattacacaattagttcatgattacattctaagaaaaatcaaatacaatacaaagtgaaagcctcattcatttcaagtctctatttctgtcctctactttgattatcaatttgccatgtatcttatctaagtatctcctgagcagtaacataaaaacttatgtatataaggaaatatatagttttgttattttccacataagttgggtagtcttttttgagacaaggtcttactctgttgcttaggctggagtgcagtggtgcgatcatagctcactgtaacctcaagatcctgggctcaagtgatcctcccacctcagcatccctagtagctgggactacaggcatgcaccaccacacccagcccaagttgcatatttccttacatataaatgagtgacttgattttttaacatgcttactaaataattgaatgcagttttaaaaagcatggtccctagaatgaggctgctgagttttaaattctaacttatgtgtttgactttggacgactatttaggttttgcaccttagtttccaccttagtaaagtgggtttaatagtagcactcaactcttcaggtcactgtaaggttttaatgaaacatcactgtgtgaagtgctgaaacaatatacctgacacttgtaatttcaggacatgctggctgtcattcagatatatctatgagctcttcctatgttaatccgtataccaaaccttgtaaatgccatgtggaattccatggtatggatgcatattacagtttaattacccattctccttttgatggacacttatctggcttccgatttttcatgatcttgaacagtgctgtagagacttccctgtgtgtcactatggatacatgtgcagtatttctctaggatgggtcctggaactggaattgctggagagaagagtatgcacattttaattagaaaagatctgccagattgccctccaaaaatatggtgccagttcagtctcctgccaaaactatatgcggctgtttccccgcactgctgccaacactggggcctatcaatcatttcatttttctccatcagatgggcagacaatctactgtggtttagtttgcatttgtctgattaccactgatgctgaggatcttttcacacgtttcacggccacttggatttcttctgtgaatcatcctttcgtattctttgtccatttttccattaggatgtgtctttctttttgatgtgacatttctttcagctgctgaattgctttttagttatgagcattctgcttttcagttcttctactgaaattttttcc

SEQ ID NO: 5475 - DNA, 2300 bp, Homo sapien
tttgcttacaatttttggaaccataattcagcactactagattaaggcatgttccatcaaactaaaaatcaaaagctttcctatggggaaagtctcaatgttatagctgaaagaggtgacagccgcattactgccatcaaaaataatttattaaccttgtctgtgcaaagtactctggtaggcaccaaaccccaggggcttcctgtttcaatgcatcctctgctctctgcagtctcttcagtgtaacgtttggctctccccctgtgaataaaatggataccttgaaaacttcatctttgtggagactatcacaggacaagagaatgcgggctccatcatccacgccaatcagacagtgctgggggaatgtattagaaagttgcctttctcaacctcatattcttaacgcttgtaaataaaaacccctcctcttcggttttcactttagaccaggaaatctggggagagttggcaagcaaggttttgcactgtcggcatatgtcatgctaacactggctctttgccccttgcctcggcaggtaccacacagcgctggagaaataggtacacaggtgcctccccagccaagggaagaaagcagtaacggaatttgggagtccaaccccaaatcctttcatatttacctctcacaaacacttgccttgtaacgtgtgtacctgtgcgtacatttacaggtaaagacaatattttaaggcaagttcacataaatggcttggagatatctgacaggtctgattatacaaaggtcttctgctccacctgcatctctcaggaactcaggcaaaggtggccttccatccagccgcaccgccatccggcaggggagggcacaggcaccctcccacccgcatccgcccccgccccctcgcccagcagcgtcagtctctgaccccactggatccgtacaggagacgactcacaatcggtcggaagctgcttttgcccccccaccccaccgcaaacgggggtttgcttggatcatttatctatcttgtgtgcattaagaaaccagcattagctgctagtgggaggcgctactctgcccgaatcccagcccgccgcggcgattctgcacacacacacgcaccagcctggcagccagagcccgtctggagacgccctcagcccggggtctgcgttccccgggacccccgacgcagtctcccgcttccgtcccccacgctcaaccgggcagggcgccggggcgtgatttccgatcctctgcctgcttgttgggtccctcggaggcgggtcagaccgcacccgccgcgggcgcccggtgcgcccccagcccctggctcgcggcggcgacagcggcgctgttcgctggagtttgactctccggcggcggcggcagcggcgcgcagcagcgaacggctggagcaaggcgagccgggccgctagccctccgcgctgcgctgggattggtctctccagaagagtgctggccgagggttggctgcgggccggctgaagaacaggtgcacctcaccgcccgggctcgcggagcagccgccgaagatcgcggcggccaggcaggccctctgtgtcggaatgcgggtggcgggcacccggcaccccgcgaccggccgccggggccactgaaggcggcgcgaggcccaggcgcggcgcgagcgggcgccccagggagcgggctgggcgcggtgccccgaggatgtcggcgctcctggagcgcacgcaggcggcgggcagcagcagcagcagcgggcgcggggacccggcgcgcaggaggcggcttggagggctgcagacgcgccccgccgctctctgaccgaccggaggcgccgggggcccgtctcgcccctcttccgagctccttaccgccccctccccggccccgtcccctcccccgctcctctcctccccgcccgccgcccgcctctcggggggaggggcgtgggggcagggagcggatttgcatgcggccgccgcggccgctgcctgcgcccgagcccgccgccgccgccggagcccgcgcccgcgcccgcgcccggcccgcgcggccccatgcctctgccgcggccctcgggggggcgaaggtgaagaccggctcctaggatgagtgaaggggcggccgctgcctcgccacctggtgccgcttcggcagccgccgcctcggccgaggagggcaccgcggcggctgcggcggcggcagcggcgggcgggggcccggacggcggcggcgaaggggcggccgagcccccccgggagttacgctgtagcgactgcatcgtgtggaaccggcagcagacgtggct

SEQ ID NO: 5476 - DNA, 2300 bp, Homo sapien
cggattagcactcgcctgaccaccatcacgcgggcgcccactcgcttccccgggcaccgggtgcccatccgggccagcccgcgctccaccacagcacggaacactgcggcccctgcgacggtcccgtccaccacggccccgttcttcagtagcagcacgctgggctcccgacccccggtgccaggaactccaagtacccaggcaatgccctcctggcctactgcggcatacgctacctcctcctaccttcacgattctactccctcctggaccctgtctccctttcaggatgctgcctcctcttcttcctcttcttcctcctccgctaccaccaccacaccagaaactagcaccagccccaaatttcgtaagtaaacactgtgtctcaactatgatttactactgagtttcccttctgccctcctgctgtctttttccctcgccgcctgttttctagcaagccccctcccccatcccaggtttggggcagagtgagagctgattaaaactggccaccagcggggaagaaggtgccagcctgctctggttctgggggggtgggggcgtgtaggaacgggagggagattgtcaggctccactggccccactttagcgggtcccaagtgagaacagatctcccaactcccttcaaagggttaacgcgagtgcgatccctcctcactgcagacctgctggcgagctgccggatcccgctccagtagagggccagggagggagagagggccttcccgaaggcactgagccccttctccgcccgccggtaggaaggaaagaaagcaaagcacatgcaaattgaccgacgataaaccacaaaaggaagttatgtccttgtgtggggtgacgagttgatggagataatggtagaatgttgctgaggacgcttccagcagccctgacctgggcaggaaccagaaagggttaattagaagccactgggagacttggggaaaggaggcgatccaaggcaaagggctaaactgacctcctagcctgcctgtggccattccaaggtgtagacatagattctgtgaccgccgagagtgagttaactaggaggaaatatgaagggagccctgcagagctgccacctctagggtcctgacgaaggaggagtttttttcagccctgccaagcctttgcttttgttccgttcccaaaggtggggtgtgaaccttatctcctctccctctgtgcctgaaaaatatagacgagttgagagttttctgcactcaagggtgagaacatccaaccgtttggaaacatgtcaccgttagaatgtagcatcttcaacctgggctcagtatgagccagtatacccaaagcatgatagctttctgtttatttgtatagaaagtgcgtattttctcaacatttttataaatgttgtaggtgactaattgacctcccaccccaacccccaccttgttcttattcaaaggaaatctcaggtgtcttttaagctgatctgatcaggatatgggaacagtttgtgcaacctgtgaaggttatttaggacaaaccccaggctgctagttcaagttctgtgcaaggctattttgcaaaaaactgtctggttatgctgtctttatattgtatttgtgttttgagccatagcatctgagataaaggaagagtgttcatcattaactcttcagtgatgatgggaatactgggtttgctttcagtcatctgctaatttttcatttccctgccctatgatcttaccctgggtgttacttaacccttgaaacttttttctttttaaagaatgtagtgtatttgtaagtaaggtccaggagagggaaagggggaaaaaaaagcaaacctactttgctttggaaaaaaccgtctagaagataaattgggagacaggaaggagggaaggaaggaatctgccacaaaccagaatggcagtagagccagtaacttgctgcttctctctcctttggctgaagcagtcatttttgagagcacattttcccaggaggtgtttagagcctccactcaacaaatctagcttgtgttttgtagaaggataaaggattcatgagtgtatgtgtgaacatattcaatggattgaaaatgagtctaccctgaagaccccagatttttgatctgctcttttgatgcagttgatagaataatggagtgtggtatacctccaacccttgtatgcgttgggagaggagggggactacacacggtaggggtatttcatgttctttctcaattgatttccttgtgtaccattccggaggtctttaaagaaaagcccaagg

SEQ ID NO: 5477 - DNA, 2300 bp, Homo sapien
ctgacactactctttcccttatttgcatctaaaaaaaattgattttctgtctctcagatccatccatttcactttcatctccatttccaccaccatagcccaagttaccatttataattttctggacgaatgttgaataatttccattttgacattgccgtatggttaatcccttgaatcctcttcccaccatggctagagttctttacaaactgcagatctgacttctatcccaattctgaccctttatcctccactgttaaatccaatcatggcttcctgttgctcagtttgcttttccagaggtaatctgaaaatagaacactttattcttcgtattccagccatgtgtttattcatttttatacttggatatggtaataaatatttgtgagatgactttaataaatgcatgatacattatatatacagagtgtagtagggtacttgcacatcgtctagaaactttaatgcaacagtgattctacacaaacctcatttccatctttgggagtttgaacagcacctgatttaagttgaaagaagcagagttctgtgtttctgactggggtccacagcagagcgcccctgcctctacgtccattctcctcaccttgggttccaacactgacacaaaaatgagggactatagtcctctgaactcaggagtggtcaaaacataacctaaagcccaaaggtagctggaagagttgtgatatgattctcataaccaactcttctctaggtggcacacagagatttttgtcggtttactgaaacaggcaccaccctgaggcagtaccatggttctgagtgtaaacactgcccagatgtggctctttcatgcctcgggtgtgaggcagatgtgaagaatgatgtctccagcaccaggagcagggcttagcgatctgatgttaatgtgtttttttccagctgtgatttggatatctcaacagtggaataatttgcccaaagtacccgttgactctaagtagtctttagtgcggtgctcaaaaggctttacacagagatactgcctggaaggaaagctaatttttttttaactcacaggcctgagataatgacgaaaggagaggagaataaaattaaagagaggaagacttgagaggaggtgaaagtataccatctaccctggggcacccccagccaagtgatattaagtcttactccttgtcaagaatgtcagaatcctcttgtgtgtgtgctcccaacagttacttggaccttgggaagccagaattcaggaacatgagcagacttcatgattctgctagtaactctttgttcaccccaagaacagctctcaagagcccttctagcagtaacatctcagataacttcatgtttatacatatgtatgcatacacccacaggcatgaggaaaattttagatgcaaagctgacaacattccaaaatttttgtagaaatttgctaagcaatagaaatatatcagtgaaaataatacaggagctaaatttatacgtcagtttcttgctcaccaacgcagtttttcaatatcaaggaagtgaaaaattaaaccagcttcctccctccctcccttattttctttcttcctttctcttttcttctcctcttccctcttcttctctgcccgcaccctctcctttttaacttttatttgcctgtttgcctttacttttattttcaaagccctttgaggcagagatgaacttctggcagaatgtctaaaattagctaggttctctggaaatgcagaactatttatgatacagttggctttctcagtactacagagagccaataataaccactcttaaatgatcctgaatgtggctagtatgcttcattgttgggaaatctgattttattaccctcttagattctatatttttaatgtattttgtaaccaatgagatttccacaagaaataaggatttggccttccccttgatgagtcaagcctgcatattcccctatgagtcatgagtctgcatattattagattggagttgttcctgctagatacaggccaaatttaccccaatttgaaaatatcaaacactgtaatcttaatataatattttgatgtgtctattattaggaatggccagagcaaacagttgagatctgtaagttcatatttaggaccaagtttccatgctctgtgtagagactgagaagcgttctgagcctccatcagcagctgttgcgtccactgaataattcattcaggaaacaaggactgagtacctttcatgtgccagattatctcgaaggctctggtgaccttaggatg

SEQ ID NO: 5478 - DNA, 2300 bp, Homo sapien
tcctttaactcttcactgccactccctcaacaccactctctacttgcaataaataactgttttttgccttctctgacttcattttgtctcatctgctagtgatgttgtcaaactgatctcaattggtagatcggagttgtcttctaggggagtttatgaatgtaaacaaaactgtgaatgtggcctcctgaagttgcatatttgacctggctctgtcttcttcagggcaacagattctcaacctggttttgttgttagtacagttgaaagaattaattttaagaaaaacaagtcagaagaaattacagtgcagtaactagtaaaataatcatgactacattaaaatatttttaaatacccttaaaatggttcaaggtattatcctctagaagtgtattgctatttattgccttttcaatactcttttgtatacctgaggcaatgtctttgagaacctacttgaaaaaaagtgtaacactgttttcctcttactcacagtaccttgtaccctgatatttgtaacatcacaaaacccacagagttaggggctgaccaaatatacacagtaagttatagtattgggtaaatgaaacaatcctgcaacaaaagattcttcagttccaatacagaagaataaaggaaacacaatttaattttgagaaagcattaccaggttgacatgtatataaggtggcacacaagaaactataaactctggacagaatcttacacaaatctatacagcagtcaaagaaagaacaatagaaacttctcttatctccttgagagataaatagatgagccctgtcatctgctctatagttgtgagatagcacagagctaatttgtaggtttacagttccaaggggaagaaggccagaaaactgaatcaaaaggactatcttgtttgggggtttattaagtttacaaggaaacaccccaaaggaaaaaagcgtgagtatgaagccacttctctcctcaaagaaaattttataatttatttttacagttgcaactacaatcacttgtaaagacaaatcccagattccttagaaactagaagcatagtaatgaagagttctcgaaacatctgcaagctactgtgtataaatggaaaatcactgggctatagagagacggtcagattttttgtgtgtggaatttttaatgcattttgtaatctcacatcaacttgatttttactcacatttcccactcctacatccttatctcggaccccttgggatatagagaaggactggctgggctggagtcagttggaatgcagacagtggtaggtcacacagaggctctgcaggtgactgggagatactcaaggttcataggataattggatgtcagtcattctgatagtggaattcaatgatatagaagaggattatttagacaatatgtagtcaagcagtctgccaataatttattgagtacctgctatatgccaggggctagataatttccaagaacagagtatatcagcatgatagagttctaacaaaagatgctgagacttattggtgcggctgtatatctggagaagagctccggtgtctagaaaatgagagaggtaaagagattttaccctaggctgggtgcggtggctcacacctgtaatcctagcactttgagaggccaaggcgggcggatcaccgaagtcaggagttcaaaccagcctggccaatgcggtgaaaccccatctctactaaaaatacaaaaactagctgggcatgttggcttgtaccagtaatcccagctactcaggaggctgaggcaggagagtcacttgaaccggggagtcagaggttgcagtgaggtgagattgcgccattgcactccagcctgggtgacaagagcgaaattccgtctcaaaaaaaaaaaaaaaagacatttcagtctaacgtaaaggaaatctctctagaaactggagtattatgtaagagatggtcttttgagaaatacaggcagaagccatgtagcatttgttgacaacactgatgggggattcgtgcaccaggcccaatggtgaactctagaatctctaggtctctagggttccttctaattcaagaagccaagtgagacactgtagcagacagtgtctccaggcagggtactgagcaaagaggatagtgaaaagggcagtgaaacatcggcctttttcactggcaacttcaagactcactgcctacaatgtaagtattcctcgtattccctaacaacagttcaactggaagagtggtttctgtgaatccctttgactttttatcttgccttggtcctgg

SEQ ID NO: 5479 - DNA, 2300 bp, Homo sapien
agaacaccaacatggcgcatgtatacatatgtaacaaacctgcacgttgtgcccatgtaccctagaacttaaagtataataaaaaaagaataatgataaagatcaatagacttttaaaataaacaaataatgtgttctaggttaaaaaaaaaacggacctagaaattttaagtagtgggattttggctgtgttataatgaagagtcagggtgtggataaatggaaaagtaggacagatatatttaaatcagaggaaatggttggcttgagaaagaaacatgaatgatatactgaaaagatctgaaggaaacaaatctgccttttggaaaaaaagcaactttatttcttaggaaaagtgggacaaatgggtagagagatggttccaaattataaaaggcttcaaatactaggttgaataaacataacctaatacaaaattatcatgggtttttaaaattcggaagtggcacaataaaagcaatgtcttaggaggattcatttgaggtagatattctcattacatgatactaatgcgcagaagatagaatttcagataacccaaaagtgataaaattacataaacctaaaaagtaggccagagagtagggcaactttcagcctagaaatataaattgtgatactgattatttaaatggatagatttatggtcctagttctggcttgcaccagctaactatgataaaacatggtggcagtaagcaggagaactagaggtgaaagctgttcaattaaaaatgtcttggcgggcacagtggctcacgcctgtaatcccagcactttgggaggccgaggcgggtgcatcacttgaggtcaggagtttgagaccagcctggccaacatggtgaaaccctgtctctactaaaaatacaaaaattagcctggtgtggtggcgcgtgcctgcaatcccagctactcagagaggctgaggcaggagaattgtttgaacctgggaggcagaggttgcagtgagctgagatcgtgccactgcactccagcttgggtgacagagcgaaactccgtcgataaataaataagtaaaaagaagaatagataaatcaacatgttgtattcacaaaacaaaaaggtaatttaagtaattgaaatagaactattatatcaactttatctcaaaattatattatataaaaaaaggaagttaaaattacataaattaaaacagagataggtatattaattatgaatgcaaatatataataacattttaaaacatggaccaaaattatacaaaacaagtacacaacaatatttgctcttgaggaaaagaaggaagagaatggagctagaaagaataaaaaagaagcttcagatttatctgcaatattgtttaatttaaaatttatacaatgcaaagattagtaagtcaacttatatacatttttgcaatgaatacatggatgactgttattatttgtaatttattgtgatttcagatttataaattaattccaggctgattttaatgtgttttaaatgtccttgtaaattgctaaattatattttttaaagagtaatgttacataaaattgttaaattgctatattaagggtttgttaaacaataccttaagtgtttgtgtgaatctatttcgtcctataagaataaaatacatttttattttactttatcacaaaaagccacaaagatattcagatatcataggatattttaccaccaggcatactgatgacacgattttgttaaccatgtgaaatgaagtacatggtgtttattaaagttaatttttatggctatttcactgttcaagttttccacatttcttgaaaaatatttgttatattacacattttaaatttagatagtgttctatagattactttcattcaatactaatctcactactaaaatgcatcttccctataagtaatactttcttatttcaactctatccaaaggatccacaaaaacacctaaaatgggtgtgatgttcagaagccttaataaataattgttgacttaatgaattacttcatggagttctaatagaaatatcttgttaacgatatgcattttattttattttattctattttattttttagatggagtttcactctgttgtccaggctggagtgcagtggcccgatcccggctcactgcaacctccgcctctcagattcaagagattttcctgcgtcagcctccggagtagctgggactacaggagggcgcaacagcacgacctggtaatttttgtattttcagtagagacggattttcaccctgttggccaggctggt

SEQ ID NO: 5480 - DNA, 2300 bp, Homo sapien
aaacacttcaaactaagttttatgtatctacttcccctcacttgtatctctccctgtatcctattgctaaattaatgataaaattatccacccagttcagaaggattactcagggagccttcctcattcttatcagctatatttgaccgaccattcaatcctgcaaactccacttcagcaatatatctctgtcataaacccctctgtgtctttctactggcttaattccagcctttattgccttttggttgaacaactacaataaattcctaattggtctcctggtccatggaacctctcccttcctacactgccacaagagcatatatttcccaatgatatgaccagattcctcccctgcttcaaaatatttgacccctgtggaaacaacaatacaagccctttacttgagaaaggaaaatatgaaatcagacatttttcttccaatatggagagaataagctttaataggaatcttgaagaaagcttgagtcattgacttcaagatctttattctggtactgtgttgtaaatcctttctctttgctgataacagaagctctagaaaaaaagactatcactgaaggagccaaacagaaaacctatttgctagctaataaaattgggcatagatcaaaataaaaattaaactgatcatgcttgatctgttcagtttcgtgagatttctctagtgttttcctgccattttcagcgtaaagagataagaattgtgttgctgccagactcttttattatccacatagaaggcaagtctttatatttgtcaaggtttacatgattaggaatcataaatcacaattaactactgcttaggagataaaggttcatgaattttgcatgttgttaatcaccttatcaccctttcagggttttaatctgctctttcttcatggtattaagttatcacattatattttttctatgttctgtctctaccagaaagtaaagccacagagcaaggactttattttgttaaaatagtggtagcacacacgggtttaattcatttgctgtttttttgtttttgtttttttggtttcttttttttttgagactgagtctccctctatcgcccaggctggagtgcagttgcgggatctgggctcactggaacctccgcctcctgggttcaagtgattctcctgccttagcttcccaagtagcttagattacaggcaccaatcacgcctggcaaatttttgtatttttagtagagacagggtttccccacgttggccaggctggtctcgaactcctaacctcaagtgatccacccgccgcggcctcccaaagtactgggattacaggcttgagccaccacgcccggctgattcatttgtatatatttctagaacagagcttggtacgaagttgagcattcagtaaatatctgttgaaatagagggagagtgaaaaagaaagtaactctctcgcgtattccacaactagctcttcacctatcaaattacgcgcaatggaaacatcttagtcctcagagcaatcctgggtgcaaggcagaggcggctgttatcaggcctattacacaggtttagggtgaaacttgaaaatgtgggcgggaaagtcacaaagcaatgaaaaaaccatctagaaaaaatcttttctggatgtcaccatctaacatttggcatgagaccccagaaaccggatgactcggctcagaagcagacacatttgaaaagatatttatctcacgataaattaagggacaaaaaggccttcaaaaaggaacggaataaacggaataatttttaactctaacattactttctttcaatttttacataattcttatagctgcggcgagtgaaacgactaaaacaaaagcaaaacagagctccactgcccaaaacaaagatggccgagacgactcccatgcccacacgcaaaatggacgctgactatgacgttccctgcaacaatcctcaactggccccgccccaccaatttggaaccccgcctcctcaacccggaaccccgcctcccccagtgtggccgcttttccgacagaggcctgcccgtgattggctgctcgtactatttacgtcctttcgatgttgcgtcatgcagtgcgccggaggaactgtgctctttgaggccgacgctaggggcccggaagggaaactgcgaggcgaaggtgaccggggaccgaggtactgctccggctggccggcgggcgcccgggatccccggtggtcctgacagccgccctcacgggaccgctgggtgcggggggaagggctggaagcagcggtgctgct

SEQ ID NO: 5481 - DNA, 2300 bp, Homo sapien
aaatgccaatacaggcacactgtgggtgatcaggccacgcttccactcagatggagtggggcaagttccaaagactagtcttaccaagttgtagatgtccggactccaagtgccagttccttcctggtgttcagccactgtgttaatcttccgtgggggcctgctacacgctgctctggcaaggcgttccattggggcaattgcctacccgggagcgctctttggatcacgtcactcaggctggccggagttcccctcacggatgctccacagggcaggcctaagccgcctaaggggctgcctcggccatccgtcagtcacctcgtttcccagtcagggaaccaagaaatgtagcagggtgagccgcagacaaaacctctcagacactgagttgtagaaggcagggctttattcagctgggagcatcggcaagctactgccttcaaatctgagctccctgaatacacaatttctgttccttttaagggctcacaacactaaagatttcacatgaaagggtcgtgattgatttgagcaagcaggcggtacgtgacaggggctgcatgcaccggtggtcagagagaaacagaacagggcagggagtttcacaatgttcttctatacaatgtctggaatctatgaataacattggtttttaagttatgagttgatttttaactactgggtttagtccaggcaggcccaggcctggtttcaggcctggcgccgggctgcctgtctttggttttacttccttgttttttcttaaaagaggtactgagtataaaacaatataaaacaatatgagagggtatctctcttccctcagtttgggagtggaggtttgagagcagcccaggcagaggctcatcagggtgcatgggaaacatcctaatttcttccgaaaaatattcctcctacccaccacctctcataggcccaggggctctgaaccctctgacaccatctgaggccagagcctagcaagtgttcaggcacccatgcaccattattaaagggaactcagacccactctgatggaaaaggagcccaaagcattcctgtcatcagtctctacccggctgaaggatcccccggcctcccttttgccagtctgattcctctgctggtccaggaagcccaccatgacctggcctaccatgccaggccatctccgacccaatcttattccatctctgcagagtgtcccctccctcccccaccttctgactgagcaacctacgtccccttccttcagtatagacagcacttacaatgctgtgagacagtcacttgtctgcacagcttcctccaccaacaggagctccttgaggcgaggcacagtgtcttctgtgtccctggagccaagcgcatggctcagcccaggtcacgtgtccagtgaatgggtggcatctgagcctcctgcacctgtggtcagactttcccccatgcctgccctgggcagaggctcctctcttccaggccttgttcagggtgaccctgtacttgaagtgtcttctcatttcatcactgtcttaaacatcaaagtccacctgtggccccacctcctttaagagctgtgtgagcaccttggtgcagatggcttctcatacatgcctcaatacaggcttgtgagagagatagtcctgtgcccatttcacagatgggaagccgactcaaagacattcaaggacaagtttgatgtcacactgctaagtggcagaaccaggactcaaacccaggtcatctgactccaggacctgtgctctctacatctcattggttactcaagactcatccttggatcagaacctgcaagggttttatgatcctttttccagacacagctgaggaatgagcaggaagagctgcatttgataggattattactgacactaaaagttaacgttcaactctagacagtggctcttcctgggcagttggttcctgctctcaccactgaagccagttctgaaacctctctgggctgggcatttacagctttctgtgttacaggttactaaatgcatcttgaaaggctggttttcctcttgggaggggctgactttaccctttaggagaattgcaaggctactagggctctgcccattgggaaacacctctctatgactctataaatgtccaaggtggccccaagggaggacttctgcagcacagctcccttcccaggacgtgaaaatctgccttctcaccatgaggcttctagtcctttccagcctgctctgtatcctgcttctctgcttctccatcttctccacagaaggtagggcagcccccag

SEQ ID NO: 5482 - DNA, 2300 bp, Homo sapien
atggcgaacacaccactttacttaggctgggtatgtatttgggggtgcaggggctgtgaatggaacccccaagccacctgcaggcagtcctgagccccaaacctataggttcaggagaaagagcccatctttccggggctcaggactgcctgccaaggcctgcccgccaaggcctgccctccaacaaatcctgatcagagtcttcccagatgctgaaatcctgctcagggatctgcaccctgggggctgccctaccttctgtggagaagatggagaagcagagaagcaggatacagagcaggctggaaaggactagaagcctcatggtgagaaggcagattttcacgtcctgggaagggagctgtgctgcagaagtcctcccttggggccaccttggacatttatagagtcatagagaggtgtttcccaatgggcagagccctagtagccttgcaattctcctaaagggtaaagtcagcccctcccaagaggaaaaccagcctttcaagatgcatttagtaacctgtaacacagaaagctgtaaatgcccagcccagagaggtttcagaactggcttcagtggtgagagcaggaaccaactgcccaggaagagccactgtctagagttgaacgttaacttttagtgtcagtaataatcctatcaaatgcagctcttcctgctcattcctcagctgtgtctggaaaaaggatcataaaacccttgcaggttctgatccaaggatgagtcttgagtaaccaatgagatgtagagagcacaggtcctggagtcagatgacctgggtttgagtcctggttctgccacttagcagtgtgacatcaaacttgtccttgaatgtctttgagtcggcttcccatctgtgaaatgggcacaggactatctctctcacaagcctgtattgaggcatgtatgagaagccatctgcaccaaggtgctcacacagctcttaaaggaggtggggccacaggtggactttgatgtttaagacagtgatgaaatgagaagacacttcaagtacagggtcaccctgaacaaggcctggaagagaggagcctctgcccagggcaggcatgggggaaagtctgaccacaggtgcaggaggctcagatgccacccattcactggacacgtgacctgggctgagccatgcgcttggctccagggacacagaagacactgtgcctcgcctcaaggagctcctgttggtggaggaagctgtgcagacaagtgactgtctcacagcattgtaagtgctgtctatactgaaggaaggggacgtaggttgctcagtcagaaggtgggggagggaggggacactctgcagagatggaataagattgggtcggagatggcctggcatggtaggccaggtcatggtgggcttcctggaccagcagaggaatcagactggcaaaagggaggccgggggatccttcagccgggtagagactgatgacaggaatgctttgggctccttttccatcagagtgggtctgagttccctttaataatggtgcatgggtgcctgaacacttgctaggctctggcctcagatggtgtcagagggttcagagcccctgggcctatgagaggtggtgggtaggaggaatatttttcggaagaaattaggatgtttcccatgcaccctgatgagcctctgcctgggctgctctcaaacctccactcccaaactgagggaagagagataccctctcatattgttttatattgttttatactcagtacctcttttaagaaaaaacaaggaagtaaaaccaaagacaggcagcccggcgccaggcctgaaaccaggcctgggcctgcctggactaaacccagtagttaaaaatcaactcataacttaaaaaccaatgttattcatagattccagacattgtatagaagaacattgtgaaactccctgccctgttctgtttctctctgaccaccggtgcatgcagcccctgtcacgtaccgcctgcttgctcaaatcaatcacgaccctttcatgtgaaatctttagtgttgtgagcccttaaaaggaacagaaattgtgtattcagggagctcagatttgaaggcagtagcttgccgatgctcccagctgaataaagccctgccttctacaactcagtgtctgagaggttttgtctgcggctcaccctgctacatttcttggttccctgactgggaaacgaggtgactgacggatggccgaggcagccccttaggcggcttaggcctgccctgtggagcatccgtgaggggaactccggccagc

SEQ ID NO: 5483 - DNA, 2300 bp, Homo sapien
tcaagactagcctggccaacatggtgaaaccccgtctctaccaaaaaaaaaaaaaagaaaaaaaatttgctgggcatggtggcgtgcacctgtaatgccaatatttgaaaggctgaggcaggagaatcacttgaacctaggagacagaggttgcagtgagctgagatccgccattgcactccagcctgggtgaccgagtgagactccagctcaaaaaaaaaaagagtttgaaccttctttggagccaacccaaactgtatgtgaatccaagctctgcacctcagagagaataagtcacttgcttggtcgtacacagccaatgaggaaatctccctcctctgcaaagcagagaaaatcacattgggagagcagtgcaggtcaaataagataatatgggcaaatatacataagcacacatacagcacatggcatgtaggctactccttccccttccctctccagtgcatggctgttgactgagggaactgaggagagagaaatcaacggccctagattggtgaggagcagggctaacaggacccagggagagctggcttttctcggcccaccaagacatctactccaggaaaccttggctctgcctctggctcctgggaaatccacggcaagactcagtctccacatccctatatgggacttgcagaatacttgccttagctttgtcccagcactttgggaggcagattcagaacatctgtgcaatttaaagtgtgtcttttcagcaaaagagccaagcctaaggagactcaacaagggtttcggccaattaggcctgaaaactgctgcacattctaaaaccattgattcatcttccttcttctctgcaaatccctgacccttgctcacagtagatcatgtagggctagaccaagggatggggggtgctctgttccctcaaaggcccctggcagggggagggggggaatgctgagtcctcagctgtggagacctctcccaggagcacacagaggagggatctcctctatctgagaacacatccacccaagggcatcctgggaagtggcctggcttgggcttgaagtgacctgtacccccataaatggcccaaccaggaaaaggaaaacaggctgcatttccaagcaccctccagtgtcagagcaggagaacgaggaagcccaaggagctttaccagcagccaaaaaggttcctgggcttacctgtgtcttcaagttatcagcatccaggaccccaatagcagtgccttgctttgtgtaaataccctctaggaatgagatctcgtgcctctcgggcagttcagatctatcttggccagctctgtgcaagtctgtcctaagatggggcttaactctgccttcaggcccttcactcttccttggaaggtttgaagagtgggtcagctgccccttcatggtcccagactgggcactgactgggaatggggagcagaactgcctctcaccctggtggacacctgagggtcctccctgctgcccaccacacagatcagaccctttgggagaggtggtccagcctggggaacagggcaggaatgggttgagatcacagagagggggtcctgataaccccttaccatctgctgcccatccatcaccctttctctttgcctttggtctcacgcggcttatagaacctgcttagactgctaaggcaaggccctctcggccgctccactaacttttcttctggaatgcttagctcagagaagacagctaagcccctgaaagtcacagaggaagttgatgagaaaagaaaactgcgaagcccaagccccaccaggacttaagtaccctgggaaagcctcaggacaacttgggggaaagacactcctgtcccccatggtgtcctcctgtccaggactgggggccgccggcaaagggggcgtggcgggcggggagtcctcttgtcacgccctcctgcccccgcccgcggctgggagcctgtcgctccgctctgcgccgctaattggtctcgtcaggcggccggcaggagcagatccgagccgtgtcatcctcttagcgccctcacgccacccgccgctcccgccccgtgccccctcccgccgcggctgcagtcgccgctacccccattgtggtctctgccctccccgcgggcccagggcatgctccgtgcccctgcgcccggtctcggcggcggcaggcgacactccgcgccggcggagacatgaggcgctgccggtgggccgccctggccctggggctgctgcgcctctgcttgggtgagtggccgctgggccgcgctggccgcgtggatggcga

SEQ ID NO: 5484 - DNA, 2300 bp, Homo sapien
ctgtttgctccctcctgcaatgggaggatttttctcctctgccccttgacaatactgaattctcaaagtttaaaatgtttgctaattcaggctgggcacggtggctcacacctgtaatcccagcactttgggaggccgagatggacagatcacctgaggtcaggagttcgagaccagcctgaccaacatggtgaaacagtctctactaaaaatacaaaattagcctggcatggtggtgggcacttgtaatccaagctactcgagaggctgaggcaggagaatcgcttgaacccaggaggcagaggttgcagtgagccaagatcacgccattgcactccaacctggataacaagggcgaagctccatctcaaaaaaaaaaaaaaaaagtttgctaagtcactaggaaaaagatgtctcattcttgctctaaaatgtaggtatatggtccctggtgatcctaaatatgtctgtggttatgagccatctcctcctttttgaattgctgtttcataggtagaccttttatctgtttggggtcttggtttttttcttctccctctctccttgagcacatcccccagcccctcaccacgtctttttgctccaatttccctttccctctttcctgcaccctctctgggcccagcccccactgggtgctcacacattttatcctcaattgttcacctctttttgacacttcactccccgaccccactgctgcatgcccctatgcctctgtccccctgagaatgctgtcactgtctctgaccctcccctgtggctgtgaccccctcaggacatacctgctgggagcatcatctttaaggtccatgcagtggacagggacacaggctctggagggagtgtcacctacttcctgcaggtaaggcaggacacacaggacctaacctggggctgggccggaggggacacctagatggcccctacctccatcgccccaggcccttaggtcggtgcctctatgattcccgagaagtacatgaagggttgggatgggcaggaggggatgtgagagggacagaagccttcttcccctgatgggcccatcctggcgtcctctaagtcagcctgtcccctccctcttccaacgtccccaggaccctcagccctccacatccccagccctttccccaggggctgccacatgggtggagaaccccgtgtaggcccagaatggtcaatagaaaaaagagcagaagagacaacactcaaaagaagcagagctctgattcccctaacaacacaggcccagaagtcccctggactgcacgggtgctggagaaaccccacccctcaccactcccgtgaccttcagcgcgttatctaactttcccagctcagtttcctcatgtatcacatgggagtgataaaaacacatccttgttccattgttctgaaaactacatatgtgtaaagtccccaataacagcacctggcacaagcgcctgacactacccagccagaagggcccccagggaccctaccagaggccggtgctccctgcctgcctccttcaggctgcacaccctctcccccgatgccaggctgcctgggactggcccgcagtcacttgcttggtgtagggtttgaaggtcccaacgtttctctccttcactgtgacttttaacccctggctccctctgggttagattactccgcagacattgccatctgctggaccctccaggccagagctaagcccaaagctgagcccaagaaaatttgctttccagctgagcaggaggaaaaacaaaggcccaaaagggaaccttgtgtttttcactgagggtgtgggagggaaagccccaagtcctatgaaggagaacctgggaccagaaaagctgagtgctctgaagtaggaacctcagccctgaggtcctgtaatgaggggcagtgaggacccccttcagaaagcagagcgggcattcctggggctggcctgcattcttgctgaggtccagctgccccctaattcttatagaacctgcactccccatttgccgtggaccgccacagcggtgtgctgcgcctccaggctggggccactctggactacgagaggtcccggacccactacatcaccgtggtcgccaaggtaacacagcaggacaggggagcatccagtgtctcctcagcccttgggttggaaccaagttaggttctacaggggagtgggagcagtttggagagcaggagacatgatgggcgtggggaaatagggagcagctgctcggaatttttcctgcctggacatattctccagggaggctggggtc

SEQ ID NO: 5485 - DNA, 2300 bp, Homo sapien
acactgaaccacaggttgtttaacataaataacttgacccatgctaacttcaattatcctggtctcctgcctcaatttccaagagagccactccctctgttcatatgccaaataaggaaaccagagaatgagggggtcaggaaaggagtggggggcagtagagaagtggcctagatgattctagagatagcatgccagtgggtgtgcttcacaagcttcccgcaaacttcttgaaagttggatggagctggattcatttgaaaaggctggcatgagatggacagagaggaaattgtgggggaatggaggactcttaagatctttatcctttggggtaaggggagagaaaggaatccactagtggtttggaatagtcatgaattaaatcacatatttccatgaaacaagcctgacaaagccttagcaaagctggtaggggactctggagtgataattgctcatcagagttttcccccatcagggcaaactggccaggccctcaccaccctcagtcactgaatgtgggatgtggctgctttgggaaggacgtgacctcatgcaagcactccttgcagctgagcatccacttataccttgaagggggatctaggaagcacatagccatatgtatgacaaactttgtgccgatagctctctctttgttttggatttttacctttagacaaacacagtggtccccccaggttttagagttagactgtttggaaactcctgcaaatatttctggcttggatggaaagcctggagtgtaatcagcttagctggtgacccatttcccccctcactggttagctaagcggattttctttcctgaggccttttgtagggtacaatgtatatcatgagtcttaaaggaactcatggaatttcaatattcaactggaagtgccctagttaatagagatgtagacttttcggatcttaaagagtttgtcagtgggaggaggattaatgggcaccaactgtgtgctaggtgttgtatttaacataatctcaaacttttctaaaaatatggctggatgcaatggcttgcacctgtaatcccagttacttgggaggctgagaagtttgagaccagcctgggcaacagagtgagaccctgtctctgaaaaaatacaaaaattaaaaaataatgagaaataaattcctggaaacactatgaggtatttgttaatattctcatgatacagaaaagactcacagagattaaattacattccaaagatctcaagattcagaagcacaaacaagagagaagactccttgggacagggtctataataggtttgcccttgaccctgttcctttcattgggcaagagtatagcttaaagcaaatgaccagtaaatatttgtggaataaatgaagagtgaaagagcaagcatataaaattgtatacatctctttttaaaatgtaggttgcccattttgatgaagtgaaatgcacagtattaaggaaaggttgtgaagtccaagaaaacaatcttttggtttaatcagaaaataccatcttgtatttgaaactggtgacccaagctgcagaagcagctgtcttgatgcagtaggagcatgactacaccacccgtggtgttgggaagagaacaaatgataggaatgaacacagaattactttgttactcatcacctattttcactttgagaaaatgattggaaattctaggtttcaggaatcaactgcaaatgatgaagcattagatggattctggccacatcccctgaacagtggtgctcagaatagcactgcctgcttgtttctcagacttctgtttaagactctaagaaatgtagaatctgtatggaattggacatctgacttggagtttgcttttcagactcaagaattacacaaatgttgaatttcctgaccctagttaagagacattgatcccccttcgtgtgttctgactgaacttgtggtctgggctgtaacagacctcagagctcccatgggctttcctgctgctgtgtgacttacatcatcatggattaccaataataggatttgccactcggaagctggggcgatacttattcaaaactcacaacgtattttcttacagagaaatatggcttcagtttttcattacttcctgttagttctggtctttctggatacacacgcagctcagcctttctgtctgccaggatgcacttgctcagaggagagttttggcaggtgcgctctgctggccagatgttagagggttatggggaatgggttttctttggggatgatgtggagtggaagcaggcttaga

SEQ ID NO: 5486 - DNA, 2300 bp, Homo sapien
tcaggctggtcttgaactcccgacctcaggtgatctgctggccttggactcccaaaatgctgggataacagtcatgagccaccctgcctggccttctgtctcaatttctaccttatggtgttggttaatacatatgtcagtccttttttcatgccttcgagatcacaaaagccttcatgagaggagataaagcagggcaaggccaagattaaagggtaaagttcatttgggcaaaagacacaaggaggaagaagcagagatgtgggaacaggcaagctgacggctgggtttggggaggtggaagtatagctgggaagcactgagaaaatcctactggctgcattggaaggaaggaaagaatgagaagccagtattgttgaaacagacctggctccgagctaggcattttatgtgtgcactggggccccagatatctttgcaggtcatacctcactggtctaggcctgcctggagccacaggcatgaaggactggggaaccttctagaaaagccaaacaacataggtagggcatgctggaccagagaacaatgcctcagggtcaaatgtgaagaatgaatgaatgagtcgactgagtgtctactgctgggaatcatccctggtcagtccccactggcatcttgagtagatatggtggggcgagatagggttaggagagaataagtaaaaattgaaattagtctgggtgcagtggctcaggcctgtaatcccagcactttgggagactgaggtaggaggatcgcttgaggccaggagtttgagaccatcctgggcaacatggcaagaccctgactgcaaaaaataattttttaaaaatagccaaacatggtggtggttgcctgcagttccagctacttgcgaggctgaggcaggaggatggcttgagctcaggagttcggggctacagtgagctatgattacaccattgcactccactctgagtgacagagcaaccctgtccctataaagcaaaacaaagctttatggatggagaatttccaaaggcccttattagaggttggggtcctgtctccaaaaaaacctgaaagtgccttctctaagacctctctgagctacctctctggggccctccttggagtagggcaccttgaggagaggggtgcccttgtcccttatgtggagacatctccacctttggcattcgtagcaatgcccagaagggctcagctgaaatagtagtgtgttgagtccatatccatggggcactcaaggcaggcagctgtttgcctggcagcctgggacagtttgtgggctcatgagagacacctctgatgtctccccaaaatatctgaatctgtccagttcttctgtaagtagggtcttataagtaccagtgaaactgggcacttacaacttgtgagagagcttctgttcccacaggctgtcaaggccttggaatttgagtttgattttcacaaacaccctgcatgaagtaactttatttctctttgtcagataaggacacagaggccaagagataatgtgactcacccaaggtcacagccccttaatggagcagctgggatttgaccccaggaagcctgggtccagagcttagcctccttccaatgcctttagcaccatcaggaagagttgcttcatttcactgcttttttgctatgagacagtgtcacaggaaagaatttccaaaggcccttactgaggcgggggttctttctccatcttccctggcactccagtggggtctgtgttgtccgtggccttgttgggatgggatgctttgcagatgacagtcccatggctgctcgcctctggaaagctgcctacttgtcttgctttgctgtgccctgccctggcctctctgggcctgtggatattgctatggaagggggtcccccgcccctaccctcaggactgagtgattcagaaagcaataagcctctgagtgctgcggctgggactcccctccctaatccccagtctgtccatgtttatccgatggcctcaggagggggtgtaaggggctggcgagcaagtgggcagctgctgagcttgctgggccggtgggacggagcggtccagggacaggcccctgcctgggccagagaggagccaggagccatgagggtggcattaggcatgctctggctcttggcccttgcgtggcccccccaggcccggggcttctgcccctctcaatgcagctgcagcctccatatcatgggtgatggcagcaaggccaggtatggtaccgggtgcgtgggacgggcagcccagcctccattgctttgccagctag

SEQ ID NO: 5487 - DNA, 2300 bp, Homo sapien
cccagcagtagacactcagtcgactcattcattcattcttcacatttgaccctgaggcattgttctctggtccagcatgccctacctatgttgtttggcttttctagaaggttccccagtccttcatgcctgtggctccaggcaggcctagaccagtgaggtatgacctgcaaagatatctggggccccagtgcacacataaaatgcctagctcggagccaggtctgtttcaacaatactggcttctcattctttccttccttccaatgcagccagtaggattttctcagtgcttcccagctatacttccacctccccaaacccagccgtcagcttgcctgttcccacatctctgcttcttcctccttgtgtcttttgcccaaatgaactttaccctttaatcttggccttgccctgctttatctcctctcatgaaggcttttgtgatctcgaaggcatgaaaaaaggactgacatatgtattaaccaacaccataaggtagaaattgagacagaaggccaggcagggtggctcatgactgttatcccagcattttgggagtccaaggccagcagatcacctgaggtcgggagttcaagaccagcctgaccaacatggagaaaccctgtctctaataaaaatacaaaattagccgagcatggtggcacatgcctgtaatcccagctactcgggaggctgaggcaggagaatagcttgaactggggaggtagaggttgcgtgagccgagattgcgccattgcactccagcctgggcgacagagcgagactccatctcaaaaacaaacaaaaaaacaaaaaagaaattgagaaagaacagggaacgctctggagggcgcagccataagctcagccctgcagagggattaggcttggatgtaagtgaggactcatgagaggaaaggcctgggaagtgggcattcctggaacagagtgggttgctctaccaggtgagtcagaagatgccattgaaaaatgcctgagcctgaggaataggagatcggcttttgttccagctccatccataaattactgcatggcctcaggcagattcttaactgtttttagccacagtttcctcatctaaaatggaaaggataatggtatctaactcatggagttgttgtaggactcatcagaagatcccctagcacagggcctgacctcactcaatattagctatgttgctgatagtgctctggagcttggtttctttatctgaaaatgaactaagttgtcctagatcagtatttcctggtgtaaattttatcatgagccagagcataacagtgcataaagagccagtgtatcaagaagtcatttgtagcagccaaagctcttagtggggccggcaaggctgggcgggttcggggtcggagactgacaagacggcaggcagcccctctgttctaagacagtgtcctaggacattttttatgctcaggtgctctatgggagacaggaaatgcagccctgaggtttatattcgtgatatctaaccaggacttatataaaggccacagacaaaagacattgacattgcagaaaagtaaacggaagagtccagtggtcccactccaaggcgcataactagttagtggcagattcagaaccagaaccccaaccccattttctggtcccagatggggttcttcctctgacagcaggcgacttcccaagcctcatcctttccccagcgctttggagtatactcatgtgagcctgaggacacacacacaggcaccaggcttgttgggaacagctgcggctcaaatccctcctcctgctcccctcccctggttatgcaactcttttccaattaggctctcagccacacaccatttggattccccgaccttaatcctgtgcaatggggctgaaatgaatgagacagggctccattctggcttcacaaaggctgcattgtccaactcgtgaatgggttccttctgcttgggccaagaggaccatttgcagcggggaggcatccagaaacagcccaaggtccaacataataacctgcatgtgcctccacgcacatgggatggccctttaaaagggagggcctggctgtgggaagccagagacagctgggccactggcagtgagggagagtgaggatggcagagaccagtgccctgcccactggcttcggggagctcgaggtgctggctgtggggatggtgctactggtggaaggtgagccaggcagaacctggggtgcagcgggggcccagtgggttctgaggacccaggccaccagtgtggagctggcaaggaga

SEQ ID NO: 5488 - DNA, 2300 bp, Homo sapien
cataaatctccaagcctagatgaaatggatcaatccctcaaaaaagcacaaactactacagttcacccaatatgaaatagataatttaaatagccctttagcccagtgcggtggcgcttgcctgtaatcccaactactagggaggttgaggcataagaatcgtttgaacttgggaggcggaggttgcagtgagctgagatcatgccactacactccagcatgggtgacagagcgagattccctctcaaaaaaataaaaaatgaaaacaaagttactaacccaacaactattaagtaaattgaatttataatttccaaactcctaaaaaagaaattccagacccagatgattttattagtgaattccatcaaatgtttaaagaagaacaaatacccattctatgcaatattgtctagaaaatggaagcagaggaaacacttctcaattcattttatgaagttagtattaaccttatacccaaaccagatatgacaagaaaataaaactacagaccaatacctctcatgaatatagatgcaaaaacccttaacagaatattatcaaatagaaattaacaacctacaaaaaggattatataccatgatcaaacagggtttattcccagggatacatggctaattttcatatgggaaaattaatcattataaccgatcatactaacatactaaagaatttaaaatcccatgatcatatcaatagatatagaaaaggtacttgacaaaattccacacccgttcataggaaaaactcagaaatataagaatagaggagaacttctttaacttgatacacaatctacaaaaacttatagctaacatacttaatggtgaaaaactgaattctttcctcctgagatcaggagcaaagcaagctgtctgctctcaccaatcttattcaacatagtgctagaatttctagctagtgcaattaaggcaagaaaaggaaataaaatgcatacaggttagaaaggaagaaatcgaactgcatcactttgcagatgacatggttgtctgcatagaaaatcccaaagcatcttacaaataagctcccagaattaagtcaccatcaatgcaggctgcaggataaacatataaaaagcaaattgtttctgtatactagcaacacatggaaactgaaattagaatacaataccgcttataattgctcaaataaaattaactactcagatgcaaatataaaatagcatatacaggatttgtatactgaaaactatgcaatgctgatgaaagaaatcaaagaagatccgaatacacagaaagacacatcatgttcatgaactagactattcaacactgttaaatattaattctccccaaattgatatacaggtagaaaggaatgactattaaaatcctagcaaaatgtttgtagctatagattattttcaaattcataagaaaggcaaaaaagcaagattactttaaagtttttggaaaggaaaaataaagaaggagaaatctgtgtattcgattttaagacacagagctacgtaaccaagactgtgtaatttggcagaaggatagtcacacaggtcggtggaacagcacagagaacccagaaacaaacccataccaacatgcccaactgtttttgacaatggggcagaagcgattcaatggaaggataatctttccaacaaatggaaatccacaggcaaaaataaataaacaacaaacaaaaataaaccttgacctatgtcctacatcttatacaaaaattaactcaaaatagatcatggatatagatataaaatgtaaaactatacaactttcagtaaaaaacttgggagaaaatctacagaatagagggccaggaagagtgttctcagaattgataccaaaaggataagtccataaaaggaaaacctgataaattgctcttcatcaaattaaaaacttttgatctgcaaaaggactctgttatgaggatgaaaagacaagcttcagaatggaagaaaatatttggaaacaatatgtctgacaaagtgctagtgtctagagtatataaagaacctgaagactcaacagttaaaaaataatgcaactagggggaggagccaagatggccgaataggaacagctccggtctacagctcccagcgtgagcgacgcagaagacgggtgatttctgcatttccatctgaggtaccgggttcatctcactagggagtgccagacagtgggcgcaggtcagtgggtgcgtgcaccatgcgcgagccgaagcagggcgaggcattgcctcactagggaagcgcaagg

SEQ ID NO: 5489 - DNA, 2300 bp, Homo sapien
cactaaaatgctattgtgattctgctaagtatgtacatgtattagcattatgggaaagttttttcctagccttctttttttttttttttttttttggagacagggtcttgctctgtcactcaggctggagtgcagtgacatgatcacagctcactgtagtctcaacctcctgggcttaagtaatcttactgcctcagccttctgaatagctggaactacaggcatatgccactaagcctggttaatttcttttttttttaatagactaggtctctatgttgcccaggctgatcttgaactcctaggctcaagtgatcctcccgcctcagcctctcaaagtgttgaggttacagtcgtgagccaccacaactggcctgggcattttattttattttattttatttttgagatggagtctcactctgccgcccaggctggagtgcagtggcatgatctcatctcaccgcaacctccacctcccaggttcaagcaattctcctgcgtcagcctcctaagtagctgggattacaggaatgcgccaccacgcccggctaatttgttggtatttttagtagagacgggatttcaccatattggccagcctggtcttgaactcctgaccttgtgatcctcccaccttggcctcccaaagtgctggggttacaggcttgagccatcgcctccggcctggtgtttgcttttctaatctcacttaatccaaagagagattgcacagcatttagacctagtctttgtcaatattttaagcacacattattgtccaatacattaaatatcttagggattgatatttaaaagacattattttctaaatatgaaagtgtattattaaatgaagtgtggttatacaaatcaggcattccgtctgctttttccatttgagtatcattgatctggagacaggaaagaactggatatttttcaagcagttctcctgaaatgttattacaaccgagctgttggggccgacgaggatttcagagaactgcaagtctacaaccaggtaagggcaactccagagctttaaacagccggccaggcccggaagccttccaggctgaggactctcagcagcaggactggccgcgtcgaggaaaaacaagaggggaagagatggcctctgggggatggaagccccaaagggaagaaagacctggtttctggcaaagaaaccacattggccaggagctgtggctcacgcctgtaatcccaacactttgggaggccaaggtgggaggattgcttgagcccaggagtttgagactagcctgtaagaccacttcccccaactctaaaaagaaaaaataaaaattagccgggtatttgggtcaacttgtgatagtttactttgactagtgtggtcttagttgtaattatttcggaggcttggtgatacacgcctgaggcgagaggatcgcttaagcccaggaggctgcaagtgagctgtgatagcgccaccgaactccaacctgggtgacagggcgagactctgtttcaaaaaaaaaaaaaaaaagggaaaaccagatcagcacttggggtgccccttcccctcagctttagcaagatcctgtgttttgatgcggtaggcaggtgcgtggttcagtcatgcccaatgctcagaccactcctcacttttcacatccaggaggaggagctgtcaggtttgaccgcactcaagcagcaaatgtagtccaggggacggctagaggtgaggtcagccgcaagactggcgtcactgcgtgggcccagcaaaaacctgagtcaggaggcggccaggcaaggtcagtggagggggcggggcccgaagcggaggcggagcttgggaaagcctggcgtgagggcggggcggggccagaggtgggctgaggccggatcaggcggtgggggcggtccccgtagccccgtgaggctcgcgcctgcgcacgggcccgcggcggggcgggactgcgcgtgcgcggtgcgccggccctggagggcggagtccgggcgggcgccggccgagggagggggcgcggcggctttggagtccggcgctccctcaggccgcggacgcgatgctggttgctgcggctcgggcggcggggctggcggggatgtgacgggcggcccttcgtctcaccttccgtcctcgggcccgcaggtcgcagggcggcctgcagctgggccgcggccgaggaggcagcgcgacctccgcacggtgagatccgggctcagggccagagccggggccggggtcgcggcgggcgccgggggcagcccaagaccaggcacgcagtccg

SEQ ID NO: 5490 - DNA, 2300 bp, Homo sapien
atggcctccatctccatccacgttgcttcaaaagatattatttcattcttttttatggctgagtagtattccatggtgtatttttttaattcactcattggttgatgggtacttaggttggttccacatctggcaattgtgaattttgctgtgataaacatacatatgcaggttttttttttttttgatacagttttcctttgggtagatacccagtagtgagattgctggatcaaatggtagatttagttctttgagaaatctacatactgtttcccatagaggtagtactaatttacattaccaccagcagtacctaaatgttcccttttcatcacatctatgccaatatctattgttttttgactttttaataatagccattctggctgggataaggtgatatctcattgtggttttaatttgcacgtccctgatgattagtgatgttgagcatttttttttcatgtttcttggtcattgtataccttcttttgaaaaatgtttgttgatgttatttgcccactttttgatgggattatttttttccttgcagattagttggagttccttatagattctggatactaatcttttgttagatgcatagtttgcaagtattttctcccattctgtgggttgtctgtttactctgattattttttgctgagcagaagctttttagtttaattaggtctcatttatttttttgttgcatttgctttttgtgtcttagtcgtaaattctttgcctagaccaatatccagaagagtttttcctaggttttcttctagcatttttatggtttcatgccttggatttaagtcttaaatccatcttggttgatttttgtatatggtaagagatagggatccaatttcattcttctacatgtggctatccagttttcctggcaacatttattgaataaggcgttcttttcccaattttcatttatgtatgctttgtcaaaggtcagttgattgtatttggctttatttctgggttctctactctgttcctttgctctatgtatgtacttttataccagtaccatgctgtttttgttactatagtagccttgtagtataatttgaagttgagtaatgtgatgcctccagatttggttttttgtttaagattgttttttggttccatatgaattttaggattgttttgtctaattctgggaaaaatgatgttggtatttcgatacaaattgcattgaatctgtagactgctttgggcagcatggtcattttcatgatatggattcctctaatgcatgagtgtgggatgtatttccattcgtttgcattgtctgtgatttctttcagaagtgttttgcacttctccttgtagagatcttttacttccttggttaagtatacctaggtattttattttatttttttgcagctatggtcaaagggattgagttcttgattctcagcttagtcattgttggtatgctactgatttgtgtactttgattttgcaacctgtgactttactggatttatcaaatcttggaatcttttggaggagtccgtaggattttctagatatataatcatatcattggcaaacagagatagtttgacttcttcttttccaatctgaatgccttttatttcattctcttgcctgagtgcactggctgtggctttccatatgttcttatttttaaaggagagacttttacccaaaatgaaaaaattatttggattggaaattggaagaagtactctgtaagtattattttttacatagtcaaatttggtggtttaattttatttctagattttgctgtcattcatagcatacatttataaaagtttataaaaatgttctttattttcttccaacataaagttattaatttaattagtgcattcggtatttgccaggagttctgtaggaatcatgagtagcttttgggtttttctgcgtataaaagtgtaagtatcatattatgtaataattcatgtaattatccttatttaggaatgtttaatgtacttcttttttctcttcacagattctttcaacttttaagaacaaatgcaccttatagctcatggaagaaaaaacacaaatcaagacatttttgggttccaagttgccaaagtatggaacaaaatctgtaagaagtacattgcagccaatgccaaatgggacacctgttaatttattaggaacttccaagaatagtaatgtcaaaagttacatcaaaaataatggctctgattgtccatcatctcattcatttaattggaggaaagcaaataaatatcagc

SEQ ID NO: 5491 - DNA, 2300 bp, Homo sapien
tgaagaccctggtgcacctttctgagaaacataagagacaatgaggaaaaggattcagcattccgtggaatttgtaccatgatcattgtgaatcccagtagtgtaatccaagattttatatttttttgtgatgctgttgcatcatggattaacccaaaagatgatctcagagacacattcggtgtaagatccttcatggatttaaaaatcaagtaggcgataaaaattggaggcatttctctgaccagtttcctcttcccttaaaaagagcgtcttgcagctgtttatggtgtttaatacacttaagctgcagtcccaaaattaggggtccttcagtcttggagactatgagggagcctctgcacccagggaaaatactaccctttacggggggaagggtaaaccggtagggaatacactacaatctcaaccctactggaaggggcaggagggaggtgttgctgtcactgtattaggttgatgttgggaaacgttttaacatgtggagcctttgtgggttgaaatatgtctccagctacaactctgcactggatctgaagaagcaaaaaaaaaaaaaaaaaaaaaaaaatctgttcagtctactcacaaaacagcacattgtggaatattatggagaattgtaccaaaacaggaaccatataaatgatgcatagggacaagaaagaggaacaattctatagcgcacaataaaggaaacctaagaatgggagttacaaatagtaaagaagcttttttctttttttatttaaagttttttttttaatccaagttttcccacatgatggggctttgttttgcatattgatgaagaactgcacaaacagaactaatatagttaaaatcagcttgccttcccatagtagaagcaggttcttggaagttacaatttaaggtaccccaaaaaagttggaaatagaacaaaacaaacatgaacaatgaagcaccctgtgaaatgccaaatgagtcactccttttaccttttttggggtgtgcaggctgggtggaataaatggggcttggtatatcaaactaaagatgacatcttaattttgcattgaacattaatgtagcggatataatttgatggttgcacttcattagatttaatttctaggccaatatgttattttttaaagtgcagtttaagggttaggcatgctttctggctcatagtggttgaaagtaatttaaattagtggggaagtagcatgcttgcatcacatagagtgagactggtattcatttacctatgttgcagcaatttgtgttgcagtttaccaatttagtgtagccctgctacactaaattgttccttcttaagatttgtgggttttattttcattaagaatatagacatataaagtactgtagtttacagctagtccttgaaatgtcttttttaggatctgttaggaataagattgatattgcattgtgtgtaacctgcacaatgtggaaagctgatatacctgtgcaaaatctttgcctctgtgctgtcagtgtgatgtgctttctgcatggttatatactactcatgattctatcaaaacttctaaaatttaaattacgtggtaaaagatgtgtaaaaggctgcgtaaatgtcagttggcacataaagacaattgtagaagttgaaaaatgattgctgtatttcagtgttttatccccactcaacatactgccttctaagctttctttttttttgttcaaagcatgatcttaaagatatgtttaagttaatgggtgtaatgcagggttcctacgctgtattttggtgcatgttggtggccctctgtgccgtagatgtatgcacataggttgcaagtgaaaagctacagagtgaaagttggtttggatcctcttcatttcatttgtttagcttttctgttatttttctctacttacatgtattcctgtgaataaatccttgttaacctttaaaaaattaaaggtactgtttaatacttttcacttagttttgtatacacattatgacataacctatttacaaagtaagtttctaaggtatcacgtgtcataatagcaagctgcaagtaactaaaaatgtgatgctagcatagatgtggtagtggagggacagcttatagaaagttgagatggtcctaatgtaggtaaatagaaatctcaaactgatattgatactttcaggtatgctttgacattgagttacaaaatttgaacgaatagaagggagctactccaactccagtagtgaatcttccatgtacatttaattatcagtatagatctttttgtcc

SEQ ID NO: 5492 - DNA, 2300 bp, Homo sapien
gattatatgatggtacaaaagtgatactcattcagtaagctcctcaacttatgacggaattatgtcctgataaacccattataggttgaaaataatcccaaatcaaaagtgtgtttttagtaatattatgagtttatccaggtgtgaccccattataaatcaaagagcacctgaatttctggaattgcaataggatggaataagtaaagtgttttcgttacgatagtgtttttaaattatcttttctgttcctcatatacccctcatatatgttaaaagttgatcctattacagtgaattccaagagactgtaaatacttgattatatattgaatttggggggttattttggagttagagtctcactctgtcacccaggatggagtgcggtggtgcaatctcagcacactgtggcctcaacctcccaagctcaggtgatcctctcactcaacctcccgggtagctgggactacaggcacatgctaccatgcctggctgtttttgttgtgtgttttttgtagatacagggttttgccttgttgcccaggctggtctggaacccctgggcccaagcaatccgccagccacagcctcccaaagtactgggagtacaggtgtgagctactgcacccagcctatattgaattttgtttcagtgactgtctcatttgttaggaatgggaaatatgtctctatgatagacatttttgtttttagattttattttgtataaggaaattgtaatgatctgattgcagttaagaaaaattttgaatatgggtaaatattattaaagtagaaatgtatcattttaacctgatggaataatcaagaattttttagtttcctatgagaaagtatatctacctccagtgaggttgtttaacaaataatgtggttattttctagcttgtcactaagggtgaattctctctctttttttttttttttttttttttttttgaaatggtgtctccctctgtcacccaggctggagtgcagtggtgcaatctgtgctcactgcaagctctgcttccgggttcatgccattctcctgcctcagcctccggagtagctgggactacaggtgcccgccaccacatccggcaaattttttgtatttttagtagagatgaggtttcactgtgttagccaggatggtctgcttctcctgacctcgtgatccgcccgcctcggcctcccaaagtgctgggattacaggcgtgagccaccgtgcctggccgggagaattctttttatcagtattttcatgatcttttttgaaagtgatgattatttgggaaagttactttgtgttatataaatgagtgtgctttgagtggaatcgtgtggagaaatcatttgtgaacagaaatggtcagatggatcttgtcaaagggctgacactcttcaaaatatttcagtccagtaaagtcaatacatcatgaaagaggcttcatcacactgcacatgagaacagacatcctgacaagtggactggtggtattcaatgtccagcagagtcccattaaaatatggatttaagaaactgagctttagtgactgtagtaccatgacagtttagggaaatactgtaaattctgcagttgtattctttatatactgaatatccctatatattctacatccatatacttaactctttatattgatatacataaaatcatatattgtatgttttatggacaatataagagattgccaagggtaatttagattattcaaaattctaaccttacaggctgactctcaaacccactccctgaataagatgagagaccactgaatagaccttattgttggctgtgataacattttttcttcaaaaaagtagccagaactattttgccatgtgtgacttttttgttgatttggttacataccccctaaaagagccctgattacctcctgtcatggctgttaattttttttataggtaatttagttttgcttgtctcttaggtgttttatgtgttttcctaaagtttctcttgtgtgtcttggtgtgtatatgcagaattaaaccaatgtaaaaattttgtgtttttgtttaggcaactcagcatatctgccaccaaaaatgtaaagaggaaaaatgcacttatgctgataaatatacccaaacaccctggagacgaattcctgtaagtaacatttgctcttagcctcctctccagtcatttgctattttgatgttttatttcactctttttacagcaatctctaatgattttgaatctgtcatggctgttaatttttttgtaggtaatttatttttg

SEQ ID NO: 5493 - DNA, 2300 bp, Homo sapien
tatggctatagatgaatgtagtgaaggaagctggattaaactgcctgctctaaataaatctcactccctttccagggagtatggatgggacatactaatgagtttcaactgtgctcatcctaataagaacatgctgggagtcctctaacaacaattgcttgaattgctagagctgtttggattccatgggacctcaacatcttgatcagattaattaatccacttgagtatgaccatttttgggagggtgaacctccttagatctcagcatgaataggtaggtattagggaatagaaatcaagccatagagtatgtctggaggaacttggtgtactaaggaggacagaagctcaaagaggtacttaatgctcagagtgatgataatgataatggaagtcccagaaagacagacccaaacccacatttggatggaagagtataatcaggggaggctccctggagaaggtgattattaggataatgttgaaaaaatccacaataatttaccaggttagcgggatgggatgtgaaagtacaagagaaaactaagcaggcagagggaataagtaggacaaaggcccataaacattaaaatacttgaaatcctgatgcttttttagatccagggtttgtaaacaaaaattgctttgcctatagaagctcaaattattatcttttgtggaagatcaggagagggatatatgattagttttgcgcatgaagccagaagtactttcaaagcagacagagaccccaaactcagctatgcttttaacaaagaaatgactgcacttctttgagcctgtgggtcctggcacatgaagatatgtttagggtctttctccatcttctcacccagggtgggaaatctgacagctcctctctggagccttgtgacatgggggtacccaagaacttgttggggaggaagctgacaaccagacaagtggacagtccatcgctcaggacacaaacagacccaataggccaaaggagactaggaaagtaacttaggtcttgacctctgtgaaatcagagatgtagatagaaacttgcgttcaaatcagagcctagaaactcaccaactgtatgaaaagagtgtgggtaaaatgtcaaacacagggtcaaatttgatatagatgatcaatcaatgccaattaccttccctgccataatctgggaatcaaacccaggttccaattatcacttatactattcacctcccttttattgccccttaaatttacagtctttatctgtacagccagagccactcctgactgtagatccatgagacagccaactaaagaatttaaatttcccatctctacctcccttcctctctcttcctcctttcctttatccttcctccttccctctctcactttcttccttcttttcttcctctctccctccctcctccttccttcttcctcccttccttctttcttcttttctgatttgttttctttcttcccttctttctccctccctctcttccaaattaaatgaaccctgctgcaactgcctgaatactaagggcttaaacacatccagaacaagtggaagaaattaacattcaagggattatctcatttcaatcctcaaaataactccataaactagataataatatcctatccacattttacacttttagaaatattgaggcaagtaatcttgcccaagaccactcagccagtcagtggtggagctggtgtgtctaaatttatttaccctggattccgctgcctaacaatggaactgttgcatgtaccagtggctcagcagacactggagggacatacgttcccggatgccccatagcaatggcattggggtcaccaccttcagaaatagactgtgatgatctgggagcagtcctgggattgtgaatgttgctgtgaatatgagtggatatgaatcaccccaacttataaggtctgtgaccacaggcccaggtagctgagatgctgctctgagaggggggctcacctgatgtttccatgtgtctcagttaaaatccgtactgtattgtgaggtcacacaggaatgagatccacagaagggcatatgaatcacagctgcagaacaattccattttgttggataccagtaggcaagttagcttgaaaaaaactacgcttatgaaagggttggatgagtccattttgggtagcctgcagtgtagcaggatatttcttgtccttaattactctgtcctctggtgggaacagaaaatacagttaatccatcccattctgtcctcagagcagaaactccccttgattatttcaac

SEQ ID NO: 5494 - DNA, 2300 bp, Homo sapien
tgggaattgaacaatgagaacacatggacacaggaagaggaaaatcacacactagggactgttgtggggtggggggagggggagggatagcattacgagatacacctaatgctaaatgacgagttaatgggtgcagcacaccaacacggcacatgtatacatatgtaacaaacctgcacgtcgtgcacatgtatgctaaaacttaaagtataataataataaaattaaaaaaaattctaacaaaaaagtttttaaaggtaaaaaactaaaaaaaaaatttaaaataaaaaatgcttacagaataagaatatgaaaaataaaatatatttgtgcaactgaacaatgtgtgttttaggctgtgttattataaaagagtcaaaaagttaaaaaaattaaaaagttggtaagattaaaaagttacagtaaactaaggctaatttattattgacaaaagaattttttaaacataaatttagtgtgacctaagtttagagtatttatgaactgcagttacatgctaggccttgacattcactccacacactttctgactcatctagagcagatttcatttctgcaaggtttattcttagtaagtgccctatagaagagtaccattttaaattttttataccttgtttatggtatcttttagatatatttagatacacaaatatttaccaatggttacaattgcctagagtattcagcacagtaacatcctgtacaggatggtgtcctatgagcaacagactatatgccatatagtctaggtatgtggtaggttaaaccatctacatgtatgtaactatactgtatgatgtttgcacaactacagaatcacctaaccatttctctgaatgtattcttgtcatttaagtgacatacagttgtgtacgtgcacatatgtacacacacacatatatctctatatatggagagagaaaaaacaagtaaaaatataaatgtataggccgggcatgatggctaatgcctgtaatcccagcactttgggaggctgaggcaggtggatcacaaggtcaggagcttaagaccagcctggccaagatgatgaaccccatctctactaaaaatacaaaatctagctgggcgtggtggtgggcacctgtgatcccagctccttgggaggctgaggcagagaattgcttgaacccaggaggtggagattgcagtgagccgagattgtatcactgcactccagcctgggcgacagagtgagacttcatctcaaaaaaatatatatatatattttatatatatatatatatatatatatatatatatatgtatatgtatgtgtgtgtgtgtatatatatatatacacacacatatatatacatatatatgtcagaaaaaatacatgtgcaagggtctttattattgtttgaaggccatggggttagcaaattaacttacttcctatcaaagttgacgttcttgctataacattagatatgaaatcagaactagaagggctttaaatgcattcatacttcaattgctattgagtgaagaaaggttgaattgtgcatttttcttggcaactgcattcatctccagggaagctttctctatcttttctcagtcatgtttaaaatcaaggctgtgccactcctacttaaataaacaccatcatcaaaagatgccatatttcccgctccgattctttttcatgatcatgggcacttgaaaggtccactgtacatgtttgaggttcatcttttatggagaatgacaacattgcagcaaatttattttgctttttaaattgacataattgtgtagtagcaaagagagcatgtattttggaattagatcaaggttacaatgtgaaccagctttgtaaccttaatcaaagtcattaaattttgtaagcttcatatataatctgaagatatctgtcaataaagcaaggtcagtgtgtagatttaatgcaataaaatgtgaaataatccacggactaccatttacagaatgatcactaaaagctgcaaagaaagaactcccctcctcctttctttgctctcttgctccatgtataaaaacatacgaaaatgtgggaggaggagccaagatggccgaataggaacagctccggtctacagctcccagcgtgagcgacgcagaagacgggtgatttctgcatttccatctgaggtaccgggttcatctcaatagggagtgccagacagtgggcgcaggtcagtgtgtgtgcgcaccgtgcgcaagccgaagcagggcgaggcattgcctcacctgggaagcgcaaggggtcaggg

SEQ ID NO: 5495 - DNA, 2300 bp, Homo sapien
tgatgttgtaattttcttcataaaacacaatataatctgtgcacatgcaatttagcagaccaaattttatgaaaattgatgacgattagccaaggacattctatcagtgaaaaacaacaacaacaacaaaaagattgactacctgcatgccaggttctatagttagcattaagaatgcaaatgtgagaaaagttacagccccatctggagggggcatgatattatgggaaagattacaatgggacgtgtccattctgacacgtgttctgtactctcacagaggttcaagaggtgtcactggcaccagaagccctccatcctcaaccccacatgttggtggtaagggccctggagagtctttggtcatgcagagatgatacagaccagttttatttgttttggttctctctgtttgtttgaacttcacagtactcactgttatcatgggagcagagtgagtcatggctcaagtttagctcagagtggtacattttagccaagcttgtgtgtgtgtgatatatgtgtgtatatacatatttactaatatatagtttatatatgggtgtatatatactttgtgtatatatgtatatttacatatatgtacatatataatacacatgtattcatctatatattcatcccatgatatatgtgtatatatatgtataaaatcacacacccatcatgagatgtagatattaaaataatgcaagaatatacatatatatgtataaatgtatgagtaaatacacacacacacactctcacacatatgtacatccccttccccttccagttgtacaattccctcctgattgagatttctactattattttaatacccacacgccatggtgggtcactggggcatcatccagatgggcagtagaggtgagcctgaaacgtaaactttaccccaccatttgacaagttgtctgtgctcagaacctcatctgggatctaatttgctaaactgaaggccttaggcatttttgtaatgcagcatatggccaaaagaaatcaggttctttttttttttttttcagttgaataaggctaagaagaggaactcacccaaattgaacatcagtacatgagaggaggataaaaaaaatccaaagctgtgcttgcaacctaggcacagagaggtgtagacaaagcctctgacacaaggcgctctgatgaccaccaggggcattctttaatgcgcaggcaaatgaagaatgatgcagggctgtgccagagcctcatcaaaggcagaggtatgccaggcactgagcttcagcacagagactagcagagcttccctacatctctctggagccctctcagcatggaaacattgcaatgggatgagaggaaagaatgtaattgtacctcaaaagaggtgacagttacaggtaggggctgtgatccctggaacagattgcccaataaaagcaaaggcagatttcaagttgtctgatcctgaaaattagaaaagtacatgacttagctgatatcactcttttttctcccattcacctctggtggcctcagaaagcccataacctctaatgtagttttcttttccaaaatttctccagtttcaccccgaccttcttccacaccacccttcctactagctcctggctcacctagtgcagtacgagtagtgctggaatcatcctctccacattggggtcagtctttcaatcatcttccttagaattgtcccttttatctgttccttctgccccaaaccctggtaacattgcccgataactgaagttcccatgcaacttttgagttttgtccatgactagtgggcatagaaggagattttctatttggtggccaagtttgctgacaagatcagctgcctttagcatttgtacgggactttaatgagtaaggagggatgtgttgtgtggagaaaggaagaagggcttccaggcagaggaagcagtgtgcacaaaggcacagagatacagagagggcaccagggatggaggcagcatgagtaacactgaggagacagagcacagtatgcatggggagacagtgggtgatgtgtctgtaaagttatggcatcataaagaaaagttatgacatcatgaagaaaagccaccctgggagcaaagcaagttagggttgtaagagacatttctgagattaaagcagccagatctatgatggggtgggtacgggtggttaaagagaaacagaacgtgagaatgactcatgagactattaaactgacttaactgaaattttaaaaaagggggaaataccaactacgatgcaccccccccacc

SEQ ID NO: 5496 - DNA, 2300 bp, Homo sapien
gcagctaaaggtgcagccttcagaatcaccccaagttctagctatttcgcttctttcagccttcctatctgcaaagtagggatgatcattagatttaccttgttcaatggttgtgattgctaaatgcaacaatgtgcagggtactcagcaaagttgctaccacagtgcaagtgctccatatattttacctatcattatcatcatcttcaacatcattaccattgcagaccccatgtgcttagaattggcccagcttctcctggcaactggacagagaacagcatgaaccaccatggcttcttgcaccacacttcgaaaaaggaaatattattgctccaagatcctgcccacaagacccacactggcatgtcagtgagactgtgatcatcattgtgggcaccatcatagttgcataacaacaattggccattggattgcacaatatggcacagagagccacctctagggagtctgaaaccccatgtccatgattgaaggtgattttgagatgtgggaagagcaagcaggtatcaatgatgaaatctaggtgctcagaaacagggcaggcaaaacaattgcatgaacccacaaacctccacagtgtctgtaatgtgtagtccacttttgtggcactacattttatctcagagatacaactaatctcagtctctttatctgccaagtttcctgaatccttctttccaggatgaataaatttcctggcaaaacaagacccaggggaaagttttgaatccatataataatatatcactgcatttgtcacgaactcttgattcaacagaactgattttgtgcgcttagtccttgccctggggatagaacatgaacaagagagaaaggggcctgctctcatggtcttatcctttagcaagagagataataaacaggtaaagacataaataaataatagaccttcggaggatggtaagatctacagataaaaatataacagggtaatgagctagagaaggttagagaaagggaggattgctgggaagatggaaggggctgcatgtggccactgggaagatgtaaacatttgtaaccaggtctgttgtgcatggaacaaggacacacaaacagggtagtatggagaaaggacaaagtgacatgtgctggcaccaagaaggagctccagaaatgatgggtgttatgttagaatctactgggtgtcatcaagggtgacccaggtacagatcctctggactcggggggaaaaagagccagacaattagacaaattggaggcaccccttcccaggagacggcccttttgagcaagctgccagtgactgtcccctacattcagagatgctgctgcctgagctgccaggtttcaaatgcaaagggctggctgggaatcaagaggcccttcttctcacgttaaagcgtagcagtctgttctgttctcctgtcatgtcataaataaaggagccttgatctcataaaatgggcatctctggctttgttgtaagtgaagtgcctgaggacagatgattgtagctgcacaggataactgaacatagaggaatgcgaccacctcagtgtaccagggagtgctctagagaggagtagccagcagcctccagggtgctccagaaacctacatgaaaacgaccaggccagaacatctggtgaggtcagagctgagtccatgcacctcagagcttttgttcttcctgactaattgtgctcctgctggtgtcacagatcagagaagaggtgccagggacatggggtacaggaagcacaggttaactagagcacattcgcacacaagcacaagaaaagcaattaggaaaggccagcaggcgatccacctggccttcagcctcttctctcggtgtcttcccagggtctgggaaaggtttgcctgtttcctgtgaactgaatcacaggcagctctaaaggcagggagacccctgaaatgcctgactgagattctgggaggagattcttaaaagtgagtgtcagcattaatagctcagtgtgattctcttctcaggaaaatgttcacaaatttcattttgctctcaaaaggaccgatggcccccaaaaaccttcagagacagagctcttacgactttactgtgccagatgtcatcccaagtccagaaaccatgtctcaggggaggaatctttttactgaaggggcatgaagaggggaaagaacactggccctgggtccagcattgtatcagctgcttcacatccagcatctaatgcagttgccccatctaatgctcaagctgtaacgctaccttagtttctccaattaac

SEQ ID NO: 5497 - DNA, 2300 bp, Homo sapien
tggctctcagccttgtctttgtcttcaggctccccaccaggcccctgccctcattctctcagctgatgaataagtggtctgtgttgctgggaaaattgagatccttaagggtgaactccttcaacttttctctgaaaatatccctttatcttccctcattttttccccacctgttgccaagatttcagatatcacagttttcaacaagaccttgctttgtcaaaaagcctcacccaaacctgtgttgccactgagtgtccactgtgtctttatgtttaccatccaatgttccatcgttcctctcctgagtcccctacaacctccctatggcccctctgggaagagtccactccttttaatggaaattggaagttgctgatagtgcttatcatacctccttctgaaacatcctcctcccttgatttctgtgataacacactcttaatgtttgggtggctacttggggtattccctttgacccttttcttactccactctctcttcactgaatagatttcatccaaagacatgaatgcaaataccatccatactctgatgattccaaaatcaatttccgaatctcagatcttaactgaaaactagagatgtgtacttatatggcaaaaatgatgtgccaagaaataaacccaggctcctccttctaaacctagttttttgggggtaatccttgttttaaagacattaaatttgatcgaattacccaaggtagaaacctaagaattatattttaagccaggaatggtggctcatgcctataatcccagtgctttgggaggctgagacaggaggattgcttaggccaggagttcaagatcagcctgggcaatgtagcaagaccccatgtctacaaaaaataaaaaataaatatcacattttatgtcttcttttcaattgctctcatacatatgcccaattgatattaaatcccactgatttaatttcacttattaattcactcaaaaatatttatttgaaatttcctccatgtgaagtaagtaatttcagctgtaataatgcacagtgccagggacaccatgcattaggtacaacataatgaccctgtgagtcatggtgctacgccatgactataataataaagataatagggatatagatataataataaggataataataggtaatagggcctgcccttatggctcttaaaatgtactgtagggacatgaccataaacaagatcagcatcaaacaagtgaaaaattgcaagaaaacatcagaaaatgatgattgagccaggaactgaagaatgagggaaagagaaagaattgaatagaagtcaaatggctcctgcacatagtactgtaggcaaatgcctcaggcaggagcatcatggggcataattgccaccaaaagaccagtgtggctgaagcagaaattggaggaaaactgtgcaaaatgagactggaaattaggaggaaagcagaccatgcagagcctagaccacataaaggagctatgtctttgtctgttctaacagcattggcaagacagtgaaagcatttgcagatattcagcatgagagagagaaaaagaaaagcgaatttgaattttgaaaaattttactctggtcacagtgtggcaaccagcttggtgaggagcaagggtcgaggcaggagaatgttgaggcagcaatggcaatatctctggcagaaggggtggtggtctcttgaatgagtaggaaggcaactgggcagaagacaggtggatgggttggtgagttatttaggagataaaatcaacacaatgaagtgttgactatggaagattaaggagaagaggacatcatgtcaggttcctggcttttctaagtggacggatgatggtctccttcactgacttggagaatagaaaaagaagattatgcgatggaggacagcactggggactgtatcttaatttcaattttgaacatattggtttgcagggactttcagccttccaagaagagatatggattacaagtttgaaactcagaggaagatgatgctgcatatgaacgcgtgtactgtctgtatatagatgataagtgatgtcataatgtagatgagaatgtctagggagaaaaacttgagtgaactgagaagacagacagcccgtgaccaaattctgagaactccaaccattcactggttgagtggaagagaacaagctcagaaaataaatggagaaaacatggtaggaggagcagaagaaaaatgaggagaatgctgtctcatggaagacaaggtaagagagcattgcaagaagcagagagtgat

SEQ ID NO: 5498 - DNA, 2300 bp, Homo sapien
cattcccagccatcaggaggccatgctgtactggacccatgatgctgacacatcttgggaccccctcagggttgtggctcttgtctccaccagacacaagcccatgtgtgggaattgagcaagacctcatgtttgtggtcacagctgacctggaatgcaggtccagggtagagatcacacaactgtccagtgggcagtgaatttttcctggctataaacaactgttgctctctaacgacacatacccagagaactcagagggacctctactgatgatatcagtcgaaaatatcaccatggatcaggcttaaagagctccactccccaatgaaagcttgggtgtttggggtctgggtactaccagctaccactggctctctgttaagacttctgggttacagacaaaataccacaaccaaagaaaaccacaatggggagtatagaagcagcatgggttgtcccaccattgcacacatgatgaaatcgaaactgcctctcatgccccctcagagcctgtgttctgggctctgccttcttccctgtcctcacctaatgcctgctcccatatcacccaatagtctcactggccatttttctgcttcttaaatgtgctaagtgctaccccagacatgactttcacatggggttttagtcttaggaagtttcttcctcccccaagttgaaagccaaccctggcagcctcataatgacttttggcaagacatttcacctctctgtgccttgatttccttctctgtaaaatgggaaaataggaataaccatctcaaaggactggcatgcaaatgaggattcaacactatttgccaagcatggaggatactccttggcactagaacatgctagacccatgtgagctgttttataattagtcatccttcaagcttccccttacatgttagctccttagtgagggtttctctagtcctccagtggacagcactcaccatgtggtgtttcctggaacctctactttgattcatttttttaaatcacagctctgcctgcactttgattgagctaatttttttagggtcagtgattgtatctctagaccataagcttagtagtgctgaacatcatactaggcaaagcacagaagatcctcaaatcaaatgactgtaagaataatttggtgaatcccagtgggagagacttaggatatagtaatgaaagctcaaaagaaagcattttcatgatcaggaatatcctaaatccacaacctaaatgtttgcctctttcatgtctatttcctagttttatcttgagctcttgccacagaatccatgtaatgggccttatgtgatttgctgttagactttatccttgggcagtggaatagggtgggagagggcagaggggctgttggggaggggagtgacaaaacctaatgtgcgttttgggaataacactttacctgcagtgtggagagtagactgggaagagaagagctaaggcagaaagctgctaggatggctcaatgttgtctgtggtggggccagcatggtggggcaggggccagggccccggtggctgagttgatgacgtcagtggctatagctcaccttgattgtgtcttacaggatcctggagctgcaggacacaggggacctggatgtgctgaagcagaagtggtggccgcacatgggccgctgtgacctcaccagccatgccagcgcccaggccgacggcaaatccctcaagctgcacagcttcgccggggtcttctgcatcctggccattggcctgctcctggcctgcctggtggctgccctggagttgtggtggaacagcaaccggtgccaccaggagacccccaaggaggtcagcaccctggggcctgccctccctttcacagcctagaggcaggagtgtcacactgggccattgggagggcaggttgtttctagttagtatttacctgagtcatcttgtctggaggcagcagtgttttatattgggggattttgttattgttttattttgtttttaaaactagagaagaaatgtaggggatgttttcatgcttgaacaaagtgctgcagtaccagccttagccactaaagtcctgtatttatctatagagcaggtacagcgtgggcagcgccagagagcccttccctaccctgccccgcccatgtgcctccaccctgacctggagagaccacctgtagggtaagagaggagcccattccttcctgattctcttttacttctcaccaagggacacagggcgctgctctcccagcgcatcaggggatccctgtccctcccagcactcc

SEQ ID NO: 5499 - DNA, 2300 bp, Homo sapien
tttgattatatagagttagaggatatgctccctactaatggtgcctgtgtgctatgagatgatgcacagctacaggcaatgtccctgggttgcccctgtccagaccaggagtcctcaaactttttctataaagggccagataatagatattttaggctttgtgggccacatatctttatcacaactactcaactctgctgaaatagcaggaaagcagccataaacagcatgtaaataaatgagttgggctgttgtccaataaacctttataaaaacaagctgtaggtcagatttgaccaggagtcagagtttgccaatccttggtctagtctttccttaggcctgataagtgcatgtggctgagagaaacggaagcagcctctctcctctctctttgtgacacatctttcaggaccaggaaaatcttctcccttacagaaggttatcaagagacaagcctgacaggaaccctggagctatttctcttgtcccttccaccatgaaatctaaagggggtaacctgctaactgatgacaggaatcttgtctccgatttatctgcctctgctcagtcagacagcaaacagatgactcattcaggaacaatcctgtatttattgagacttactgggtgccaggcaggtttgttgtgaaaatggtgtgttgtcgtctcttaataaataaaaattccctcctgttccaaattctttcatctttgcctcatcaaagcctgacaaggtctcacttgtccttatcttagtggccactggcatggtaaatcctttatttgcatcttttgctactgattttttaacattattgtattcatgagtaagactctatttccagagggttagtgatttcctaagtgccaccaatggacaaggagtagctagaaaaataaggaagtgtttctctaatgactcatctccaggtttattaccctccagaggctcaatgatgtgtattggcatgaaggagtggatctcagaggcgagccaaccatgacataacccttctccagttctgataccgtggacaagtgatcactctaaacaattccccacctaaattggtttcatgtcattaaaagccttaggactcccaaggagaaaataacagcataccatccataccaacctccttgacttttgcagcaattagacattgctccactaccaaacactccctgaaaatggagctgagtcatcaaggagcaactgaaaatcagaagtgtgattatctgtcaattgctaaagaagtttccaggagaagcccctcggtgggcttctcctcacctttgccaggctgcctacactgcatggcagcagactctgtttgggatttggagaggctgttcctccctgaatactaggcccataataccctacttgctggatttgttctgtagtttctggattcaagtcgtcatcctcacttagggcacagccatctccagactggtctgctctctgggctcagggattcacaaggttactgaagccatagtctgggggcagggagcagaggggccgctccataggagtagggaagaagacagatttcagacaagcatttaagtccagtagtcatccaaacaggcacacgaagaaggaggatttgagagtaaatctgagcttttcttccactaaaaaaaatgcagcacacttcattgtctgacaatactataaactcacttttatgacactagttataaaacccttaacatttgtctagtgctggcagtcagttttttttttcttagagatccaaatgcaagagagagatttgtgatcccaaagccagcttggggttcataaaatgaaggtaccataaaactaatccatcttatgtactaacaaagattaaattctataccatgaagtgataggcattgataagaaatcctttgtttgcatcgtttgctactgattttttaacattgttgtattcatgagtaagactaaatatcaccagacggtgagtggtttcctaagtgccgccaatggacaaggggtagctagaacaatgatgaggtgtttctctaatgactcatctccaggtttatcaccaaccagagggctcagtggtgtgtgttggcctttctgaggcataagcaggcacatgtcgcctgcaaagagggaaggggtgggtacttgtgaggagcccagcactgccttgcttggtctggacttacgcatttggaagagtagggaggtgagcagaatgagattaatgacaacctttgcttcaggatacccatacatttctccaggaatggctcactttttgaattaactc

SEQ ID NO: 5500 - DNA, 2300 bp, Homo sapien
ttatttctcttctccctacagcatttcagccagtgaatggtagaattttgcaggaataagaattagaggtgtagagggttttgagatgcggggtgggtcaggtttcactactcaaggaccctaagacaggtttttggaagaagtgtgtgtgtgtgtgtgtgtgtgtgtgtgtgtgtgtgtaggaccacattcagccactcccatgggcaagtatgacatatgaccactcctctcttcttgccccctggcctccttaacctagaagtcaccttgctggctcatgggattccttgatacttctgcaatccagcttctccgctccaacaggctgtccctgcccagctgagctggcccacccagggttccctcacagtgctatgggcctccactggccccctctgcacagcccatcctctccaatctttctttccaaagtgaaatctaccaatgcttactctttggctctggccacatgagagacagacagacatacagacacacacttctttctttttgccttggctcaccactattcaatgcctggaagccttattttctcccttgggaacctccactcagtctttacaactgtcatctcctccaggaagtcatccctgctcttcttcccaggctggttcagagcccaggcatctgagcatacacagctcattcatagccccccccaacatttaaaagatgacttggttgggtgtctgcctcgcccactgcgctgggagctctgggcaagggctgtggtgggagcctctccccctggtgcgtggcgggagtcctggggcccctccgcggacaacagggcccggggacgttcccaggcttgctggaggagcagcttttgaacgaggctctgccaggtcccagaccccaggaagctcagctgtctcctcgaaatcttgggggtgccacatggagcccagtccctttcaggcacgagcccacaacagcttaacgctctctttggtggtggccggcccgaggcaggcaccggaggcggagggagccctgttccgctgtggccgcgaggagcgggctcttcgcccgggctcgcacatgaaagctccgtgcagggtcggagtctgagcccgccggccgcttggaaggctcctcacgtccaggcgccgcggtcacggctgcgctggtttccggccatgaattgggcttcagagtccgagcctcttgcccgactcccggctgagcgcgctgcccatggagcgggggatgggcgcccgccgaggtccgcgcggccagccagggttcgagcccacggcccgggctctactctgagatgcttgcggcggccggccccctctggctccccagctgtcctggggcctggcccggcgccccgccccggtctctcttcttgctccccaggtcccactccacgaggaacggtctgtttcggccggggacatgacccgagacgcgcggctgctgaggtcgccagggcgcttcgggagcccctcgagggcagttagcggccggccctcctccattctcccgcccctggcgaaccggagaaggaggcccgaaccgtcagagctcggcgcgccgcagcccaggccggtccccgccgctgtgccggtctccgagcgtcccccgagccgggagcgtggagcacccggcgccccctccgagccgcgagcgggcgagagccgcgcggcgaggctgaggctccgcagtcacgtggtagagaggcgggcggaggggagggaggcgggcagggaggggagggggagcggagctgagggggagggggaggggagggggcgtcctccgcagttcgctcctcgccggggctcagacacacagccagcccagagccgccacgccggcccggccgccgccgccaccgcctcagcctcccccgaagccgctctagccgcgggaagcgccgctgccacagccgcgggccgcccccgccgcgccggcctgggctcaagctgccagcaccgccgcagccgccaccggagccggagcgggagcccgaccgcgctgggctgggctgggctgggctggggcgggcgcagggcgcaggggcgggcgcgcgggggaagacgcacgggcgggctcggctctcccggggagcggcccgggactgcaccgggaccagcgcctccccgcttcgcgctgccctcggcctcgccccgggcccgggtggatgagccgcgcgcccgggggacatggaagcgctgacgctgtggcttctcccctggatatgccagtgcgtgtcggtgcgggccgactccatcatccacatcggtaagcgcggctggaggccg

SEQ ID NO: 5501 - DNA, 2300 bp, Homo sapien
gacctctctagttcagtccagacaagctttgatacttaagtgcttgtggtagttctcccacagtgaggaaggtgcgtgccagtggcaggcatgctagtgacgggaaagatccagttaagtcactcttccttccggggccctcctttcctttacttatctgtgaagagacatataggagacataataggattttttcagttttcagtttttgagattgttttttcagcttcactttaaacttgaagatctattgtcagattacagtaatagttctcaaagtgtaagtactagatggtaaacacagtaagaaatatactgtaggctggtggctcacacctgtgagcccagcactttgggaggctgaagcaggaggattacttgaggctaggagtttgagacaacaatctagcaagaccccatccctacaaaaaatataaaaaattagcctggcatggtggcacaagcctgtagtcctaggtggttgggaggctgaggtgggaggattgcttgagctgaggaattcaaagttacagtgagctatgattgtgccactgccctccaccctgggtgacagagtgaggccctttctcattaaaaaaaaaaaagatactagaggtaatatcttcgctaatcatacattattgagtatctactgttgtcagaatttgtgatacaacttttgccatttatacaagttctgcaaaatagccatttgtaactttgtatcactaaggttatgaatttaagttcagtccgccctccatacatgtgggttccacatccacagagtcagccaaccacaaatcaaaaatatttgaggaagaaaaaataatacaggttagtaaataatatagtataacagctatttacataacatttacattttattaggtgtcataagtaatctagaaatgatttacagtatgccagaggatgtgtgtgacttatatgcaaatactgcaccctttcctgtcagagatttgagcctcctccagttttggtattggagggtgctggcatcctggaaccaataccccttggatgcagagggacgaccatatgttcagcttcacatcagtaggaagcaagccgcagcaacgtctcgttctgagccttttctcctgttactcccactcctccccaaatctgatcaccattagttttaatattgtaatacttgtcttttcctttttctcagttactaggttttgatgcatttcttttttttttttttttttttggcgtaataacatttttggttttttagcagtcttttaaaaagttacagctttattgagatagaattcacagactgtacaattcatcctttaaaaatgagtaattcagtagtttttcatgtattcacaaggttgtgctgccatcaccactaattccaaatattgtttttatcaccactaaaggaacccaatacccattagcagccatcacccctattttcccctcctccctgggcactggcaaccactaatctactttctgtgtctatggatttgcctgttttggacattccatttaaaaaggagtcatacaatatgttgccttttatgactggcttctttcagccagcagaatgttttcaaagttcatccgtgatacagtatttgttaatactgtattccttagacaaataatattccataatattgttataccatagtttatttgtttactgatggacatttgagtggtttctgctttttagctttttgaacagttatctacaagtttttttgtagacatacattttcatttcttttggatttatacctaggagttggaattgttggattgtatgtaactgtgtgttttaacattctaagaaaatgccaaattgttttccagtgtggctgcactattttacattcccatcagcaacgtatgaaggttccaagttacttgtattgtaaaagaaaatttttagtcatcctagtgggcgtgacatgatatctcattgtggtttgatttgcagttccctggtgattaatgatgctgaccatcttttcatgaactcattggccatttgtgtatcttgtttgaagaaatctctaagtcttctgcccggttttgtgggttgtttttgttgtttttgagacagagtcttgctctgtcacccaggctggagagcagtggcacgatcagggcttactgcagccttgacgtcccaggctcaagcgatcctcccacctcagccttgcaagtagctgggagctacaggcgtgcaccgccacacccattaaaggtttttgaattttaatggagaggaggtctcactatgttgc

SEQ ID NO: 5502 - DNA, 2300 bp, Homo sapien
gaatgtttttatatattatttaaagcctgaagaaaatactccattgacgtacttcaaaaaataattgtatcagtttggaaatgtctattatcattattattttttagttgcatcctgcaaatttctaacatttaaagaagaggccggccgggcacggtggctcatgcctgtaatcccagcactttgggaggccaaggcgggcggatcacctgaggtcgggagtttgagaccagcctgaccaacatggagaaaccccgtctctactaaaaatacaaaactagccaggcgtggtggtgcatgcttgtaatcccagctacttgggaggctgaggcaggagaattgcttgaatgtgggaggtggaggttgcagtgagccgagattgtgccattgcactccagcctgggcaacaagagcgaaactccatctcaaaaaaaaaaagaagaggccattaacattttgatattgggggattatggaaacaaaataattacagagtatgcatttcaaaatctcacagtatgaaacctagaataaaaaatgttcagagaggttccagcatgttcatagcgtgtgtacagatggcttctaatgttagctaaaagtattctattggtaagtatcgatgataaatactaacttacgtttgtttcttttcacctagtaaaagaatgtgtggatcatttaagtagagatgaggatgaagagaaactggtagcctcactatggggagcagagagatgtttacgagttttagaaagtgtaagtatggatgactatttggcaaaaattattcagtcttaattgtgattgtgtgtgtaagagagagactgccaaatattttatatacccctggaggttcacttctgttaatccagatagaaatagcagtacattttttgagcaaccagttgttaataaacaagctaaatgagtagttttatattttaagagtacatgtattattgctgcaaatgaaatgttaggcttgtttgtttacatatgccaatcttttttaaagattttattatttttattattattttttgagccagagtctcactctgtcacccaggctacagtgcagtgacatgatcttagctcactgcaacctctgcttcccgggttcaagcaatttcatgcctcagcctcttgagtagctgggattataggcatgtgccatcatgcccttctgatttttgtatttttagtagagtcggggttttgccatgttggccaggctggtctcaaactcctagtttcaagtggcctgccggcttcagcctcccaaagtattgggattacaggcgttacactttgctgggcccctccaatctttattgttttttccttaatgtgaatttctacttgactacattgtttgtagataacaatagtgaaatgcaatcaggttttatttttaaattgttattagcattttgtttatttgacttttatttgagtcagattgtttataggcatggcctgtcataatatttggctttggagaatgatactgttgaactgcagcgagtatattttgttctttgactcttacgaaagacttaacccagttccgtatagattagaatttatactgccagctaatttcaggatgcataggtttgttcaccaggttattttaaaagtagtatagtataaattaaaagctcctggcatagattaaattgtagcgttccatgtgtcttctagagtgctttgggcacagtagataacagatacttctttgtaaaaatgtgttctaaatgaatctacttatgaactttacgttatttgtaagttgaggactgctctattctgacattcagtgtgtttggcaattcgttacagtgaatatgtagtgtagaatatgttaattatgaatgaatataacagtgatgtcttaattttttcataaagcattagctttcttattttacacctggaacctgtaggttgtgaaattattccctttggtaacaagggctgtttcttcctcatctttgtatcttttacgcaccaggcagaatgtggtgttacatgaatgaatgaaagttttggattgccacaattatttcatattcttcctttttaggtaactgtgcataatcccgaaaatcaaagctacttgatagcatataaagattcccaacttattgtttcatcagctaagtaagttttttgtttattagttaacaactaacattgttacttattttaaacatttggattgaccataaatgaaagaaatttggattagcttcctccatgaaatgctctgttgagttctgtgaattggttca

SEQ ID NO: 5503 - DNA, 2300 bp, Homo sapien
aaactacttcacactcttgtgctactaaaattcttttgactctgtctggtttttctgtcctgtccctttctgcttatgaaagctatttttgcatgcagttgtggttctttagtctttctaatggtactagagacaaacgacaaattgtgtgaaataaaaagtttaaaaaagaccagaagaaatccttgagtggttcttctgtgtgcagatatacatatgtcttacctgttagtgcatggaattcaaagtatttctaaagacctttgagaggcctccctgctccctgctttttaaaaagctttatttacttttttttgaagctgaatttgccagatagatgagacgttcctatttttatatatttatttagaacaactaatttaatacctttattaataggtgaggctgtcttcaaaggaaccaaatcaaaaagatgatggagtttttaaggctcctgcaccaccatccaaagtgataaaaactgtgacaatacctactcagccctaccaagatatagttactgcactgaaatgcagacgagaagacaaagaagtaagcagccatatacagtgtttactgcatgttgatagatttttgtatgtaacatttagccatttaatatcttcaacaaatatcagtatactgatactcagttttgaaccacaaacttcttttgtcctaccatcatccttgttctaaaaatatttttgttgccatctaatgaactattttatgcacttatgtaaagtacagtgagcccatagatttaaatatgctagttcctagttaaaaaggggtgaactttttttttcttggcagttatatactgttgttcagcacgtgaagcacttcaacgatgttgtagaatttggtgaaaatcaagagttcactgatgacattgagtacttgttaagtggcttaaagagcactcagcctctaaacacacgttgccttaggtaagatcttatttttatattttacaattatgtgcatgctgtattaaattttttcaactaggtgttgtccaaaaagccaaacattttttattttgttatgatggggtagtatgtatagccagtgatatgttaaaatgctatccatttctttataaagaatttgattctgcatgataagagggaaagctgggtgatgagagcctttttaatatagcataggcttcagttttcaagagcttaaaaaaaaaaaaaaattacgctaaagcatctttttgccttgtgtggtggctcatacctataatcccagcattttgggaagccaagttgggaggatcatgtgtgtccaagagttcgagaccaccttgggcaacatagtgagaccccatgtctacaaaaaataaaaaattaatgagtcatggtggcatatgcctgtagttccagctacttgggaggctgaggtggcaggatggcttgagcccgtgatcatgctgctgcactccagcctggatgatagagtgaggtgaggccctgtctccaaaaacaagaaagaaaaaattaccagaaagaaataaagtaaataattaaaaaaaaatcttttaagttctttttacctctgatgttcaagtaataagttagatttatttaagcatattgtgatctggacgcttacatttgtacccaaatgctcaaaaagatgatcttttgtatttcctaatggattgattgaatactataattttgattaaatttttcagtcatttggagtatatccaatcaaatataattaattaattgtgatttttatcagaagtattaatgaaaggcagctcagattttaagcttttaatggtggtagtagtaacgtaaggaatgcactaaagacaattacgttatttttttaaaatacagtgtacctaatcatgcactaggcatcagtatatttttaataatgtgttttgcctatggtttttatattgtgatcatgtatgggcaatgctttgacccttttacccccttcctatttgctggttttggtattacacaaactcaaaactaatgtactagctgtttccagcccccctaacctgctctattttcttgtagtgttattagcttggctactaaatgtgccatgcccagttttcgaatgcacctgagagcacatgggatggtagcaatggtctttaaaaccttggatgattcccagcaccatcaggtattttttaagtttctgagattgagaagccttatgttgaaaactactagtctatttggctatcaaaaatatcttcactgaatattctataaatatatcctaattatagattgagttcattttatttg

SEQ ID NO: 5504 - DNA, 2300 bp, Homo sapien
ttgtcaaactttaatgtgcagcccaatcagctgggggaatcctgttaaaatgcaggttctgattcagtggagctggggtgagggataggaattatgcgttccttacaggcttccaggtgatgctacactgctgattggggatcattctttgagtggcaagaatttgacactactaagtttcattacttaacacaaccatcacataaaagccctcaaaaggcaccagtctaaacaataagcccttccacttcagcctcatgcaggcactgaccctgccaagtgtccagcactagagaggccaggcataatagacatatcctttggtcttgggaggatcacgacaccctcctacaggaagatcttgcaattgtttcctcacctcttctggttttttgatcttaccttttgcctctgatgataattaccctttaattaccacccaccaccttgtcatctaaataattatagtaagtgcagcctgcacctctgccagaagatctttaaacaaaatgataaaaacaagttcctaaactgccaattaaaaaaagagacaaaactgacccaaataaaacagtcatgtgcatcccacccacagtggaagacatggacttgtttttcatataaactacagaagaagttgatttattttgaaacaagaaaaagtactgattcagtatttaggaaattgtaaatgtcagaatataaattctgcagtcaggtaggcaaaacaatccaaccacactaaaatccaccttaaattcctcttgggaagagctgcagggtctctgaactatttttcctttatttggagtttccccgattataccggagggagctggataacttctgggtgcattaaaagcaaattatccatttgtgggagaagggcgggcttctcactgaaagcaattagtagttttctaatttcccaggtgggtctccattaaccgcctaacaaacaccaaggctgtcggagtccgacgaatcatgcacctctcttagggggaactggttgcgctactctttagaacgctgttttcccatggtagccttaaaaaaaacttaccaattttctgaattaggtaacacattgaatgggaaaaacctaagatagcacaaaaaggcgtacagcgaaaaattaagactccttcctcccgtcatccgccacctcactgtcctccctagaggcaatcgctggttcacttctttaaactttttattatggaaaatttcagatacacaagtaaagagactgtatgatgagcacatatgctcgcatcacgcagcttcaacgatgaaaaacgttctgccagcttgttttattcctctcccccagttttcataggcgtattttacagtcctgacaccagatcactctgtcaacacatcagtaggtcttaaaaaaaaaaaaacaaaaaaccataaccacattaccgttaccacacccaacaaagttaatgataattgctcaataccatccaatattctcggggccactttcaatcggtgaggggcagacggacttagaggaaggactgcagggctggaggggcgcgaaaaagcgaggggcgacgctgctcgtggcctcgggtgtccggcgcctcgcggtccccgccatcgtcacctacgccgggccaggaccgaccaggccaggtcgagggcggctcttgaccacgcgccccctgcctcccagctcccgggcggcggcctccgcaggcccggcacagctgcacagcccgcggtccccaggcaccggcgggtccctggaggggaagcgattgatacagctgcctgcactgcgccacccgcccggctgcccatctccgtggcacctgcgtctcccggctgggccgggagctagaagtggctgccgagaccgggagggcccggccagtcgcccgctcccgctcccgcgcctggtcctcggcccgcgacctcgcggacctggactacaactcccgtcgggctccgcggccgggccaatggcgggcgccggagcatgcggggcgcagcgcctgcgcggcggtttgagtaagcggctgcgcgattggctgcggggtcgggcggccgcgcggggactgtgggaagcggagtgacggagcgagcggctgttggaggaaggaggtgggggccgggagcgcaaatggcgttgagatggttcagggccctgttcaaactccagcactgaccattcaccggcggaagcggcggcgcaggaggcggcggcggcccagcgggggcacacagcaggctctgttaccagctccagcagtggcggccagcgagagctaggcctgggc

SEQ ID NO: 5505 - DNA, 2300 bp, Homo sapien
aattagcaggttggagagtggggtccacattgaatgggacgttgtgttgactcagaattgctcccagctgtgaggaattgttaaacccctacattaaaacgcaagcagctggcattgagcctagggacagaaagaaaagccggcccctcagcctcaccctgcccccagggtggcctctgtgagccaaagccctgaagtggaagagcctcaggaggaaggcagtctgagccatgggctggcagctgcaggaagtacagctcccgctcccagtgaggctgctcccacttctcctgctcaaacctggggctccaggagaactgtttgtaaagactgggggaacttctggaagaggagtgatatctctgtccactccagggctccaacactcccagcactgtgccaggacatggcccccacttaggatgaccgctgcccggtcgggctcccctaaacgcagcctctgtggcaggcctagcccgagcagccctccctggaagccgtgtgttcagcttcccttctctccagctcctgctgcctcctctaagacagggcaaggggcaggcccggggtcccctccacttctgacatccagtcaacttggatcaggcctgcaggcctgggtgagttcctgggactctcccaataaggttttaaaaaatctttatactttaaaaatttctgccgggcccagtggctcacgcctgtaatcctggcactttgggaagccgaggtgggtggatcacctgaggtcaggagttcgagactagcctggccaacatggtgaactcctgcctctgctaaatatacaaaaattagccaggtgtggtggcgagtgcctgtaatcccagctactcgggaggctgaggcaggagaattgcttggacctgggaggcggaagttgcagtgagctgagattgcaccattgcactccaggctgggtgacagagcaagactgtctcaaaaaaaataaaaataaaaaaataaaactttcttatcaaaaaacaagcaaaagccgcctcgtgatctgatctcaccctactgctacatcctccttgtgtctccatctgtgaaagggtgaccagccttggttctatgcagggtgactgtgaaaatgccatggctcatgggggccaaacatggtggtagggcccactgtgacaagggtgaggctgggctgcacaggctcagctgcccacaaacagctctgggggctcttgggatggctgaggctgctcttgatgagctcagggaagaaacacaacagagactggtcaaaggagaggacacagccttctgcccaatgtccaagagcccgagcccaggaatctcccttgaaacacacactctcacacacactctcacacacacacatgctctcactcactcacactcacacacactcacatgcacacacactcacacattgacaccactgtcagctcagaaatctcccttgaaacacacacactcacacacatacacattcacaccaccatcatcccagaaatctcccttgaaacacatacacactcacacacacacacactcacacacattcccaacaccatcccagaaatcttccttgaaacacacacactcacgaaccctcacacacacacacacacacacgcacacattcatgacaccatcccagaaatctcccttgaaacacatacacactcacatacacatttacgccatcatcccagaagtctcctttgaaacacacactttcacacactcacacacacacactcacacacactcacattcacaccaccatcatccagaaatctcccttgaaacacacacactcacacacacattcatgccaccatcattccagaagtctcccttgaaacacacacacacacacacacacactcacacatacacattcacgccaccatcatcagaccttcgtagatagacacccagagaccttggtctgagtgagctggcggcatggagcgactgagcatgtgcagctcccacatcgctatataaagatggggatgaactctgtggctgtgagtcaccataactgcgacactcactcatttgcgcttcaccagacacagagcaaccgccagccccaagagcagctccaggctggatctgcgccggacacaggagaaagcagcgggtaggctaagcaggggtgctgaggatggaggaaagttgggaggctgagcacagctgaagtcctgagctccctgtgcccttgacttctctgtgggctcgagcaaggaccatcccaactcaggatgaaccctccttcggggccaagagtcccgccc

SEQ ID NO: 5506 - DNA, 2300 bp, Homo sapien
tctgatgcctccagcaacttcacttcctctccttcctctgtccccactcttgggactctcactctgaggcccacctcaaactgcaaggagtacagcagagaagggacaaaggccaggctggcctccatccccactcactccccagtgagccattgaactccgcccagaccatgggtaccagctgctctctgactggcttcacatctcccgagggaggcggatggagggaggccggccttcgcctttaagagcactctcctgccacccctccctttccccagaggcgagcttcatcaggcaggagccagaggccagagagacagcgtgcagctccaggtacagcctcccccagctccctggccctgagggtgggtgccttccttctcccacactggttatgccctgctgctgagtcctccccagcctggcaggatggacaaacacccctaggaaagggcataaggctggagttagggatgaatgacatggggctttgcagagagggatagggaatggtatggggaagggatgctggccatggactgctggcctcctgggctgggctgcatgatatagggtgaaggaagtgattaagcagggaaaaggacacaggtcttttcctgacttcttccacttgatagttttgtgactttgggcaagtgacaaaacaaccccgtaatatgggtgatcctaccttgtaccttgcatgtgccaggccccaggagtgaggctagaagctgagaaatgactcacacccaggcctctactgactcctcagggtccaagccagacccctccaagagggccagcaagcagccaacccagttgcctcccctgagcctcagtttctccaaccaaggagccagggtgggccttgatctatctccagaccacataggggcctgaggtctttcttggggaaggggttggcccaaagaccgcactggcagaagtcccaaggtgctgaggcccccatccagaacacactgtctctggggtacaggctgaacatgccacacgtgcttccccctccctgcccctcctggccctgtgtctagcagctgagcaaatggcgtctcctcccttctccctgccccctgccattcctgcgcaaagggcacggggcctggcgtgtggcactggcagctggagctttccatgctgccgtcaagttttccagagcacaaagacaggagagccaggaataactggctgggcccccagagggtctggaggggatgggcctgcctcagacctgctttcagaccctatgccaaggggtgcaggcagagggccagctgcccaggaccagggctttgggaggcttctgtggctactgggagcccattatctggcatgcattctgtaggaatcagcccaggctccagtgtgacctgggtccactccttgtgtgaccttggagaagtcatttaacctccctgagctttgtctcctgcgggcccaggtggcagcttctcaggatcccagggagtgaagggcccatactgaggttggctatgcccagagctgctgttatgatgatcgtttttatggctggacaaccctgggccagtcacagaccagctggaggctcagctcaagccaaggcacctccagggccccatactggataaagcacaaccccagaatcctggccagggaccacacggcagcaaagcccctacccaagggagctcagcccctggtcttctgagcaagaggatgggtaccactgggcaggaagagcgagtgtctacgctctccagaggacacaggagcaaggagaccagagcattctcaccaaccaggccagttccccttcctcccccctggggggtgctgggtgccggacacccctccccaggggctatattagccgtgtgagtcatggtggaccggctgggaggcggcaggctggcaggcacagtgtagggttacagtccatttatgggcgcagccgaaggcagatatcagtgtcgatggcattcgctcccagctattcttaggagcctctcaagagctccacgcagcccggctgggcagcaagggacagaacaggcaaggctgggggtcaggggcaggggcagaggtgtggaccgggcaggcggagtgcctgagtgccctctcactcaaccctctctaccctttgtctgcagaggcggccgctgacagcaccagcatgtcttacagtgtgaccctgactgggcccgggccctggggcttccgtctgcaggggggcaaggacttcaacatgcccctcactatctcccgggtgagtgcaccctgccacagcctggcac

SEQ ID NO: 5507 - DNA, 2300 bp, Homo sapien
aaaaatccaactagactataaagagcataataacacgcttgccatggttttctctgccgacacattgctcagcatacgtcaatgagagctttgaccaatcaatgtgaatctccttaagcaaaaggcccatcttttcctttagaactaaagctggggctgggcgcagtggctcacgcttgtaatcccagcactttgggaggccgaggcgggaggatcacgaggtcaggagatcgagaacacctattaacacggtgacaccccgtctgtactaaaaatacaaaaagttagccgggcgtggtggcgggcgcctgtagtcccagctgctcaggaggctgaggcaggagaatggcgtgaacccaggaggcggagcttgcagtgagccgagatggcgccactgcacttcagcctgggcgacagagcgagactccgtctcaaaaaaaaaagaacaaaaaaaccccaaaaaacaaaaaaactaaaactgggtattatgaaggaaacttgagaaagaaaagtgaccaattttagttgatgcaagtaatctcacgtatcctcttcttcctgcatagcaagatactacaacccatgactgtcaaacctgagacagctgaagagcccagaaaaaaagattagggaagaaaacagaattgaaaaataattcagaatgacagaggctatctgcagcattaagggcaaaggcgggtaaaagaagaaaagggagacagaataaaagataaaccaaaaaattgaaacaaaatacacgggaattcaaacatttataccagaatataagggaataccctggaatctaaacacctcttcaggcaagaatgtgtgtcaatacaaatgcctggcacattgttttccttccccctttctttttacccagtttacccagttttaaaagtgattttttaaaatgcacctttaaaagaacatcttttgttaagtgacttaaacttgatacatttcttggattactaaggaggttaaagtcacatttggtgaaaaaggggcctatctcctctttcctcacatacgggtcatcgaatacttttaaaagcattttccaccatgaatgaggggaaatggaagaaaagaggtggtgacaattatttgcattttccaaatggacggaatgagcctccggagggtacacgaggtcaccagcgtgagcccgcggtggagctggaggcgtatttatagctggctgacctcagtcctgttgggccctcgccgctccttatcttatgccgctggaattcgcgggctcgcaggtcacaggagcccgggcgcgccgggcctggcgctcccgaatcgatgagggaagccgctctccccggcagatcctcccggccggggagcctccatcaccctgcctgcgcctcggcacgctggcaaggagcccgggaagagacgccgggagcggtgggtgggcgagaaacaaatgcaatgtgacttatatttttctttgtcgcaactaccacgacctggccatcccccaccttggtgacttggtgccttcccagcgaccttatttcacgccagctgactggcgttcaccgcagtgtgagtgtcggccggaggaggggtccacgcgaaagagcccgcgagagtggggatatccggccccgaaggccggagcgggcgtccagggcgccgatggccgcagcgcccggcagccgtgtccacgctcccctccgccgcgttccatcgcgtgctacctacggcgtctgcgggaagctacccgggcggcagctgtggggctggcttgtggggaggggccggcgggcccgcgcggaggagcagccccgactcccgcccgcaccagcagctcggcgcccccttgccggcggctggccctcctccccggcaactgggcgccgggctccgcgaactcttcgggcgcttccgccgtgcgctcggctcttttcgtgtccggggcggggcggggcaggcgcccgtggtcgggtgcgcgcggcgcgggcgggggccttcccagtgcgcgcgcgccgtgcaaggcccgcggacgcccgcccctcccccaggcccccgcacccgcgccgccccctcccctcctggcaagagtcggcggcggtggcggcggccgctgcagagattggaatccgcctgccgggcttggcgaaggagaagggaggaggcaggagcgaggagggaggagggccaagggcgggcaggaaggcttaggctcggcgcgtccgtccgcgcgcggcgaagatcgcacggcccgatcgaggggcgaccgggtcggggccgctgcacgccaagggcgaaggccgatt

SEQ ID NO: 5508 - DNA, 2300 bp, Homo sapien
ccaaacaggtctggtgtgtgggggcaggagggtggaggtaggagcatctgggggctggggctggctccaagtgctgcagagagttcactatgagctctgaagtcaaactcagatcctgctccttagctgtgtggccttgggcaagcccctcagcctctctgagcctcaggctcctcctctgtaagtggggctgttggagggatgaactgagatacacgtggcaaggtgcctggccctgagactgggggccccgtaaacagcacctgctgctctgactgaggggcagttggagatgaggggggacttacaggcccaacacctcatcagcaggatgggccctggctctgtacacatagaatgttggaaagctatgttctgggtccagttgcaagaccatcctgcccacttgctgggtcgctgaggcagagcgccctggactgtgctctggagagcagggggccgtctctgctcactgctgggcagtcagagtcaggtccccagggaactcagatcaaaatctcagggcagccttgctgggtctcagctttcagaattgatttctttggaagaacaggaggcatagccaggccagctggcaatggcttcagccacagtcccccagtgccccatgctgggtgattgatggtaggagctgtgcctccctgccagccccccaagccccattccctgccatggctccgacagggaactccctgcaattcttaggtggatcctgaaacacccagtccagactactttttcagcctcacagatggcccagagatagatactattagcccatttcacagatgggaccccagtgaggtctagagaggctctgctctagctgagctgggactcagatcctactccatgacctctgccaaggtccaggccctcttaccgtcctacggggtccttgccggtgtcctcagcctctgccttccagaccccaggtgtcctggagctctgcagatcagagaggctagtactggaagcctgggcccatgcccccagcagcccccagcccagggggcccccaaggctgaacagcaagctcaggatcatcttggtggtggggcaggctcagctcacactcagccttggcaagtagctccagaaactgctagtgacgttgtcttcaagttaaatctcaggaggaaaagaaaatacgaggacaacaaagagaggaagtggcctgggccggcctacccggtgggtcttgtcctgccccccaactaccctggctggccccacaggggccgccaaccacacaagccagttcctgtccctgaggacttggctcagggactctgggaatgtggtagacatggggtggccccaccaaatgcatccttatgggaacctgctccctgggagccatgaaaagagcgtggacttcgaggtggggccacaggaagtggtcaggtccatctcaggggacctgctgcccatccacactgctggccaggaaatggggggcaattcatgcctcctcagcaccttcagcactgggcggctcaaagaagggaagggactattctggggtcacacagcatgcagccagaggccaaggcatgaggaagtccttcatttccccacccccacccacctcagatcctccaaccggtttcatggcagcccagggtccagcggcatccaggatgctggtgggtagctgcacagcccaggccgcgggaggttggctgctctcacctaacaggcctatgtggccctgacccctacctaggaagctggggacaatggccaaggcgcctcccctctctgtgcctgtctgtccaggtgcagcatagacacagcacccctggggccaagagcacccagccagggctgcccccatgggtgggcagggcagtaaatgaatgagggacaggttgggaggtggccagccccctccagcccatggagggcacggggcaggagagctgggctgagccagcaggagcccagggagcctggtctctgccttcctatcctggaggaaggtgaggctgaacctccttccctccctccctccctccccgcccccactgcacgcagggctggctgggctccagctggcctccgcatcaatatttcatcggcgtcaataggaggcatcggggacagccgctgcggcagcactcgagccagctcaagcccgcagctcgcagggagatccagctccgtcctgcctgcagcagcacaaccctgcacacccaccatggatgtcttcaagaagggcttctccatcgccaaggagggcgtggtgggtgcggtggaaaagaccaagcaggggg

SEQ ID NO: 5509 - DNA, 2300 bp, Homo sapien
ccccaggggtcctatcccccatgtgtcccctggccctggggcttctcacctgaggtcacgctctgtacaacattctccttggtcttggctcctggggaggaaatggagctgtcagcccagacctccctcgaggtgttgggggcggtcaggacaaacacaacagaacagctggacaaactgtggggtcggtgggggggtaaggatggtgtctgggggccggcggccccttcagagggcctcttcctgctgtgtctggaagaagtggatggatgggaaggggacaggacagaatgtgggggacaagagagagcaggcctgaggtagggacactggctagacccagggtccagcccctgcccgggtgtggccgggcctcagaagcagcaacaggacaggatgggccagagctgagtcattggcttgacctccccttcctcctctggagagtgccaggagaggatgcgggggagggaacactgagcctaggtttcatcccccagcctgccccttctctctggggagggaggggatccgtgacctggctgtagccgctcccgtgtggagagggtgggggccacctgagcacaggctgctcatggcttcaggggctccaggctcaggggaggctggtatgcttgggaatgtgtgtgtgcgtgcacagacaggtagccagccctgtctgcggtctctgacacccagaggccccgaggaggccaaagacaaacacacataggtgtgcacagggcattgtgggtgctccagggtctggagaccccaccttgatagccagggcctcgccccctcccaaaatgcctccctggggctggggagtaaggtctggcgaaggtaactgggcactcaccctttggccaccacactgtcccaccctgccatgccccacttacccacatacatgaccccctccttggtcttctcagctgcttccgtcaccccctgcttggtcttttccaccgcacccaccacgccctccttggcgatggagaagcccttcttgaagacatccatggtgggtgtgcagggttgtgctgctgcaggcaggacggagctggatctccctgcgagctgcgggcttgagctggctcgagtgctgccgcagcggctgtccccgatgcctcctattgacgccgatgaaatattgatgcggaggccagctggagcccagccagccctgcgtgcagtgggggcggggagggagggagggagggaaggaggttcagcctcaccttcctccaggataggaaggcagagaccaggctccctgggctcctgctggctcagcccagctctcctgccccgtgccctccatgggctggagggggctggccacctcccaacctgtccctcattcatttactgccctgcccacccatgggggcagccctggctgggtgctcttggccccaggggtgctgtgtctatgctgcacctggacagacaggcacagagaggggaggcgccttggccattgtccccagcttcctaggtaggggtcagggccacataggcctgttaggtgagagcagccaacctcccgcggcctgggctgtgcagctacccaccagcatcctggatgccgctggaccctgggctgccatgaaaccggttggaggatctgaggtgggtgggggtggggaaatgaaggacttcctcatgccttggcctctggctgcatgctgtgtgaccccagaatagtcccttcccttctttgagccgcccagtgctgaaggtgctgaggaggcatgaattgccccccatttcctggccagcagtgtggatgggcagcaggtcccctgagatggacctgaccacttcctgtggccccacctcgaagtccacgctcttttcatggctcccagggagcaggttcccataaggatgcatttggtggggccaccccatgtctaccacattcccagagtccctgagccaagtcctcagggacaggaactggcttgtgtggttggcggcccctgtggggccagccagggtagttggggggcaggacaagacccaccgggtaggccggcccaggccacttcctctctttgttgtcctcgtattttcttttcctcctgagatttaacttgaagacaacgtcactagcagtttctggagctacttgccaaggctgagtgtgagctgagcctgccccaccaccaagatgatcctgagcttgctgttcagccttgggggccccctgggctgggggctgctgggggcatgggcccaggcttccagtactagcctctctgatctgcagagctccaggacacctgggg

SEQ ID NO: 5510 - DNA, 2300 bp, Homo sapien
ggaaggcagaggttgcagtgagccaagatcccgccattgcactccagcctgggcaacaagagcaaaactctgtctccaaaaacaaaaaaagggaaaaaaaaaagtgacaccacagcaaactggggcgggggtgggggaaacggtaatgcggtaatgcgctccctccttctgcctctccttgtctgagaagccctggtgccctgcacgctctcacaaggtccactgctgagtcctgggcacccttcagccaatttaatcttcacacacacactttggggagacgctgtgatgtgatggggatgttgaggctcagagaagtgaggggcttgctctaagaatatctgaacccaagaggtttgactgtagtgcctgccgctagggccacgtggagctctctctaccaccatctgctgggggctggctgtctcttcccacagaggctgctcccttcctgtccagctcacagctcattgcccatggggcctggagcccagtggcaccaccagcctgtgataaactggaacactcgaaggcctgcctggctattgggcactaccggtgggatttcaggagggctggcagggctgtggccagccaggcagggcatggctgagatgggctccccagagtccccaaggcatccatatggccgctcccagggcaaggcctcgctctgggagaggaggggcggggggctgggaggactgttgctgccgctttgttttgcctgagacctgctccctcccccttcctccacctaatctcatcacctgcctcttccctttgcccagggttgacctcatctccattaatccataccgtgtgtgtgtgtgtgtgtgtgtgtgtgtgtgtgtgtgtgtgtgtgtgtgtacaggtgcacttccaaacaactccctctaggggctgaccccgcagcactagaagcagggtatgtgccagcagaccaagcctgtgtggcaggggcttcccagcgctccagaataggggagacaccagcagaggtgcaagaaacagccccggacaggaagcggtagagagacccagaaaggcagggtgggtgtgcactggcctccaggtcctgaaggcctactctggagtgggagtatacccagctgggtggggcctgacctacaccccttgtgtgccaggggaatgtatcttgcaagctgttttgctgcacccaaggatgatcttctccactcaggcccaggtccctaagtcccctcctaacagccacaagtcatactctctagcgccttgcctgccccatctcaggaaaggtgacctgagaggcccaagcttattcctgccctccctgagccatgcttcctgcccaacttcctaaggcttcggtgacagacggcaatctccttgcctgggctgcacaggcacactgccctctcccccttggggttgcatggtctgcaagtgcacacacctgtatctcgccctctcaggggaaagatttaccaggccctctccggctgcatccactgggtctctggctacaggcagagagccagtcagcagtgcccctgcagctgtttggggctgggggctccgatgatgccagagccctagggtttacaggcacctaggcagattcgaggatccaagtccctgccacatgcgtttgggtgagaccgacctcactgcctcagtttcctcctatacactgatgctatcaacaaaaatacccacttcaggaggtggttgtaaagattatacaagagactgcagagcgttaggcagcacctggcacaagacaaatgctcagtaaaagaccactgctgtcattaaggtcaacaccagccctgagctcctgccctggagctgacccagcgctcacgcccaggatcagaaagggagggctggggctgatgagctgggaggtggtgtgcgcccttctcctgcctccagctcctctctggacccctgtcctggcacctcttcggtccctggttcggtctgcccctttcccaccgcggcccgtcttaggccaggatgtgctccctgccctgcggactctggagcagggcccggccactccccggagcctgtatgacgggaaccgccccgcgccctctcccctacgcggggcaggccagccctggggcgccttaaaaaccggagctggcgcttggcatcgccactctgggcaggatccaacgtcgctccagctgctcttgacgactccacagataccccgaagccatggcaagcaagggcttgcaggacctgaagcaacaggtggaggggaccgcccaggaagccggtgaggatagcgcgcgacctagggc

SEQ ID NO: 5511 - DNA, 2300 bp, Homo sapien
gcacctgcgtggatgcgcaggcagaagcagcgggtcggcgcggtccgcaagttcctggaccggcagcttggctcggaaggctcggtcctccactgagacgcagggggcaggcagaacgcccaccccggcgagcagacagatggtgcccgcagggaggcagcggaacagaggctccggaggagccggagctgcgctgcgggcactgcgggagcccctccaaggaggccatgctggcgctgggcggcccgcccaggccctcaggagagggtgaaggtccaggacagggatcgggcgcggcccgccaccacttaaacccgcgcgcgccaccagaggctgccccagacctcaaagggctttgtttccatcccacccccatcgccgaaaagtaatcgtcgccttacctttaagtccccacctggcaaagaaggtccttagttcctccacctccagctctctcctccgtattctggaggtgacccagctgcggtgggggcgtgggagatgtcaggagaccactgggttggttcttcctgcacctagcccaggcttcgttaggactccagctccctgtcagtcctgcccatatcccagtcaggagacaatatccaaaccaaccccttacttcaccagtgctccaggggaggcccacagttcttcccttgagactgaaatgctaccaaggaagcctccgtgtcaggtcccttccttctgggcttcacttttccatctgagagctgggtgcaaaggatgggctgctttctgatgggttaatcgagacgaggttcccaggggcctctcagcacacttgcctgactaaccctttccggaggatgggatctgggtaaggcaggccctttcctgttcagcagcagggatgagttacagctctgtaggcgggagccacctgtcagcccccccggggctggtgactccattcccagcaggccgaaactctggtccagaggagatagtccggccttggaagttttgcctccttccttcatttgtctcctaatgtcttaagctgcctgtccacagaggcactggctttgcttgtgtgcccctccgggcaggccacaggagggaggaggcagtaaggacctggcaaaactgcaagccccagggctaagtgcatgaaaggtgggaattcaggcatctgggccaggcttctaggggagaagctgtaaaagggggcaagggtcttctgcgccatcaccagcattagccaacagtccagatgctagctgcagcctggccctgccctgccttccttcctctgtccaacattttctcagtagccctggagatggaaagggaagctcctcccccacagagaaggagctcagagttagaaataaacaaaaacatcccagaggcatggaaaggtctcctgcccctcgggctggggggccctgggccagggactttatctccatggcatccatcccttggacctgtaccaccgaatactctggaggacacagaggcatggcaatggtggggcacctgtagtcggtggtgcctcaacaggggctaaaagccacatctctctgttccagtgtcagcggccggagcggcagctcagcaagtggtggaccaggccacagaggcggggcagaaaggtctggtggggctggagggaggcgggcaaccccagcacacctcccactccccgccccatcccggctggggcccaggcacatcctctcctctgcagagccctctgtccacaatgccccaagcaggtcccccgggagacccaggccaggctaagcctacaggcactgtggttcccgggccctgcctgacctgccctctctcccgcccttccccagccatggaccagctggccaagaccacccaggaaaccatcgacaagactgctaaccaggcctctgacaccttctctgggattgggaaaaaattcggcctcctgaaatgacagcagggagacttgggtcggcctcctgaaatgacagcagggagacttgggtgaccccccttccaggcgccatctagcacagcctggccctgatctccgggcagccaccacctcctcggtctgccccctcattaaaattcacgttcccaccctgtgtccacttcatgattcctcgcaagctgggcccagtcctctcatcccaagagcagagccaccgtagccggagtcctagcctcccaaattcggaaatccaatccaacggtctcaggaatgttttccatcccgccacgcgcctcccgaagctcccagaccggaggctcagcccccatctcggttagtgcccctctcccgcccgact

SEQ ID NO: 5512 - DNA, 2300 bp, Homo sapien
tgtctggcagccctgcgactaaacctctttcttctgctgcaacccggtgtttcgggtgtatggacttgccctgccatcaggcaagggacctattacagagacactggctctgtgccctctgtgtcccagacatggttcaaaaggcaagtcccacctggccctgccctccagggctcctagtgtcgggggagcagaggcacacaggaacaggcaattgcacagcgccaccggagcaccagctccatggggctggggcaatgtggaaggggctgcattgcagagatggttccatggtaaacctgaaaatgagaactcactgtcatccatcaggagaacaaaaggatggtcctccatgcaatcatttagccagtgctgcctgagcaccgcagaagacacagagcatgcactaaaaagggactggttacagccccatgaaccaccactatggagaagcacacatgaaggctcattgtgactctaaaaaggaggtacagggggtgtgagaatgtgtcaccaggggcctgatgcatattgtgtgtgtgtgtgtgtgtgtgtgtgtgtgtcggcacacccaaggccgctgagacctgacgtttggaagagcaataggcaagggtgatttatggagagtatgccaggcagaaaatgccgcaggtgtgaagataccgaggcagcaggagcatgatgggaaggtcaaggtggctgagatggaagggagggggtgttgtgggaacaggctggaggtctgggaggctctgccctcatcagcaggtgggcttttccttagacttgttcctcagacttgttcctcctgtggttccaagtggctggttctagggttcctttccagccacaaggtgtccagaggaagatgaagggcggcttttttttttttttctgagacagggtctcactctgttgcccagactgagtgcagcggtcctcgacctcccggtctcaagtcattctcccgcctcagcctcccaaagtgctgggattacaggctgagccaccatgccccgccttcaagacaagaaaagccttttctagaagactcctggcctcaggcctgatctctctccttggccgcacctgggtcgcacttaaggcgatcactcacaaggagaacaagtgaaaagtcccttgggattcatccctgagtcataggggaatgatgcacaccagaaggatgctgggctctgccagtccagccccaccagcctcctggagtggccctgaggccggctctccagaccctaggacctgctcctggaggcaggggctcctggaagcgcccctgacactgctccgggtgtctcttcaaggactttcccacattctacaaagaaaccttttggggacagtcagcaacatgtaaccgatagtggaaccagggcagccctgggttaagggtggtagacacgtgccccgcgagggagatctcagactggagaagggaacggcctcctaggcagacctgtactgcagcatctggactggcagccaggttggggacttcgtcccctgctgggaggccggggaaggcagggagcgcgccttgagtccgctgactaaatcgcctcagaactgggaagcaccgcgtagtcggtacctttcaacagaaacgcagaggccactggcgcgcaggaggaggcgactgcaggtggaggtagtaccggggtaaagacatggagcgggtggacgggaaccgctaggggcccgctggggcgtgaggggcgcggggaggaaagggccgcagcagcccacgccccgcgccagggccaggcctcatccggcgctcaaccagtgccacgttgagtcacctactggcaaggcatacaccgtaccggggccacacgcgtggacacgtgccgggggggtgctgggaacaccagtccatccggaacccactagacaaaaccttccagggccggaggttaccggtttgtcccgaaaggaagtggtgtggaagggaggggtctcccgcacgcgagcgcgcacgtgcatgccccccccacaaccgtgcttcgttctcacgtgcacggccccgtgccccgaagcccctccccggggagtggcggggcgggaccccgccgggcggcagcgccccactcaacaaagcttcccgcgggccctgccccatgactcaccgctgggtggggcgggcacgcaggcaacccgcgggccgagacggggtagtgagggccggaagcccggctcccgactccgcttcgtccccacaacctccggccgcctgaagtcctgaggggccgtggccctgggtcgtctcccctgttccc

SEQ ID NO: 5513 - DNA, 2300 bp, Homo sapien
gtgacagagcaagactccatctcaaaaaatatatatatatacacacacacacatatatatatatatatatatacgtgtatatgtatatatatgtatatatatgtgtgtatatatacgtgtgtatatatacgtgtgtgtatatatatacacgtgtatatatatatacgtgtgtatatatatacacgtgtatatatatatacgtgtgtatatatatacacgtgtatatatatatatacgtgtgtatatatatacacgtgtatatatatatatacgtgtgtatatatatatatatacacgtgtatatataggcaaattgaatgaaatattatataaaaagaattataaatcacaagagagatttattccaggtatgtgaagctagttcaacatttgaaaatcaataaatgtaatccatcatatcaaagaagaaaaatcacgtggtcatatcaataaataaagaaaaagtatgtgatatccaacacccattcatgatgaaaactctcagcaaacttggaatagaggggaatttccttaacttgataaagaatagctacaacagcaaccctgcagctaacataatacttcatggtgagaagctagacgcctttcccctaagatttaaaacaaggcaagaatgtcaccctcaccactcctatttaatatactggaagttctagcaaatgtgataagaaaataaaataaaaggtaagaaaggaaaaatatagatgagaaaggaacaaataaaactgtctttgctcacagatggcatgattgtctatgcagaaaatctcaaagaatcaacatatacatcatctcttcataatgaaatatatgaaatatactgtttttccttgggtattggctggattgtaaaatgcttctcccaccttcttaccccaaccttcttccttgtaggttagagttacttgttattggtaaatagccactgtggagactaaggaccaaaagaaacacagaaagaaattttacagaagaaaaacagtgggcccaaagctgaaaagaaaaagaagcagcatctgcaggatctccagctaggggatgaagaagatgtctggaagagaaatcccaaagcttttgcaattcagtctgctgtggggatggcttgatcctttcacaggtatgtatagctgcagtctgatgcttcttccattgattctttttaaatagtaggagcatctcacaggtgacatttggattcacaagtttagtcacactccaaaggacatggagatgcatgatgtgtggcttttactaaaacatgagaagacttcccatagaagctgtcttgcctccagcatctgcacactggttggtgtttcttgcccaagatacaagaatttatggaatttgtttcttcctaaactttaaactgtttctatggtgataagtgtgctttttccctccagatatgttttacaaagttgtaatataaaatacaaaaattacaatttgtaatgctaacatagctttagtgagtccttgtgatatgcctagcagtgtactttaaacattattcaactaaatacttccagcagccttaccagagtaggaatcattcttgccttcattttatggataagaaaactgaggtcaagaaaacaagttacctccaatcataaagccagtaagtaggagagccaaatttaactccagagcctctgatcttatctgttacgatgcactgcctcggtatttaccttttgtttttaaaaaaactattaaaatcactcataaaacagtcagatttaaggagtgtttaattttcaactctttatactattgaagtcatcttgctacatctttattgaacagcagttatttggatgggggccagtagttaacaaattaataattgacaggttaattatatttttatattgtctgttgtactctctataaaatatactaaagtactcatatctataagtaaactaaaaaaagtctacttataaggttgataccttttactctattttgaaaatgagtttacttttttttttaatgaataggactcaggatttgaagacaaaaaagcatcatattccagtggttgatcagactccactagagccgccaccaatagtgatagtggtgacggggcctccaaaagttggaaagagcactttgatataatgcctcattgggaacttcacccagcagaagttgaccgagatcagaggccctgtgatgatcgtgtcaggtaggagatgccaccacagccacagagttggcctggctgttgtcatctgagggagatgcatgtgttttctgttttcttg

SEQ ID NO: 5514 - DNA, 2300 bp, Homo sapien
cgcatctgtagtcccagctgctaggaaggctaaggcagcagaattgcttgaacccagggggcggggggttacagtgagccgagatcacgctactgcactccagccttggggacagagcgagactccgtctcaaaaaaaaaaaaaaaaaaaaaaaaaaaagaaaatttctgtcaaggtaaaaagagtaattgaccagatttttaaaaactaaaaccttcaggagccaaaattactgacactagtgctctcatctttatatagctagcacaggcaatttagttttctaatattactatcaacaatactcctcaacattaatctttaaaaaattaccattggccaggcatggtggctcatgcctgtaatcctagtactttgggaggccaaggtggaaggatcacttgagtccaggagtgtgagaccagcctgggcaacatagggagacctcgtgtctacaaaaaaataaaaacaattagccaggtgtcgtacccatacatgtggtcctagctactcaggaggctgaggtagagtaactgcttgatcccaggaggtagaggatgcagtgagccgtgattgcaccaccgcactccagcctgggtgacagagcaagacactgtctcaaaaaacaaaaaccaaccccccaaccaaaaaaaaatcagtatttccaatatatagtcaaaggccaccactaagacttatcccacattcacatgacttaaatctgctgccccaccattattctaacattctggaactggtttttgtatcactttcccccttacacattttagtagcccacctagagtgcagatagacaccaccatgctggggaagggctcactatgcccatatactgggggcctgtttatctgactgaccctatgccaggagcatgcagaggcagaactgtgacatacggacaaagaccaaatgaaagccaggcttcacactggcagttaagtaactggtggaatcaagtctagaatccagttctgattacagttagtattctctcttcaatagttgttacattctgtggctaaattattccacattaaatcccctttagtgaaaaacggcactaaaagttacttcactatcagctttcaacattagagcctctttctcaagaacagctgttcatattatttaataaaatacaaaataattcgagaataaagactatgctttcagggatcatttctatagttcgttactcgggaagtttctctgaacgtgtaaagcaccgaacaaaaaaaaaaaaaacaattcaagaataaaatctgggcagctcacaataaagtggaaggaaatgttatacaggtggtcgctataaacatttcagaaatccaattgcagtattataacttatgaaaagagaaactaccacatgtaaaaacacagaaaagaaacgtaagttttggaaaacgtagacttttaataactgcttttatcaccaggttaagccatgcagttacaaagtagttagaaatttctgaagggtgttagagttaaaaaaaaaaaaaaagctgactcttacacatatattatctagcacttcatggggacactactgttcaaaaggccctggccaaataactcccaaatgaaacactcaacccaaggatgttttcagcccactgttagtgaagctgggtgcagaatgcaaagcctctaaaaggagaggatacaaagtcaggtgagtaggggccattggcaatgctcagagccagccagactccaaacagggagcccaagtggtttttttctgggacactctacttgaattattgtttaattagtcaaccatagatcttcaaaagagaacaattagttaacatgataaaaagtgactgcattctttggactgtatcataattatagtaagcaaattctgacagttttaatgaaaatagcctccaccattttgcaggtatgaagataacttaattatccacagggcttttaatgtctgctggacaatacatgaatgataagctataaatgacattgttttatgatataaaaatactagtttttttcatttattatttctataggcattcactgtttgagtcaaggttaggcttgttaagtgattaaaggcaattttattacagcagcatgtacttattctattctaaaagaataatattcataaacagaaacaggttttatatttgtttgcaacctgcaaaattgaattattttgctgatataaaatactaagaactcacttgaggaccatgccaccttctgaaaaggccacacacctacttcttaaatgtgttaaagttaca

SEQ ID NO: 5515 - DNA, 2300 bp, Homo sapien
aatctttaaaaacaacctttgtcccccctgctgggaacaccagcaccgctcaagttttttccggtacagagaggatttctaaaaatcctcataagtcagcgggcataactgaaagaccacagaaccaggtttactgagacatgggtctagcccaacatcctctgtgcttctcagccaatccacctccaacaagactcctcgcctccctgggctctttattccatataatttttcttttttacagtagacaaaagtggtttgtcctttccattttatgttactaaagaggtatgatgcaatgtattggggggaaaaaagctcttatttgctcgaagaaagcaatctgactacagaggccaaatctacagacattaaatgatttaaaccacaggataacccagtgactaccaaacattatctgacccctttcttcacgtactatatttttcctgaagctcaaattcagggctagccaggaccagtacacacccccagagctatttcattccattggctggctggccatccgcagcctacaacctgtaaatttactgtcaggacgccaggtgtttatttgtcagagatattacattgcttgtgatttttttgtgtttttccttttttttggtataaaacagaacttgtcagaatgggaaaattacttaattgaaacgattaacgcgtgattagtaaattcctttggttaataaaactgtctagatttcaaacttagaagccaagtcattttctatgttcggatatcatctgtcactattggaacaggagtgaacaaataccagaaaataatttgacagcttgcatttaggggagactcacaaaagcccaagaacactgacgaggcattatcacacgggcaggtcattccctttcctagaagtgcatttcggcaggacccgccgtgtgtgacacagacaccgggaccaaaaggagaccggtgcagcgtctactctgcatgcaagatcagcatatacagaggcccggggtgacggcgcgggggagggggcaggccaatcgcatgatgattttaaggcggaaaaatcaccatccacagagccggccacatccgaggcggggtgacccgggcggggacccggcccgctccagctgggctgggctgggctgagcagcggccccgcaccggcaggaggccggaggggagggccgcaggggaggcagggagggcgggacggggcccggccgacgctcacctcccttgcagggcgtgcggtgctggctgtgctgggcccggtagccttcgatgacctcccaggagccgtcgtcgcgccggatggggaaggagagactcagcacatggttgcagggcttgatgatccgcaggatgccgcgcacccggttccgcttctgctcctcgctctcccgggtcctcaggtcctccaccagcttgtcctccacgatgctggcgccgcgatcgaagaagccctccaccatcttgaagaagttggggtcgtcctcgcggtcggccaccgcctcgctgtagtggcgccgggcggccaatgccagccccggctgcggggcggcggcgggctgtccccgggcccagcccagcaacgcggccgagtcggcggacgccgagcccagggcagcgggcccggcccgggacagcaacagcgcttcgcccaggtagcggtacatggccacaagcggaggggaggtgcgtgatggtcgcgaaacaggcgcgctttctcagactccccgcgactagggaggaagggtcccgcgcgggttgcccttttaagccgcagcttcctgcttgcccggctgtcccctcccctcgggcgctcgccacctaacggggaggacggacttcggggacagggcgccgcccagggcgccgggcctccgcctccgccgcggcctccccgggcctcgctggcggcagcgcgcgccggcggggcgtcgggggcgcgcaggcgcgggcgggctcggcgcgcacgctcgcgcgccagtggggaagggaggggaggggagaggaagggcggggaggagagtggaggggaacggacgggaggggcagggaggggaaggtcggggcgggtcggggcgggtcggggcgggcccacgggcggccggatttgcccggaggccgcacccgcctccggcggggctctcaggtatgtgcgccgcgggggtccctcaggggggttgggggtagcccagggaggtcggggtcgggggctggcctctgtagggcgctcagaggccgagtccccccgagcgccgcgtgggtgaggcttggcggtctggtcggggaccgggtc

SEQ ID NO: 5516 - DNA, 2300 bp, Homo sapien
ccgaggctgaggcaggagaatcgctagaacgaacccagggaggtggaagctgcagtgagccgagatggtgccactacactcccgcctgggcgacagagcaagattccatctcaaataaataaataaaataaaaaataaatcatatactgaaccatttaacaaatacatatattcctgagaaagaatttcctgggggcattatcgcatttctagtttccttattttagactatttcagagggagatagggtctccctctgttgcccaggctggggtgcagtggagctatcgtagctcactgcagcctcgaactcctgggctcaagccatcctccagcctcgacctcccaaagtgctaggactaaaggcgtgagccaccgcgccgggccggagcctctgtctgcaaaggtgaagcagtcagtactgtggggcgacacaaccacgacgtgcgtaactatgcgatctccacactgcggagcagttgaacgggacaataaaagctcgcgtggtgagagcttgtgggcgagtgactcccttccagctcacgccagccacgcataatccaactccgggtgccacgccgctctctgcagccctggctggtgacgccgagccctcagcccggccttacgcggcggcggctctgcctcgctttcctgcccacgtgtcagcccctgcacgcccggccccggcctgaggccgccagaggacaggccagggtgggccgcccgttccgagggcgcgcgggcggaaaggaggggcgcccgtgactcacatgacccggtccccgaccagaccgccaagcctcacccacgcggcgctcggggggactcggcctctgagcgccctacagaggccagcccccgaccccgacctccctgggctacccccaacccccctgagggacccccgcggcgcacatacctgagagccccgccggaggcgggtgcggcctccgggcaaatccggccgcccgtgggcccgccccgacccgccccgacccgccccgaccttcccctccctgcccctcccgtccgttcccctccactctcctccccgcccttcctctcccctcccctcccttccccactggcgcgcgagcgtgcgcgccgagcccgcccgcgcctgcgcgcccccgacgccccgccggcgcgcgctgccgccagcgaggcccggggaggccgcggcggaggcggaggcccggcgccctgggcggcgccctgtccccgaagtccgtcctccccgttaggtggcgagcgcccgaggggaggggacagccgggcaagcaggaagctgcggcttaaaagggcaacccgcgcgggacccttcctccctagtcgcggggagtctgagaaagcgcgcctgtttcgcgaccatcacgcacctcccctccgcttgtggccatgtaccgctacctgggcgaagcgctgttgctgtcccgggccgggcccgctgccctgggctcggcgtccgccgactcggccgcgttgctgggctgggcccggggacagcccgccgccgccccgcagccggggctggcattggccgcccggcgccactacagcgaggcggtggccgaccgcgaggacgaccccaacttcttcaagatggtggagggcttcttcgatcgcggcgccagcatcgtggaggacaagctggtggaggacctgaggacccgggagagcgaggagcagaagcggaaccgggtgcgcggcatcctgcggatcatcaagccctgcaaccatgtgctgagtctctccttccccatccggcgcgacgacggctcctgggaggtcatcgaaggctaccgggcccagcacagccagcaccgcacgccctgcaagggaggtgagcgtcggccgggccccgtcccgccctccctgcctcccctgcggccctcccctccggcctcctgccggtgcggggccgctgctcagcccagcccagcccagctggagcgggccgggtccccgcccgggtcaccccgcctcggatgtggccggctctgtggatggtgatttttccgccttaaaatcatcatgcgattggcctgccccctcccccgcgccgtcaccccgggcctctgtatatgctgatcttgcatgcagagtagacgctgcaccggtctccttttggtcccggtgtctgtgtcacacacggcgggtcctgccgaaatgcacttctaggaaagggaatgacctgcccgtgtgataatgcctcgtcagtgttcttgggcttttgtgagtctcccctaaatgcaagctgtcaaattattttctggtatttgttcactcctgttcca

SEQ ID NO: 5517 - DNA, 2300 bp, Homo sapien
aaattcaggattcaggtcagagtacatttttcactgaaaaacacagtgcaaatacaattaatgacaatgacttatttagcaagtaaggtaaaatataagttccacctgtatgaaaagataattttgactttgagagtacacttagatgaatgtcatttaacagatccaggttgtcaccttatattttacacaatatttcgagaactaagaactttctcttccatattctaaaagatgaataacatgaacatatcgggaagcaccatcgttttgcaggtccaatgggtgtcattttaaaaccacccaagtacactgagaccgctaacgctagtaatgtggtgtttggcagctagttttaatgactgtcattagagctttattttttattttctttttatagagacgagcccaggctggtcttgaactcctggcctcaagcgatcagcctgctttggcccccaaagtgctgggattacaggcgtgagccaccgtgccagcctcgttagtttgaaaagcaccaaaagctatccataggaatgtgaactttagcatttcctatcaagtatgtataaatacataactgaaccctcatacagcataaagcttataaatcatatactgaggccaggcgcggtggctcacgtctgtaatcccagcattctgggaggcctaggcgggcggatcacttgaggtcaggcgttggagaccagcctggccagcacagcgaaaccccgtctctactaaaaatgcaaaaattagccgggcgtggtggcgcgggcctgtaatcccagctaccccgaggctgaggcaggagaatcgctagaacgaacccagggaggtggaagctgcagtgagccgagatggtgccactacactcccgcctgggcgacagagcaagattccatctcaaataaataaataaaataaaaaataaatcatatactgaaccatttaacaaatacatatattcctgagaaagaatttcctgggggcattatcgcatttctagtttccttattttagactatttcagagggagatagggtctccctctgttgcccaggctggggtgcagtggagctatcgtagctcactgcagcctcgaactcctgggctcaagccatcctccagcctcgacctcccaaagtgctaggactaaaggcgtgagccaccgcgccgggccggagcctctgtctgcaaaggtgaagcagtcagtactgtggggcgacacaaccacgacgtgcgtaactatgcgatctccacactgcggagcagttgaacgggacaataaaagctcgcgtggtgagagcttgtgggcgagtgactcccttccagctcacgccagccacgcataatccaactccgggtgccacgccgctctctgcagccctggctggtgacgccgagccctcagcccggccttacgcggcggcggctctgcctcgctttcctgcccacgtgtcagcccctgcacgcccggccccggcctgaggccgccagaggacaggccagggtgggccgcccgttccgagggcgcgcgggcggaaaggaggggcgcccgtgactcacatgacccggtccccgaccagaccgccaagcctcacccacgcggcgctcggggggactcggcctctgagcgccctacagaggccagcccccgaccccgacctccctgggctacccccaacccccctgagggacccccgcggcgcacatacctgagagccccgccggaggcgggtgcggcctccgggcaaatccggccgcccgtgggcccgccccgacccgccccgacccgccccgaccttcccctccctgcccctcccgtccgttcccctccactctcctccccgcccttcctctcccctcccctcccttccccactggcgcgcgagcgtgcgcgccgagcccgcccgcgcctgcgcgcccccgacgccccgccggcgcgcgctgccgccagcgaggcccggggaggccgcggcggaggcggaggcccggcgccctgggcggcgccctgtccccgaagtccgtcctccccgttaggtggcgagcgcccgaggggaggggacagccgggcaagcaggaagctgcggcttaaaagggcaacccgcgcgggacccttcctccctagtcgcggggagtctgagaaagcgcgcctgtttcgcgaccatcacgcacctcccctccgcttgtggccatgtaccgctacctgggcgaagcgctgttgctgtcccgggccgggcccgctgccctgggctcggcgtccgccgactcggccgcgttgctgggctgggcccggg

SEQ ID NO: 5518 - DNA, 2300 bp, Homo sapien
actagggaggaagggtcccgcgcgggttgcccttttaagccgcagcttcctgcttgcccggctgtcccctcccctcgggcgctcgccacctaacggggaggacggacttcggggacagggcgccgcccagggcgccgggcctccgcctccgccgcggcctccccgggcctcgctggcggcagcgcgcgccggcggggcgtcgggggcgcgcaggcgcgggcgggctcggcgcgcacgctcgcgcgccagtggggaagggaggggaggggagaggaagggcggggaggagagtggaggggaacggacgggaggggcagggaggggaaggtcggggcgggtcggggcgggtcggggcgggcccacgggcggccggatttgcccggaggccgcacccgcctccggcggggctctcaggtatgtgcgccgcgggggtccctcaggggggttgggggtagcccagggaggtcggggtcgggggctggcctctgtagggcgctcagaggccgagtccccccgagcgccgcgtgggtgaggcttggcggtctggtcggggaccgggtcatgtgagtcacgggcgcccctcctttccgcccgcgcgccctcggaacgggcggcccaccctggcctgtcctctggcggcctcaggccggggccgggcgtgcaggggctgacacgtgggcaggaaagcgaggcagagccgccgccgcgtaaggccgggctgagggctcggcgtcaccagccagggctgcagagagcggcgtggcacccggagttggattatgcgtggctggcgtgagctggaagggagtcactcgcccacaagctctcaccacgcgagcttttattgtcccgttcaactgctccgcagtgtggagatcgcatagttacgcacgtcgtggttgtgtcgccccacagtactgactgcttcacctttgcagacagaggctccggcccggcgcggtggctcacgcctttagtcctagcactttgggaggtcgaggctggaggatggcttgagcccaggagttcgaggctgcagtgagctacgatagctccactgcaccccagcctgggcaacagagggagaccctatctccctctgaaatagtctaaaataaggaaactagaaatgcgataatgcccccaggaaattctttctcaggaatatatgtatttgttaaatggttcagtatatgatttattttttattttatttatttatttgagatggaatcttgctctgtcgcccaggcgggagtgtagtggcaccatctcggctcactgcagcttccacctccctgggttcgttctagcgattctcctgcctcagcctcggggtagctgggattacaggcccgcgccaccacgcccggctaatttttgcatttttagtagagacggggtttcgctgtgctggccaggctggtctccaacgcctgacctcaagtgatccgcccgcctaggcctcccagaatgctgggattacagacgtgagccaccgcgcctggcctcagtatatgatttataagctttatgctgtatgagggttcagttatgtatttatacatacttgataggaaatgctaaagttcacattcctatggatagcttttggtgcttttcaaactaacgaggctggcacggtggctcacgcctgtaatcccagcactttgggggccaaagcaggctgatcgcttgaggccaggagttcaagaccagcctgggctcgtctctataaaaagaaaataaaaaataaagctctaatgacagtcattaaaactagctgccaaacaccacattactagcgttagcggtctcagtgtacttgggtggttttaaaatgacacccattggacctgcaaaacgatggtgcttcccgatatgttcatgttattcatcttttagaatatggaagagaaagttcttagttctcgaaatattgtgtaaaatataaggtgacaacctggatctgttaaatgacattcatctaagtgtactctcaaagtcaaaattatcttttcatacaggtggaacttatattttaccttacttgctaaataagtcattgtcattaattgtatttgcactgtgtttttcagtgaaaaatgtactctgacctgaatcctgaattttccttgatggtcaaaagattaaggtatcaaatttccttttttctggatgtattatcgttttactctcttacattgcaatcccccactcctgcaaaaaacccacggagtttcagaataaaatgattagcatcagtaaacatggaaatatttttctttttggattaaatt

SEQ ID NO: 5519 - DNA, 2300 bp, Homo sapien
tgacctcaagtgatccacccccttggcctcccaaagtgctgcgattacaggcatgaaccactgtgctctgccccaaaatgagtaatttaaaggtgactgtaatatagttaaacaaatgcctcttttcccattctttactaacttgttatttaaatggggcaagtttttacaacataagaaataaacaggccaggcgcggtggctcacgcctgtaatcccagcactttgacaagcagaggcgagtggatttcttgaggtcaggagtttgagaccagcctggccgacatggtgaaaccccgtctctactaaaagtacaaaaattagccgggcgtggtggcacagactgtaatcccagctaatcagggggctgaagcaggagaattggttgaacctgggaggcggacgttgcagtgagcctagatggcaacactgcagtccagcctgggcaacagagcaagactccatctcaaatgaaacaaacatactaaaaacctatttacttgtttgatgtgagtgtgcttagctttattccccttaaagagagtctttttttgagatggagtctcactctgttgcccaggctagagtgcagtggtgcaatctaggctcactgcaacctccgcctcctgggttcaagcgattcttctgcctcagccttcaagtggctgggactacaggcgtgtgctaccacgcccagctaattttttgtttttagtatagacggcgtttcacgctgttaggcaggatggtctcaatctcctgacctcgtgatccacccgcctcggcctcccaaagagctgggattacaggtgtgagccactgcgcccggcctaaagtgagtctttaggtgaaaaatttttgtgaatattgtgatttctccttaataatttcttgtgtatttatgaattttatataattaaatggcatatcaaaaaaatcacctatgttaattatgtttttgactcagttatattttcttttggtacattattaagttaatatccatatgcaaaaatatgctgacaatatattaattttggatttttcatttttatcagaaatcatgagtggaggatctcaagtccacattttttggggtgctccaattgctccactgaaaatcacagtatcagaagacacagcttctttaatgtctgttgctgacccctggaaaaaaattcagcttttatacagtcaacattctttatatctgaaggatgaaaaacagcacaaaaatcttgaaaactataaagtcccagaatctattggttctccagatcttagtggtcatttcttagcaaactgtatgaatagacatgttcatgtgaaagatgactttgtacgttctgtttctgaaacacagaatatagaatcccagaagattcactcctctagactgagtgatataactagctctaatatgcaaatatgtggatttaaaagcacagttccgcatttcaccgaagaagaaaagtatcaaaagcttctcagtgaaaataaaattagagatgaacagcctaaacatcagccagatatatgtggtaagaactttaacacaaatttgtttcagttgggccataaatgtgcagctgtgttggatttggtttgtagtactgaaaaaattaatatagggcctgaagtggtacaaagagagtgtgtgccaacagaatatcatgaaatacaaaaccagtgtttgggattattttcctcgaacgcagtagataagtcaaggtctgaagcagcagttaggaaggtctcagaccttaaaatatcaactgatacagaatttctcagtataattacctccagccaggttgcttttttagctcaaaagaaagataaaaggcggagtcctgtaaataaagggaatgtaaacatggagactgaaccaaaggcaagttacggggagataagaatacctgaagagaattcgattcagcttgatggttttacagaagcatatgaaagtggacaaaaccaagcatattcccttgaactttttagtcctgtttgtcctaaaacagaaaatagccgcattcacataaactctgataaaggtcttgaagaacatacaggatctcaagaacttttcagttctgaagatgaactgccaccaaatgagatacgtattgagttgtgtagctcaggaatactgtgttcccaactaaataccttccacaaaagtgctattaaaagaagctgtacctctgaagataaagtgggccagtctgaagctctatctagagtccttcaagtagctaagaaaatgaagttgatttctaatggaggagattctgctg

SEQ ID NO: 5520 - DNA, 2300 bp, Homo sapien
gcctttcaaaaaacagtatgccctgttttcctactcagtctggaggttccattaaagagtatttctggcaaagatttttagacctgaaaacacactccaaaatatactttcttctgactccattcccagagtttttcctaccgcattcaaatgatttctagaaatgtttttgttgtagccttgatcaatttcagtcgataaagcagcagatagtaagggaacaattccacgctccccacccctgactctgcaacacagtgcagaattccagttggcaataaaaaactagtagagaaggaactcactgacttcagtttgtaataccgtcagaagaaactttaatcgtcacatcctttctgctcatttgcaggattcctatcatctgtctccacgtgataacactgaagagccttcacgttgatgcaggcccagggcctcaagtgcagagactgagagctctgcaggacacagcatggagccgccattcctctatgggtggaagagcatgtgtcctctgaacaggggatccaagcactgagatattctttctcagctgtcagtgcggcccaggactttctgtggggatgctcagacagcaggggccggaggacttttagccaacacctaaaatggtcagtcttcacaaattacctttggctaatttgactgtctctcctcctggggtctaggacttcaaacatgtacagaagcgattgcagaattaagacaagacacttccacaatatattttttgtatcactggctcagaaaaagactcattcaaatcctgtatcaaagccacgtgtgagaatcttgagaaagcatcagctgactgacttgacaagggaggaagcaaccaaaaattctgcgcttcttcagtatctgagtatgatattttgcttcaacatccctcttagatgaagttattgattgaaaatcatttaagtttgccccatggtaaaagatcaagtcctcagaaagatctccaaagtgtttacggtttgttttgttttggtaagtttaccatgattttgcttgaattgctctccgttgatcttctcagctaagatggaggtagagttgcacagtagaagagggctgcatgtaagaaggcagttctgtctcagaggacaaaaggcctgggagcacccagacagacagtcactgcatggaggtcactcccctcccagtggccactgtggagacatttcacagaaatgcttgctggaccattcaggttcagagttgggacaaaaccgagaactcatggggatattggacaggagttaggaaatgaccttctcacacaactggggcagtgggggagaaccctgggcttgagacttgcaatccaccacttgcccctgcccctgcccctgcagtgtggccgctgttaccttttcctgcaactctgccttcttgagtccaaatgtcttcgaaaggggcaaatgcttcgtaagtgccgacagggtgtgtttcagtgaatgtttgcagtgtgcaccggtctggctgaaggcctcttcccttccccaacaccctcccatcgtgcaaaattaccctgcccagcagggagtgacttgtgtgtctcagaagattttgttgctgtgctctgagttctcactcctcatctcctttgaccagtttcttctaatactccccttgttcacaacacagaacatgagtgctctttcctatcattttgacactaataaacggacagtgattctcagtgtggaaatgagaatgaagttttttttaaagacaggctacaataattcccatgcagagaaccacatgcgatgacactggattccaaacagcaagaacgtatggtgaagatgaggccaacagtgagctgagagaggccagccagggtgtgtttcagtgaagatgagaaacaatcagataacacctgtttcctccaggaaagaaaatgtggccagggaaaagagatgggaggaaggctggtcattgcctattccactgtgcacagtttgaatttggagccatgaaaagtattgcttggttaaattaaaatcattcaaaagataaaacataaacatttaacaccagcacaatatgctgggaaacaaaatgaaaggatttctggtctcggtgctgtaggtcacatagccactctttcctggattgaggctttccagcaaaggggctgggacgtaaggctggcctgctggtgtggacagagattccagcaacatgcatgacctgggggtacaaggattgcttcctaaacaatgataagcacacagccacctaatagtctggatcggctgagacca

SEQ ID NO: 5521 - DNA, 2300 bp, Homo sapien
gaaaggacagagtggatggattgatcctttctagaaggagacaggtcacgtcattgtgtgtttgtagggagtggtgggatcatgttgtgctggtggccccgggaggatgataggcaagcctgaaccctgtgccatatcttcaggcacctggaaggtgcccttccatagtgttcagagagatttggactggagttttctagatcttagggaggagtggggagaagtggtctcagccagaaaactgttgggtgggttggctgtgacagagcatgtagtgacagcccctgggtgggcgaggctgggggctgctgtaactgccacagcccagagcccctcagctctctccctagagatggcttctccatcagttcaggtagctgttggctttgatttaacaggggtgggggcagatgaggaagttcaggcaacacagggcctgggtttcctgagttgttctgaattgtttgcccttttgtggaagctcaggtcttcagacccacttcctcttgtctgctagctcatggcctgtcctctgcactttgtgttactgtggagatgaagaatttgctcctattccatttatactacctcatgaacggggggcaggtgtggattcttgctggttctcagtggaagggtctggaaaggctggtttccttttcagtagaggaaggagagtagcgcacgaataggaagatggttctcttattattattattcaagttaggatacgtgtcctgaatgatgaggtgcatgtgctgtatcccttattccccttgactagagactgcatgaggtcctattgaacagggatgagttccagacaactttgcctcacccggcccatggcccaagaacccctggtttttggttggtcactatgttcagtcattgggagctcaaaggagaagggccagggatgggctccttgtcccactacctattgtaacatgaccagcagctgtgaaaatccctagacacctcccctgttagctctgctgctcgccatttgctggctgtgttctaatcgtgtgtggcttttgctggctatgcagtgacactgtctcaggggactccaccactgcctctcagacctgctccctgggaacagagcttcctgagtggcagccgggaccatcgagtactgcggaaagggtggcccgaatctgacccctatttagcacttgctgtgggtggtgccaggacaatcacttgcatgctgggcatgacgagttatggattatcttcagggttcctagggcgctggcttgggaaagatttccatccagtggttttgttttgttatgtctgagctgggaaagaaaggggtttacaagagcgtcaggaaaaggaagattgaagaggagatggggccataatattcggaagcttctggcttcctgtcggccttctgagtgccgagcactgccctggggtaggcccctcacctgttgctgagcacgctgaggaccaccaagccgctgagagactcatccctgacccatggcttgggagatgcctgtgaggctgacagggtctgccagggacacccgagggagaccctcgggcagcgaaggcttggctgttacttcttgggagacaggggtcagggagtcttggtgaccggggccaggctctctagtggagcgactctccgtggaggaacagagcatccgatgcacactcagggacatttgcaagctgcagtttccctgtcatacgcccttagctgttgggactcccctctgattccccagtgactagtgtggacctggagaccccagctcattcacctctttcctttgtctccacagcatacccagcgctgggaccgggcgtgaccgcgaaccctggcacctccctgtctgtgttcacggctctgcccttcaccacacccgctcccggcccagcacacgggccgctccttgtgactgcaggggctcctccaggcggccctctggtgctgtctaccctccccagcacacctctggtgacagaacaggatggctgcggcccgagtggggccggggcttccaacgtctttgtccagatgaggacagaggtggggcctgtgaaggccgctcaggcgcagaccttggtcctaactcaggcccccctcgtctggcaggctccaggcgccctctgcggaggtgttgtgtgtccacctcccctactcctggcagctgctcctgtggtgcctgttatggctgcccaggtggttgggggcacccaggcctgtgagggaggctggtcccagggccttcctcttccaccaccaccaccaccggctgcccagctgc

SEQ ID NO: 5522 - DNA, 2300 bp, Homo sapien
ccagtgcactccagcctgggtgatggagtgagactctgtctcaaaacagaacaaaacaaatatatatgtgtgtgtgtgtgtgtgtatatatatatatatatatatatacacacacacacacacacacacatatacacacacacacacacacacacacacacacacacatatatatatatatatatatacacacaataaatatgcctggagttaattctaaaataatagttaacattccccagatttttactatgagccaaactctctgctattattgcattaatatatttaacaggcctatgaggtatgtactgtcattatcactattccatacatgtgaaaactaaagattatagaagaaaaatcacttttctaaaatcacatacctaatagtaagtggcagaattgaactggtaatctcagagccaaagctcactctttatctttttgaaaaaaagctttttattttaaaaaatttcaaacataccccaaaacacaaggagatgtataacaaattcccatgtacttatcacccagtcttagcaactttcaatattttgacagttttattttatctgttatcatttcccttggcactcccacattttctttctttatatctggaatatttattaaagcaaacaccagacatcacagaatttcacccaatacaatagtagaaccattagagcccagtagaatacttcagtagaataatgctttaaaaatgtttctctagtcatgccattccctgtttcaaatactttagcacattcctattctacttaggataaatcctccacaggacctgtagacttctgagtcacatggcccaggcctcccttccaaacaccatttgatgaccctctaccttgctcaagaaaacactgggcctactgaccttctcttaatactggtaactccttatcactgagtcaggaccttcttttcttaagcccaggagactttttcttccactcattctcctgtgtaaatgtcctctccttagagacatcatcctatgttgattcagattccaagttctctccagtctaattctccttcagccgaattctttcttacagtgtcctattcttggctttcatttgatttctcacaattaataattttgcatatatttgcatgtttgtctgtctctgctactgggctgtaagagacatgtcagttttgctcactggtctatacctagtctcaacatagtacttggcatatagtaagcactcattaaactgtgaagtgtgtgtgtgtgtgtgtgtgtgtgtgtgtgtgtgtgtgtgtgtatgtatacatatatatgtgtacatacacattttagtgtatgtatattctcatgtattctacaagattttgggcaagtgtatcctatattacatataaagacagtaagagaataacttacagagttaaaagtaagtgtaaaaggagcagttatattaaattttgaaaagaataaactattaattatgtaattctccattgttccatgaaaacagatgtgactattcattagcactgactaatgaaggatatgttatttcagataatctatcaaaaaaaacccctctttccagcatataaaatctttctctccccattgtcctcaagagctaggactttataacctacttttattttggtcctaaaaatattttttctcaaaaatgctttagaagtaattgagatcatcaataagaagtttatgcagctttcttggaaatgttatgagttaggtcctagcaacctatctctaaggctatgaagcactgatagtctggcatctattttatctgaaccaactccctgcttcagaaactgctgtcttgaaatatcgttctgggctgaatatctattgcagtatgtataaaatggaattacaggccattgctacatttgctgcagttactggcatgatggattataggtactcagtcagactgcatttagcattatgatttagtaaagtagctgaaagaggaacatttgttctctttttgttttccaataatgtttttattagaaatatatgtacattgttgaaaactggaaaatgccaaaaatagaaggaaaagagtgaaaattgctgatgataccaccaccaagaaatcatcaccattaatattttggcttttttgttttcagattttttccattatgaaattgttgatatttgatccttttgacctataaaaatgttaatatcatatagcttactcgaacatatccaaataatgtcatatatattattttatgtaccaaaaagcatactaaacagattgttt

SEQ ID NO: 5523 - DNA, 2300 bp, Homo sapien
tctgatgaccaactatgtcatcaggagtgaaatcactgagtcataaagtcattgcctgttaaactgtttgtttgctttttaaagaaagtatcaaattgttagagaatggctttgttattttacattcccatcaaccgtgcagcagttaagtagtttctttgcagccttgctagcactcagtgttgtcattattttttattgtaactattccattgggtatatattgaaatcccattggggttttaatttttcattccctaatggctaatgatgttgacgtcttttcatgctctgattttccaaacatatattcttttcagtgaaatgtatattcatgtcttttgcccactttctaatttgactttgttcactcttaagttttgaaagttctttatatattcttgctactagtctttttcagacacatggcaagcaaaaggggaaggaaggagcacctttttactgtcaagttgagatgaaggtcaaggttccccattaggcctcctttgccacacaaaaagtaaatactctgtgtttttaagataaagtaatggatgccaagaaagactcaaattttttttatgtactaatcataaaaatgaactatgatttataattcttctcgtccattttcattatacataagttaagaaaacaaaatacatcatactcaataataagaattctgagtagaaactcaccagttcaccttagctatattttcccttttgggtttcttttacttttttttctctctctcctttttctttaaaaattttggagtgtgcagagggataagggtgagggagcgtggcaaggagaggagttcagatcaggacagggaatggaggagggcaaggagtgaagggcacaacccacagcctgggaaagagaggcatgaaacccagcgtgtcaggtggacggatcatggaatggggggccagcggaggttaaggaaggagggcccaaaggtaggggtgggaaaaagagaagaggaggaggaggaagtgcgcgtgtgaagagtgttaagaaaacgacaggacagagcggggaggggaaaagcgggccgagggacagggtgaaaggtgagaaaggagggtatgaggaaagagggtccggggcgctggggatttggggagacgatggagcgacgggtagagcagcttgggccgagccgcgggggtggaatccagacgccgggcgggggagggggcggcggggcggcgggacggtgggtgggggccaccaggcggcgccggagaccaccaaacattacagcgagcgagcctgcttcctggagggagtgcagacaaggaccaggagcgggagccgagcctcgcggcccggggcacggcgccgcccgcccctccccggcagtgcctcccgaccccctgccctccgctgggacatggcctgaggccccgcccgccgcccgggacccctcccccacgctgcccccggaccctcgccccaggaccgcggggtctcttcccggccccgccgcccgccccggcgagaacaggcccggcgggcaaggcggcggcggaccgagggaggcctggcccggcagcggggagaagggtgcggcgcagcccgagtttcccaccttttctcctggcccagacgcggctggggcggacgggatctctcgcgctctgcctcctcctcttgcttcatggagccatgcgcctgggtggaggctcccgagagaagctggcctgcgggcgggccggacgagctgcgcggacggggcggggcgaaggaggccggcaggcggaggaggaagcggcggggcggaggcggcggcggccgggaagaactagaggtattccccgggcggctggaggactgagtcgagccgggacccgagtcctccggtatcccagcagccaccggaggcagtgagataatggaggaagaatgtagggagacctccagtggaccgcactccttctagcgagccgcggaaaccatagagatcagggctcagccggagggccggcccactgctgtcacgtggcctccatccgtgcgctttattggctggtgctggctttacggggttgaattttggacgctgcctgccattcgtgggaccgagtttcaggcagctggaataaagagagacatcgggggaaagccgcgagaaggccagcgtccctggctgggagcagagctagccgagtagggcgcccggctgtcaaactggccggcgcagtgcacgctgggccgccccggagcggtcgcagagcccgtcgggagtcgtagtccgggacgggcccgcggcattgtccgcgacg

SEQ ID NO: 5524 - DNA, 2300 bp, Homo sapien
ccaagcaaaagggcaaaatttttttctacttgagataagaaaaatatagagtgtgacagaaggtattctaccaatataaaaacactttaccaggaaaactgagaagggggctgttaaccttccgggaaatgtaggtcttcagtggattcctgttagagacataaaaacgtagagagaagactttcagttaaaagcctcctcccttcagcaaagtatattctgattccattatcgtgttaggctcctatatagttataagtaatcccatgcggttttagaattcttaaatattcacacacatagtcatctgaaaatgaataaatccatgaatgactaaacaaaatttattcctatatcattttcaatatccttaaattatgcttacatccttaaatcggttgcctcattctgaaagcacatagtctgtaactcataaaaaacacctgtcggccgggcacggtggctcacgcctgtaatcccagcactttgggaggccgaggtgggcgtatcacctaaggtcgggagtttgagaccagcctgaccaccatggagaaaccccgtctctaataaaaacagaaaaaattagccgggcgcgggggtgcatgcctgtaatcccagctacttgggaggctgaggtaggagaatcacttgaacttgggaggcggaggttgcggtgagccaagatcgtgccagcctgggcaacaatagcaaaactccgtatcacaaaaaaaaaaaaaacaaaaaaaaaaacccactaaataattcatttagtatgggagagtgtgaggaagcagaaaatttaaaaaaaaaaatagaccagcaataatgtcactttttcatgaatttgttagttctttctgagctccacttacagttactttcccattcttccctgcacaccgtcaacacataaggactcaaattaagatgatgtatatgtttacactccaaaattttttttttttttttttgtgagcatggggccgtattttaatacaagaaagacattgctctagaacatggctcgcctttgcttcagggcctagcagtttattttagccataagggtaagggagcaggtcagaaatgacttttagtgtaatcctatctgtaattaaaaatacaaatgctgtcataagatcaaatgttatcaaaaatcagtatttaaaattaaatttacccccaaatttctttcaaaaaaaatttgtaatgttctttttcagtgaagcctttgcactgctagagctgaagaatgtgatcaatcggcttgttgaataatcccgcacagtaggtattccgctgaagccaactctagctgggggctcgagagcgaaagacacagatggggccctgccgcccctcgaagagtcggatgggggcgcccgtccccggtgcatcaagaggctggccccgccaggggcgagcggctggcaccgaaccccgcgcacctcgccgcgggcggggctgggccgtagtcggctcgatttaaggctggtatccaaggctgcggccggtcaggcgaggcgaggcgaggcgacgtgagcgagggtgcttagggagaacagccgctggcagctcaatgctgggtggctaacgctcgacggtgcccggcagcaacccggccgacaccccgacccggatcccgagctgcgtcgcggacaatgccgcgggcccgtcccggactacgactcccgacgggctctgcgaccgctccggggcggcccagcgtgcactgcgccggccagtttgacagccgggcgccctactcggctagctctgctcccagccagggacgctggccttctcgcggctttcccccgatgtctctctttattccagctgcctgaaactcggtcccacgaatggcaggcagcgtccaaaattcaaccccgtaaagccagcaccagccaataaagcgcacggatggaggccacgtgacagcagtgggccggccctccggctgagccctgatctctatggtttccgcggctcgctagaaggagtgcggtccactggaggtctccctacattcttcctccattatctcactgcctccggtggctgctgggataccggaggactcgggtcccggctcgactcagtcctccagccgcccggggaatacctctagttcttcccggccgccgccgcctccgccccgccgcttcctcctccgcctgccggcctccttcgccccgccccgtccgcgcagctcgtccggcccgcccgcaggccagcttctctcgggagcctccacccaggcgcatggctccatgaagcaagaggaggaggcagagcgc

SEQ ID NO: 5525 - DNA, 2300 bp, Homo sapien
gcctttcaaaaaatagtatgccctgttttcctactcagtctggaggttccattaaagagtatttctggcaaagatttttagacctgaaaacacactccaaaatatattttcttctgactccattcccagagtttttcctaccgcattcaaatgatttctagaaatgtttttgttgtagccttgatcaatttcagtcgataaagcagcagatagtaagggaacaattccacgctccccacccctgactctgcaacacagtgcagaattccagttggcaataaaaaactagtagagaaggaactcactgacttcagtttgtaataccgtcagaagaaactttaatcgtcacatcctttctgctcatttgcaggattcctatcatctgtctccacgtgataacactgaagagccttcacattgatgcaggcccagggcctcaagtgcagagactgagagctctgcaggacacagcatggagccgccattcctctactgggtggaggagcatgtgtcctctgaacaggggatccaagccctgagatgttctttctcagctgtcagtgcggcccaggactttctgtggggatgctcagacagcgggccggaggacttttagccaccacctcccatggccagtcttcacaaattacccttggctaatttgactgtctctcctcctggggtctaggacttcaaacatgtacagaagcgattgcagaattaagacaagacacttccacaatatattttttgtatcactggctcagaaaaagactcattcaaatcctgtatcaaagccacgtgtgagaatcttgagaaagcatcagctgactgacttgacaagggaggaagcaaccaaaaattctgcgcttcttcagtatctgagtatgatattttgcttcaacatccctcttagatgaagttattgattgaaaatcatttaagtttgccccatggtaaaagatcaagtcctcagaaagatctccaaagtgtttacggtttgttttgttttggtaagtttaccatgattttgcttgaattgctctccgttgatcttctcagctaagatggaggtagagagttgcacagtggaagagggctgcatgtaagaaggcagttctgtctcagaggacaaaaggcctgggagcacccagacagacagtcactgcatggaggtcactcccctcccagtggccactgtggagacatttcacagaaatgcttgctggaccattcaggttcagagttgggacaaaaccgagaactcatggggatattggacaggagttaggaaatgaccttctcacacaactggggcagtgggggagaaccctgggcttgagacttgcaatccaccacttgcccctgcccctgcccctgcagtgtggccgctgttaccttttcctgcaactctgccttcttgagtccaaatgtcttcgaaaggggcaaatgctcgtaagtgccgacagggtgtgtttcagtgaatgtttgcagtgtgcaccggtctggctgaaggcctcttcccttccccaacaccctcccatcgtgcaaaattaccctgcccagcagggagtgacttgtgtgtctcagaagattttgttgctgtgctctgagttctcactcctcatctcctttgaccagtttcttctaatactccccttgttcacaacacagaacatgagtgctctttcctatcattttgacactaataaacggacagtgattctcagtgtggaaatgagaatgaagttttttttaaagacaggctacaataattcccatgcagagaaccacatgcgatgacactggattccagacagcaagaacgtatggtgaagatgaggccaacagtgagctgagagaggccagccagggtgtgtttcagtgaagatgagaaacaatcagataacacctgtttcctccaggaaagaaaatgtggccagggaaaagagatgggaggaaggccggtcattgcctattccactgtgcacagtttgaatttggagccatgaaaagtattgcttggttaaattaaaatcattcaaaagataaaacataaatatttaacaccagcacaatatgctgggaaacaaaatgaaaggatttctggtctcggtgctgtaggtcacatagccactctttcctggattgaggctttccagcaaaggggctgggacgtaaggctggcctgctggtgtggacagagattccagcaacatgcatgacctgggggtacaaggattgcttcctaaacaatgataagcacacagccacctaatagtctggatcggctgagacca

SEQ ID NO: 5526 - DNA, 2300 bp, Homo sapien
aaaggacagagtggatggattgatcctttctagaaggagacaggtcacgtcattgtgtgtttgtagggagtggtgggatcatgttgtgctggtggccccgggaggatgataggcaagcctgaaccctgtgccatatcttcaggcacctggaaggtgcccttccatagtgttcagagagatttggactggagttttctagatcttagggaggagtggggagaagtggtctcagccagaaaactgttgggtgggttggctgtgacagagcatgtagtgacagcccctgggtgggcgaggctgggggctgctgtaactgccacagcccagagcccctcagctctctccctagagatggcttctccatcagttcaggtagctgttggctttgatttaacaggggtgggggcagatgaggaagttcaggcaacacagggcctgggtttcctgagttgttctgaattgtttgcccttttgtggaagctcaggtcttcagacccacttcctcttgtctgctagctcatggcctgtcctctgcactttgtgttactgtggagatgaagaatttgctcctattccatttatactacctcatgaacggggggcaggtgtggattcttgctggttctcagtggaagggtctggaaaggctggtttccttttcagtagaggaaggagagtagcgcacgaataggaagatggttctcttattattattattcaagttaggatacgtgtcctgaatgatgaggtgcatgtgctgtatcccttattccccttgactagagactgcatgaggtcctattgaacagggatgagttccagacaactttgcctcacccggcccatggcccaagaacccctggtttttggttggtcactatgttcagtcattgggagctcaaaggagaagggccagggatgggctccttgtcccactacctattgtaacatgaccagcagctgtgaaaatccctagacacctcccctgttagctctgctgctcgccatttgctggctgtgttctaatcgtgtgtggcttttgctggctatgcagtgacactgtctcaggggactccaccactgcctctcagacctgctccctgggaacagagcttcctgagtggcagccgggaccatcgagtactgcggaaagggtggcccgaatctgacccctatttagcacttgctgtgggtggtgccaggacaatcacttgcatgctgggcatgacagttatggattatcttcagggttcctagggcgctggcttgggaaagatttccatccagtggttttgttttgttatgtctgagctgggaaagaaaggggtttacaagagcgtcaggaaaaggaagattgaagaggagatggggccataatattcggaagcttctggcttcctgtcggccttctgagtgccgagcactgccctggggtaggcccctcacctgttgctgagcacgctgaggaccaccaagccgctgagagactcatccctgacccatggcttgggagatgcctgtgaggctgacagggtctgccagggacacccgagggagaccctcgggcagcgaaggcttggctgttacttcttgggagacaggggtcagggagtcttggtgaccggggccaggctctctagtggagcgactctccgtggaggaacagagcatccgatgcacactcagggacatttgcaagctgcagtttccctgtcatacgcccttagctgttgggactcccctctgattccccagtgactagtgtggacctggagaccccagctcattcacctctttcctttgtctccacagcatacccagcgctgggaccgggcgtgaccgcgaaccctggcacctccctgtctgtgttcacggctctgcccttcaccacacccgctcccggcccagcacacgggccgctccttgtgactgcaggggctcctccaggcggccctctggtgctgtctaacttccccagcacacctctggtgacagaacaggatggctgcggcccgagtggggccggggcttccaacgtctttgtccagatgaggacagaggtggggcctgtgaaggccgctcaggcgcagaccttggtcttaactcagacccccctcgtctggcaggctccaggcgccctctgcggaggtgttgtgtgtccacctcccctactcctggcagctgctcctgtggtgcctgttatggctgcccaggtggttgggggcacccaggcctgtgagggaggctggtcccagggccttcctcttccaccaccaccaccaccggctgcccagctgccc

SEQ ID NO: 5527 - DNA, 2300 bp, Homo sapien
ttgaatttgtctctttgtgtgaattacacctgagattatacctgcacaccaagtgaagaatcatatttcataatgcatttcatttggcttttaacacagttattctgttgaagacatttctgtaaagctttccagatacaggaaaagcaatttaataaacactatgatcaaataactactcaattgttcttcatcttttttaacttttaacaccttgcagatcattcctagaataaagtgtgttatccccttttcacaatgattcattaacctgtattaattgttctttacaaagttgtttttatatatcttactaactaccaatgtgaggaaaaggtctatgttgctttcattcagtagaaaacacatgcactttaataatattgtttcttaaaaaacacctattggtttgttttctttcagtttctcatttatcatcatttgttcatcttcactgaaagctgaacatatgcagcctaacaacaacttgaattaattgaatatgtttcgtatctattctccaaattaaattttcagttttgctcaccttttcatgattatattaagaaaatgtagccataattgcttgtataggaaaaattactgagaaagacattcagattaaatgtaggaaatgctctaaggatctttgaaaggaaagaaatgtcaggttctatattgtattcaaggaagataggagatgaaagtgtcagatatgcaaggcagataagaaaatcatttttaaaaataagtcatagacattctttttctgatagttattgaaaaatcctgttcatcaaaagatatcttaaatcaataaagatttcctcaaccaccagataaaattgttctctgtgtgtgtatgtcttattggaactgtaattatatttacaatactataattagtcgtattattaactctcgttactcactagaacattattggtaataagcagtgacatatcttaaagatttttcttgtgtcccagcgtctgcctagtgattaatatgttaagctccataaatgtttattcaacgagtaaattagtgactaggtactaagttcttattcttgtgtacagtcacctataaaatctttccactcttctctgggcaattggggaagctatgtatagaaaatggaagagtctctgtcagcctgggttactaagggtggacctgaactttctctgagtgaaaaaaaaatctattttactgagccacagagatttggatattcatattttatagcagtattaactaatacaaggtatttttaacctttaaaagaaaagaagaaaaagtagaagtgatactaatttcccagatgccatccaactcctctttcaccaatagacagcattgaaaggcgggaatcagtgcctcctcctagtgatagtgcctcaattgagcagggcttattccgagctcagtatgcaacatcccgacagggcaaatctaggtattgctctcaagtcactatccaacatcccgatgggttgaatggcatgccaaacacagcaataagcaatataaaaaagccaggccgccccggggtggggccacgtggcttcagaccagagagcggagctaccttggcccaagcgctgcagctgcctgaacccccgggcttcgcagccttgcttgttttctctgaaccgcaataggatggtgttcgcagcgattcaaagggtggcactgggttggacgttttggttacgagccagcctattcccacattgtacgtgaatgtttaatgtgctctcaaaacatggaaaataagtttagtgcacatagctaaatcacaaaacatccaatttctctgtttcctcaggaagtcattactgcgccaccacatcacgtgaccttaacatgagcaatgtatttctctgccttgacatttaaataaactatataaattaagataagtagattaggaaatcgttcaaattataccataatctgtacaaatattgtgtcccctgccaggcaagggacagggtgcgggcgacggccgcgtggccaaggccccgcaggaaagcgcccaggtctccctcactctccaggtgccctttgcacccaacagtgcgtgtgaggaacgaactgctgtttgagcctcccctgagattgtgcgtagcctccgtgtaaatgtaatagcctccatggcttaattggctatcaagcgaattttcacagatgaaagcaatgttaggttaggggacgacggtgcagccacccagcctttaccagcagcgtgctgcagacgaaggcagtcaaggtgtggaggtgatcatgcaggt

SEQ ID NO: 5528 - DNA, 2300 bp, Homo sapien
gaacattagtaatgataaaaatatcatttatagcggcctatcatatggattttaaatacatcatctctgtcatgataatcccatgatataggttctaatattaccaattttcagataaaaaaaaaaaactaaggcccagagaacttgggtcactcaattaataagcagcagagctaattagagtctgggtccaaagcttaagcactcttcgtcttctttatatttggctttttcctagccaaaaacatggaggcattgcttacttttactttatcattgttatcttggcataacatcaaaataattaggagctgatatacctaagtgtataaaacaggataaaattaattgatgaggaattagataaggaaaataaaatcaaactaggggcaaatttcatgtataaaaatgtgtactgtgccatacattttgtaagtggagtctctaaagattgcttcataaggaagaagtgaataatgactttgggaacacttggtaacccctaggactcaaaagattgggtgtgagaagttattagtaagcatatgtattaggcaaaatacagtgagatgaacctggaacaaatgctcgctgaatgcacttagaaatattatcaggcgactcagcctatagagcatacgggttagaatgtctattttaagaaggagcggatatttactaaatgctaatttgagcaaagttctacaaaaatatcactgaccatgaatattcaggcattgacatgctacaaaatagcatatcgaaaagaacatctgttgccctaaagatggtttcctgcacagaacgtctccaaattttcagcattcataggctggccccgtttcttcttggttaacatttagaggcacgcctaaacttagaggaacacctctctaaaccaaggagacacttaaagagaaaaggagtaaagatggtgatgggcttataaagagcaatgtaatagtgtctttgaagcaaaagctaacttaatgaaaacgtggtcccaatttccttaaatctggatcaccgtacgacttctgtaatacttattatttccccagctggcaaataaactggagttcaagtgggaaaaaacaaggtattgttcagacttatgatttttggggtcaaagattctgagcaataacctattaaaaaacccagcttttgatttgagtatgtaagtaagtacatgggaggaacgtatggatctggagtggtggtaaatacagagcatgtttgcttcgcaaagcagattagctcatacttaataatagagtaaatctgttgggccatgactcaatgcacccaaattctctagattgctatgtctctactcgctaagccttcgggaacaacaagcacagaacttttagggtgctgtctcactgatgtcggcgttagctctggtagtccaggtcaagattataccaaagattcaggacttaaattcctgcagaatgtaagcccctttccaagttctctgctttactgtatcctgtttattttcaaactcaaatggaaaaaaacgaaacaaaaaccttgggcttcaagaggcatcctgccgcaaggcccagcgatgtgaattttcaacaaccgtctcaggcagatttcatgctgatggttcaggcactaaactttgaaaaacacagtatcacagagtagggatggtgatgtaagagtcatctgtaaaagctgtgctgttttggcagcctgggaggctaaggtttagtctaggcgactaaggtttagtccgggctgtattcacacccaaaacaactaaaaaagcggaggagtctttgagtcaatccctgaagctccggctaagaggaaactcgcccacgctccagggcagcgacgccggctccacctcagccacggctgtctcaagcttctcggggttttccgccggctccacccgagccacaagtctacaggactcctcggagctttccgccgggacgcaagacccaccgccagaggttggtacctcctagagaacagcgaagcgcatcccgagggccgccggccggaagcgccctccagacccgccccctgccctccggagccggaagctgggcatctgcagctggctcggcgcactccactgaccgtcccgacgatgctacgcgcgcccggctgcctcctccggacctccgtagcgcctgccgcggccctggctgcggcgctgctctcgtcgcttgcgcgctgctctcttctagagccgagggacccggtggcctcgtcgctcagcccctatttcggcaccaagactcgctacgaggatgtcaaccccgtgc

SEQ ID NO: 5529 - DNA, 2300 bp, Homo sapien
agatgccctcccttccctaagcgccagttttacattgctcatatgtaaaatacaggaatggggaaattggacaaatgatctcacaacctctcccagatctaaacaatcatatatttcttttccaggaagtagcttacgtatttgtccttaacttcctgtttcaagaagacagctttttgtttttagatgcaatataaaaacaaaataacaatcacgcaaattgctatttttctttttttttttttgagatggagtttcactcttgttactcaggctggagtgcaatggcgcaatctcggctcactgcaatctctgcctcccgggttcaagcgattctcctgcctcagcctcccaagtagccgggattacaggcatatgccatcacatctggctaattttgtatttttattagagacagggtttcatcatgttggtcagtctagtctcgaactcctgataccaggtgatctgactgcctcggcctcccaaagtgctgggattacaggcatgagccaccgtgccaggccgcaaattgctatttttcaattcacatttactttaccttttcttagggcaagatctggcagagtctaagatatggtggaaactaatataaaaggatttttccaatgaaataagaataggatgttgctatttaaacttcatatacatttaaaatgtgctagtttgtatgcagaacagaaactcaaactcagtatttgcccctagctgcttacattggaaggcagtggtggcagtttactcaaaatgagtaagaaaataaatcagcttacaactctagactgtacagacatgcaggctgccttttacgtttctgactcctgatttatttttctttcccaccttcccacggcgaagggcagtcaatgaatactcagatcaagtgtctgtctggaaagctggcagtcttccagaaatacaattaggtatgaaagaaaagtcccatccctcacctccatagaatattactccaactctttcacagcaggaacactagagtgggaatgagaagtgtggcccttgtgtgttacgttacttcttttgagagtatggtcatatccatccgtttgtagcattacacaaggagtcagttaaggtacaaggggtgtgagacccagtgactgcccccaaagtgcttgtcactagagcttctctccctcacctctacttggccttgacatttgggttcgttcagagggttgccccatactgcctttgggttcgttcagagggttgccccatactgccttctggtaaaatcttggcgccctaggcctaagcctgctcatcttgtgcctccttttcctcctcctcagggcccattccagtggaacagaagtgctactttgggggtggactgaaacaagttgctgggcttccattggccattgccacttgcttgtcgttgtgaggaggggccgtgcctccacaggcccatacctgtaacctgacgatactgttgtgagcgggaatggaggaagtgcatggaagcccctcagcacgatgcatagtgaacagacaagctgtgaaccttgggagttatcaccatgtgtgatgatgctggtgaagaaagcctgcactgaggaggctgtcagcctgggtttgaatcccctcatttggaatataatcttggcaaagtctgaaagcctcaattgctcgtttgtaaaactggaagatagtaggacttgctgcccggggtcggggcaggatggagggggcccatgagaattaaggcagagcccagcggagtgcattgtaaggatccatgagtgtgaaccttcgtttttactactgcatatgaggatcctgccaacaaacctggcggcttcaagcatccttgcccttaaccaaataagctcttaggtcctagaggcaggaagacttccttgaagaggcgcgggaggctggtgaggggagtggaggacgctctgggaccctctgggggtggggcgggcggggtgaacttgaccccaggccgcgtgccgggcgtgccatctgccgctccgctgcaaggtctcgcccgggaccggggctggcggagcgcgcgcccgcgagtaggggccgggccggggaccccgcctaggcggcggcggccgggtccccaaggctgggcgctgcttgcggaaccgacggggcggagaggagcgtggcgggaggaggagtaggagaagggggctggtcaagggaagtgcgacgtgtctgcggagcctttttatacctccttcccgggagtccggcagccgctgctgctgctgctgctgctgctgccgccgccgccg

SEQ ID NO: 5530 - DNA, 2300 bp, Homo sapien
ttactgaataactataaggctaacacacttatgtaactactacccaggtcaagaagggaatattgacagcttgtgtaccttctctgttacagcctgtccccagaaagttaggatagccacaagctttctttgcatattgaatctttaggcactccagacactcataactgctcagttaataacactaattgtaatccttgaagaggaaaaacttaatcctgctaaaaagtaacaaaaccgatctactagaagggaaatattccaagtgatagatgaataatttgaatcaaacacaacactctaaaatctctgaatatgtttatgaagtggtagagtagctacaaagtcaacaaaatatggaggcttttgcataaatactttgttctaaaaaccttgaaatttagtttttaagaaagtaccaagtgtaacaatataaaaacccagagatttaagtaacatgtgtataaaagttttataatggatatgcattctatattaaattatgtgatcaaaatgatgaaattaataattccaagtatctgcaaacaggtggttttagattactattctttattgtttcatatgagccatccaaaagaaaaatgtcagtagaagattcaaattataactgacttaaccaaattttaagcacctaagtgaacttaattaaaatttgcagaatgcttgaaaatacaattaacatgtattggtaaagcttatggatttaaatttaaaagtcagctttagaaaagtttagtttcatatgattaaacttagattagttgctgttagaacttgaatcttcaagaattataaagaccagtagaaaattctatgtatgcttgaggaagagcttgaacattattttgaagtgtttgatgtgaaaaataaaattgctagagttatggaatcaggtgcagatttctttttttttttaaattgagatatttttgggaattttcatacaaaattatttttcctctcattttgaattttatttttattatatataagaaaattttggactcctccagatcccttccagttcaccctagcatgccatctatatagatggcattttaaaaaatactgtttcataggaaaagttgagctttgaattaaacaaatattttgagaggtctgcctattacagtttttgttagggctgtctgtagatggtttattttaataaccatcttagtactaagtttaggtgccagatcatgtagtactgagtttagtaatttggtaaaattataattttagtattatatatttagtattattatatatttaatattattaaatttagaaaatgctatctcattttagttgagaaacagttggtggtggttcccaaaatgttcaagatcccaacctctagatcccttgtattaaaagtgttaccttaaattgtatttagcagcaaaatgctgttaatggagaccataggttaataatatagttttattctttggaaattaaaacaggagtgactgataatttctgtttcttttaggaaaagattgtttggaaaaaggcacatgtcctttggctaaaacttaatctgtgagcaacagcaaaacagtgtttgccacaatctgttttgaagttgtttaccttctgtaggctaatatcaaagcactatggtgcattgtttgcttgtgaaggtggagggccttagatgattttgtttttcaactgttgataaagtggtatgaatttggatgtcaaggtgagcatttaaactgaaccttttcatgaagggagagggcacaggatgctgtaatccccaaatacatgctcttaactgacactgagcttagaacatggcatcttcctttcttctatcttacctactataaacaagattaaataaaagcagaattgaatattgggaaagttttttgtggaaggaattactattctattgattatcatataaattgaagcaaatatccccttaaaggtaataaataacatattcatttccaggtgttcttctctatgggcctccaggctgtggtaaaacgttgattgccaaggccacagccaaagaagcaggctgtcgatttattaaccttcagccttcgacactgaccgataagtggtatggagaatctcagaaattggctgctgctgtcttctcccttgccataaagctacaaccatccatcatctttatagatgaaataggtatgctatgttttctatatgagtatttttaaaggccatttttagagatatttagataaccagatttagtttttaacatttattaggccatgttaataaaacaa

SEQ ID NO: 5531 - DNA, 2300 bp, Homo sapien
agggaagggggcatgggatgaagtctgaaggaagccaggcgcaagattccaagtggagtcacacagtgcttaattagtgcatcaagttgtgacaacacatgtgcagtgttgtcaccaggaaagctcacgggagactcagtccccaacatatttattgggggctggttatatagctttcctcttcccttaaatgtaccaaaattctagactcccagaaggaaaatggatgtttcaccataaaccatattgtttgcacaaacagtttaggcacagtgagctgttcttgtcaagaaattgtggcactcttctgaaatctaagttcccacatgccagccaagggccaatcttgcaaatatgcctttctaaggacaacagtctcaggcctactttgttaactcttttctgtacgcatttgtttagtaaaacttttatgtatttgcctttgtggtgtataaagcgtactgctttaagtcatgtggatttttgttttatagagtttaaacctaaattttcataatatggtatgataacacaggatactaaatcccaggttttccattaatggccttggcaaatgatttcctctttgagtctcagttccctcatgtataatctagagataataatacctactttacctacttcataaggattattttgaggatgagattgatgtaatgtataagatcctatatcaatattttgtaacaataagtatacatttataaattctataaatagaaaatatttgcctaatacattaatgttatattgctataaataagtagaatgaagtagtcccatctccatatctagaaaataaaagtctgcaatgtcttaatatctgtgtatacagagacatacacacaccctagaattaagcctgcatttgaatttggtttatagatttacaatggtaccttcttggaaccctgcctatattaatttctgaataaatctgtactaacagacttagttttttgttgctgttacagtgaaagttattttttttttcagatctggctgctggtttgcaccttccctttttatcatttttttttacattttgaaggaaatgaatctattgtaaagtattgcttctgattggccccaactccagctcctttcaggacaagtgccagtcctttcaggacaagttgaatcaggtttttcttgtctattttgaaaatacgtatgccctgtttttatttataaagatacttccttaagttttaacatagttgtaattttttttttttttttttgagacagagtctcactctgtcacctaggatggagtgcagtggcatgatcttggctcactgtaacctccgcctcccaggttctggcaattctcctgcctcagcctcccaagtagctgggactacaggcacacaccactacacctggttaatttttttttttttttttttttttttgtaattttagtagagacggggtttcaaccatgttggccaggctggtcccgaactcctgacctcaagtgatccgctcaccttggcctcccaaagtgctggattacaggcgtgagcgaccacgcctggtccataggtttacttttgatggataaaattcagaagctatgttttgtaagaccttatttctaaaattaatttctgtgatgcttgacaacatcctgtataaaataggtacattcctgatgagctctttcccatcagccagtgctaaattatgtctcagctggttctcagtattcttgcagcagagtattttctccttacaagtggaatgaatttagcttattagacccttgcagatttttgagtacctgacttacagatttttaatagtagatagttgactattaaattcctttttccagtttcatagcagtttatttcattactgcttggaaaagtctttacttatgttaatatatgattttaacttatttatgtataatcatcagattaacatttgtaattttgggagcgttctttttactttagtgagtgtacatttgtagtaaaattcatgttgaccttaacttttgccaggttacttggagtgatatagcaggtttagatgatgtcattacggatctgaaagacacagtcatcttacctatcaaaaagaaacatttgtttgagaattccaggcttctgcagcctccaaaaggtatggtaaaggtatatattcgcctaaagcattaaaatcctagaaaacattgaaactttctgccattgtagaactagtttttgtgaaatcagattctcaagaggatgctgagatctatgtgaacagtttcttaaaataat

SEQ ID NO: 5532 - DNA, 2300 bp, Homo sapien
tacttcctatgagaagtgaaatattgtgtaacccgttttttttggaatccatgctgatggaagatagcacactttggtttgttccatgaagagagatttcagttaggtgccttctcctttttggcttcttttgctttctttataattaatataatagccggacagtgtgttctttgaatgaagtggtgatatcttaacaattattgtatatccaatatatagtgggcgtcatatatagatgttcagtaaatgcaaattgaatgaattaaatcatttaccatccctaggccaaagtttcttcctccaaaatgaaggctttcaattatttagttgttaagtttaaattaaatctaattattgtgaagtgaatggctcctagtggagaaatgtggaaccttttggaaatccttcagaagtgactgttgcaatgattgaatgggagatttccttcagttacaatttatctgttgaacataatttttgaatagcctctgttttgtgtgtggcaattataaacgtctgttttgtgtgtgacagttataaaggtagataagatatacatcttgtttataaggatttaaactctagtcgagtagatatctcaaaagcaagacttttttaagatagtgtaatagggcgaaatgaataatacgaagattcatgtgatttgaaaggctttatggagcaaataaagttgatttttgaagttaggatagaatttgactaatcctaggtgaatgagggtaaatggcccatgcaggatactagacagatacgctgaagggaaaatatatgtgggattttcagatggtagtgactccagctatttatagagtccctttgaaaagaggtgaaagagaaaatgcttacaattgactctggagctagattctagattagaatagttttgaatgcttgggaaacgtataaaggaaatactttggggtcttttgattagagagaaggagtatatatccttgagtggaggtgaggggtataaaaggaaataaaaaatttttggagctattctagagggaggaaggtgaagaggctctttaatttagtagtagtgagaggagaattttagagctggaaggaccatggatattaatctttgcagtacctaacttttatctgctgagccatacaaattctgttttttttcatgtttatgtaagtacaaatatatattctctttttcttatatatcccatagcattcagcacactcctgtgctgagagtataatggcagtatttgaagctaagatcctatctcccaaaatgtgatagtcatatcatccctaacaagcttattcttccgggtagttattgccattgacagaggagtgtatgtcttctgtaagcctagctttgattgatgtagctgttcagggatatatgcaaaaataggcacatttatctcattttttttctctttagcttgggtgagtgctgtattcttgtagtagttgtctcagttcaagatttttccaagttctattgcttcctacttagcccggttgttgggaacaatagtgtggctcaaaaaagttaataccacttattactgaggaaatggcatgtttaaatttaagcaggccttgaaaacctttaaaagtatgtatgaggaaaaagtgagtcagttcacaatttgaatttcactcaaaaattacctggtatatgatacagttaatagaagaaattcttaccgtcacattagtattgttgggctgcctttcttcagttggattagtgttatagttgatactttcctagactctgaaatagttctttaaagctgttttgagtaaataccttaagatatttactgtatttttcaaataaaatgattaattctactaccaaataaatcttaatttctagtctacttctagtttgcaagaggagctttaaatgtatttgtttacttaacatttaaaaatccatttctccttaaaatgaaacactttttttaaggtaggtaatattttaatttgactagaagttagtttttctttcttagtttaagctactttgttagtcttacaattttaataagtatagttattacctagtgacatttctgtttgtttttttaaggttaacattcaagatggtacatgctgaagccttttctcgtcctttgagtcggaatgaagttgttggtttaattttccgtttgacaatatttggtgcagtgacatactttactatcaaatggatggtagatgcaattgatccaaccagaaagcaaaaagtagaagctcagaaacaggtatgattgaaatgtttgaagatc

SEQ ID NO: 5533 - DNA, 2300 bp, Homo sapien
cacaaaacagaggctattcaaaaattatgttcaacagataaattgtaactgaaggaaatctcccattcaatcattgcaacagtcacttctgaaggatttccaaaaggttccacatttctccactaggagccattcacttcacaataattagatttaatttaaacttaacaactaaataattgaaagccttcattttggaggaagaaactttggcctagggatggtaaatgatttaattcattcaatttgcatttactgaacatctatatatgacgcccactatatattggatatacaataattgttaagatatcaccacttcattcaaagaacacactgtccggctattatattaattataaagaaagcaaaagaagccaaaaaggagaaggcacctaactgaaatctctcttcatggaacaaaccaaagtgtgctatcttccatcagcatggattccaaaaaaaacgggttacacaatatttcacttctcataggaagtaaaaaactgacttttctagtctttattccacaaagttgaaaatgcagttgaaacgtgttatatcactacgtggggtatactcacagaggaaaataatttagacaagataagggttttattaacctaatctgtgaaaagcggtggcattccagtaaaacgttttcgttttagagttggtagtgataaaactaccaaccaagtcatctactggatattcattgaactacatgaacaaattagggctgttatgaacacatcccagtcatcaagatagtaacaacttttaatcccataaaaggtcaacacacaaaacccgtttatatccttcccaattctgaaatttttaatgtaataaagacttaggtctactaaggccacttgtaaaatagtagtctacctttttaaattacttcaaaatccttcaatgaaactgaaacttgttttgtagactgtaactatatatactttattgtacactcatgtatcattcatttggtattgatatacctaaaatgtaaggctgttacagcagcaataccatcaccagcgaacatacaataaaagctgcatgcgcatacaacagcagggagcgtatttcaatcctgtataaacattaggttcaacaaaatgaatacacaaatatgtacatatacgatgatagtgctgtatgcaactaagaaacatcctaaaacactataacctagagttatttgttaggcaaatatggtatcaggtcgtttcattttaagttctccatttccgagtggaaaaccgtgaaatcgtactacctcatctatgagcaatttattgacatgtatagcattcatagcatagcattcactgtagtatttctctcctaattcattgcagtatttcacaaatcgtttctcaaactcaaaagtcccagttttgcaggcataaaggccctacgaatacagcctatgacaatgaaggcctgccaatcttcacaaagagggcaggttattattaacatcaccatcttttgtgaaagcgtgcccggccctgaagaaccaccttcgattttgcacaaggtggtggccgcgcctgtgcgacaatcagacctggttcattccagccgccttcgtctaggttcgcctggttctgaagtcttccgggacgacctcaaacccccacagtgaccaggatgccgacaaagattccctcgggaatggcacgagtcttggggaagagctaagcagaccctaagggcccaggccgggccggacgccaaggcgaggcccgggacgcccttggaggttaatcctctagatactaagggctgcggggcgcttgggggcggcactgaggtagggcgtgggagaagaccggggtgacctttcctccgggggttcccaggtccgagacggtccttaaaggacctcagaaggatacgacaaccatcccatgaggccccacgggaaccagctactcacccaggggcagaaacagcaagagcaagtgccctcagccggcctcacacaggaaggaaacgcaacctgggagagaacgcttccggcgggaggcgcggcgcactccctcccacggagcatgcgcgacccgcggtcgccggcgcggagggggcgtgctcccaggcttagaaacagtgagggagagcaaattcgcgcacctgatgtctgcttaagctacctgctagactgagactttctgcgaagccggcgtgtctgcgagcagcactcgctaaggctctgcgtttaacagacactacctttgggaaggcgcttatcacaaaaagtccctgcccttctcgcgggctcgggg

SEQ ID NO: 5534 - DNA, 2300 bp, Homo sapien
tcttgcctttagtgaccctcccccttttagccctgccaaaccatgtgtccatgagcctcccaagcaatgattcagcttgggatcatccaaggacccagtggagagtctcttgaaagtctgctgagcactgatagcctctgttttttgttgttgttgttgttgtttgtttttaatgaacattgtcctcgtctcataatctttccgttcttctcaaaggtctatctctctaaatagtctagtaatcccaaacctagcttcacatccattttttttttaaattaggaatgtaggcatgcacgtatataaagccttaaatactaaacaggcacgggtgtattcaattccattctgattcctgtccatgaacttaatcatagttttcaacattcatgcatccctttcatcccatcctttaaagccttgtgattttggcatttcatggtcttactttcaactagattttaaagtttagctggtattaaattaccatctcaaagagaaaacgtaaagtacaaggtatgaattagacagacctatgttccaatgaaattgttgcctttatttcccaagtatatgaacttagaaaagtttctctaaggtttaagctttaaaatttgctcatttgtaaaaacggagaaaatgatagctattttagaggattttgggggagatatttaggttatgcatgtaaagcacatagaagcttattgccccaccccagcagacattaactaggtattatcttcaccacattattacaagtttgtaactagtaacattcgttaacaatcaggctgcaaaattgttattattattgagacaggggcttgctctgtcgcccaggctggagtggagtggcttgatcactgcagccgtgatctcccacgctcaagcgattctcccacctcagcctcccaagtagctgggactacagacatgcgccaccaaatccagctaatttttaggtggttttttttttttttttttttttttttttgtagagacgatttctcattatgttgtccaggctggtctcgaattcctgacctcaagtgatcctctcgcttcggcctcccaaagtgttgggattacaggcgtaagccaccgcgctggccaagctgcagaattctttagccatcaaagatgatgcctcaagtagaaaggcacaagctgccttcctgaggaacacagggagaactctcattacatcatagtctcaccgactctgtctgaaggaagtgatgcttctcgtatctcaggagtgtctaatgtcatctggcccaccggcagtttgtgtattcaggaggctctggctttcaggtttgctcccttgggacctcttgtgtcacgtcgctcgttctggaaaggaaaaggggtgaaagaaaaagggaaatcaccaaaatgcaaaatctgttaccagatgccctattccgtcctaactaccgagtctggtggcgtgggctgctaaatcttttcgcggaaagattgtcaggcgccaccccgaggtgtttgtcagcacagagatgggggagaagggtgagctcacccgagaattgaaaggcaggtggtgagggatgaggggtgaggagtggagggtggccataagcttctgcgttttggctaaagtacagacacaaagccgcggcgtgagggtttgcacagagtggtgggaaggagagaatgtatttgctgggtacgcagagcatttctgcactctcaagaaggctgcccgatttgtcagggttgcgccccgagcccgcgagaagggcagggactttttgtgataagcgccttcccaaaggtagtgtctgttaaacgcagagccttagcgagtgctgctcgcagacacgccggcttcgcagaaagtctcagtctagcaggtagcttaagcagacatcaggtgcgcgaatttgctctccctcactgtttctaagcctgggagcacgccccctccgcgccggcgaccgcgggtcgcgcatgctccgtgggagggagtgcgccgcgcctcccgccggaagcgttctctcccaggttgcgtttccttcctgtgtgaggccggctgagggcacttgctcttgctgtttctgcccctgggtgagtagctggttcccgtggggcctcatgggatggttgtcgtatccttctgaggtcctttaaggaccgtctcggacctgggaacccccggaggaaaggtcaccccggtcttctcccacgccctacctcagtgccgcccccaagcgccccgcagcccttagtatctagaggattaacctccaagggcgtcccgggcctcgccttgg

SEQ ID NO: 5535 - DNA, 2300 bp, Homo sapien
cacacatgcagattgattctcattctctcaaagtttgaaaaacaactcagtgcttcaacctaggtctcgttagatattttttgactcaaattgtcgtctgtagttctacttcctaagggaaatgaaaaaacaataaattcccagactggtgttgatgctcattctctttaagcgggtcgactacttgctttgtagatccttgacgggtggggtgcggggtaggagtgcgatccaactctcagcatttccgaatcagctctctcacggtgacaggtcagcccaatcggggctgtaaacagacttgacaggtttgttctgggctgacggccattgactaggttctcagaccagataagtcacttggctgagtccacagtaggtggggcgcgctcaccagctcaggggtagtgactggacgtttgttgcaacatcggagaatgcacgctctgggctgcagcaggagataccctcaagcacagaaccaaaagggttcaccctaagcggcagggcatcagcgatggagaggcccgagagccctagcgcccagctccttttcccacgtttgggaaggcgcagaataggtcgatgtagagcaaggagtgagtctcaggtctcagtcctttggcttgctcttagggtagcaggcgaggagtggcaccagtttggggactctctccccgcgttctgtaagaatcggcggcagccagcaggcggggaggcgggggcacgtgtttggatgtgggtgcttgtgtaaccagttccccaagcgccagccccgacagcgctccttcgggaggctggtccgagcccctgtttccgccgcggcgcaggaagggttggggttccgctgcctgcaccaggcaagagcaccccgagcaaaggaagaagacgacttgcctccggagctatcactggggagtgggaatttggaaagttccccaactagggacacacgtgacctccttcggaaagtagttccgactgtggcccgtgtatccttccacctccttttgaaccctcctaggtctcctcgccccgcccactcgctgggctgcagcttcctaccgttccgtactttccactcaacccggtaaccccaaacgtgcacggtccggccggggcgcgcggagcctggccccgggcgatccatcctgccgggttttcacggcggccaagggggggcggggctaggtggtctctgagaaccgagcttgactccgacgccgcgaaccgacctggagcccgaggggaaagatgctcgactctcttgggggcaccggagcgggcgcaggagaggcctgcggggtgcgtcccactcacagggatcctctttcagttcatttagataggtgccctttgggcccttgaaattcaacggctatgtgttcacgttcagcacgctcggctgagagctttcatttttagggcaaacgagccgagttaccggggaagcgagaggtggggcgctgcaagggagccggatgaggtgatacacgctggcgacacaatagcaggttgctctttgtgctaagactgacaccatgaggacacagatttgggggaagggggaatctctaggcaaaggctgttacagtcaaatctctgcgaacgattgtgatccgacagcggtgcaaaaggaaagagcgaatgcagtccacgccgcggaaatctaggggtagaggcaaggggggagggtattccccttgcagggaccgtccctgcatttccctctacactgagcagcgtggtcacctggtccttttcacctgtgcacaggtaacctcagactcgagtcagtgacactgctcaacgcacccatctcagctttcatcatcagtcctccacccccgccccacaacagcctaccctgcctccggctgggtttctgggcagaggccgaggcttagctcgttatcctcgcctcgcgttgctgcaaaagccgcagcaagtgcagctgcaggctggcggctgggaaccggcccgagcaagccccaggcagctacactgggcatgctcagtagagcctgcggcttggggactctgcgctcgcacccagagctaccgctctgccccctcctaccgccccctgccctgccctgccctcccctcgcccggcgcggtcccgtccgcctctcgctcgcctcccgcctcccctcggtcttccgaggcgcccgggctcccggcgcggcggcggagggggcgggcaggccggcgggcggtgatgtggcgggactctttatgcgctgcggcaggatacgcgctcggcgctgggacgcgactgcgctcagttctctcctctc

SEQ ID NO: 5536 - DNA, 2300 bp, Homo sapien
gtatttttatgctgtgattgaattacagtgtgtgataaatattgctcttatttgggtagattaccatttaacattttgaattaattggtaattggattaatcttaacttttaaaaaactaatctgagagtggtataaaggatagattacagaatggataaagggtgataaatcagttggctatggcaaaattgcaggaagaaactgaaataggccacagaaaactgaaactgacattttgagtagtatttcagaatcaagatctggattttggcaactgaatagatgcgtaggaatcaaagatgagtatactaaatgaacttaatctatgatttgtctgtcattttattgtgtaccattagtgtgtatgcatgtatgtatgtgccaggtagttaataggctgactgtgtctcttagctccactctgctgcctgggcctttgccatagtgctggagttccctcacttctcttttctgtaaccctattatattactgctgtctctcagctgtgtttcattcctcaagcagaaagaagatgggaggatcatatagtagttgactagaagctgtggagtttgagtgctgggattatatctagttccattacttatgaagattatatctagttccattacttcacctcatctataaaatggtttaccaatagtacctaccttacatggttttatgagtattaaattatgtatttctaaagacatttagaacaatacaaagaatatagtgtgggctcaataagtgacgatggtgttagttattagaaggccatcgagtgctggagaaaataattgaatatcattgatggaaataaaggaagttttccacgttaaaaagcttcggtttttggaaatgtgtgttttcagtatttctgagattaccaggtagaaattccagccagatgttggaattctgcactggcagttgggaataaagtcatgttaaaggagataagttttggagttattgtgtaaaattggtaaagcactggaatagattggtttgacagaggggaaactctttttgagataggcctatatttagggacaagagaagagacaaccaataagggttgaaagaaaccttgagagagtaagtcctatgacagaagcagggaagtttcagaatgattgcagaaagatcagccaggctcttcctgttctccatcgtggtgcaggatcaaggtgaaaaggataaccccatgcaggaattttgcatctgcaggctccgcttcaacatctgtttaggagaaagtggagacagactgacctgagtaactaaggtcttggaacagcttacaggtcagaaccaggtgttttccaaagctagatatactgttagcgcctttggcaacagaagaaatgaaaagactgttgtctgctgcacagttcgaggggccaaggcagacgaaatcctggagaatgatctaaaggtgcaggagtgtgagttaagaaaaaataacttctcagatactggaaactttggttttgggacccaggaacacattgatctgggtatcagatatgacccaagcattgatgtctacagcctggacttctatgtggtgctggaaaagccaggtttcatcattgcaggtaagaagtgcgggacaggcttcattggtgccaaatagaatcagcaaagaggaggccatgcgctggttccagcagaagtatgatgggatcatccttcctggcaaataaattctcatttctacccaaaagggtaataaaaagttttcagtgaaatgtttaaaaaaaaaataaaaaaaagatcagccagcagccaggatgggattgtgaaaacagcaggaaattagttgttgacaaagcattaatgaccattaagaaatcagcctcggctgggcatggtggctcatccctgtaatcgtaacactttgggaggccaaggcagatttcttgagtccaggagttgagaccagcctaggcaacatggcaaaaccctcgttcctccttaataaataaataaatgaataaataaacaagcaagcaagcagggcttggtgttaggcgcctgtactcctagctactcgggaggctgagggggttgaacctgggaggcaaaggttgcagtgagccaagattgcactactgcactccagcctgggtgacagagtgagaccatggcacccccctccccttcaaaaagaaatcagcctcataatcaatttctctggattaaggagtaagagcgtctcaagatttgctgtttatagagagggaggctaatagtttgagagagatacagaatctagggagagtgtg

SEQ ID NO: 5537 - DNA, 2300 bp, Homo sapien
taagtgacgatggtgttagttattagaaggccatcgagtgctggagaaaataattgaatatcattgatggaaataaaggaagttttccacgttaaaaagcttcggtttttggaaatgtgtgttttcagtatttctgagattaccaggtagaaattccagccagatgttggaattctgcactggcagttgggaataaagtcatgttaaaggagataagttttggagttattgtgtaaaattggtaaagcactggaatagattggtttgacagaggggaaactctttttgagataggcctatatttagggacaagagaagagacaaccaataagggttgaaagaaaccttgagagagtaagtcctatgacagaagcagggaagtttcagaatgattgcagaaagatcagccaggctcttcctgttctccatcgtggtgcaggatcaaggtgaaaaggataaccccatgcaggaattttgcatctgcaggctccgcttcaacatctgtttaggagaaagtggagacagactgacctgagtaactaaggtcttggaacagcttacaggtcagaaccaggtgttttccaaagctagatatactgttagcgcctttggcaacagaagaaatgaaaagactgttgtctgctgcacagttcgaggggccaaggcagacgaaatcctggagaatgatctaaaggtgcaggagtgtgagttaagaaaaaataacttctcagatactggaaactttggttttgggacccaggaacacattgatctgggtatcagatatgacccaagcattgatgtctacagcctggacttctatgtggtgctggaaaagccaggtttcatcattgcaggtaagaagtgcgggacaggcttcattggtgccaaatagaatcagcaaagaggaggccatgcgctggttccagcagaagtatgatgggatcatccttcctggcaaataaattctcatttctacccaaaagggtaataaaaagttttcagtgaaatgtttaaaaaaaaaataaaaaaaagatcagccagcagccaggatgggattgtgaaaacagcaggaaattagttgttgacaaagcattaatgaccattaagaaatcagcctcggctgggcatggtggctcatccctgtaatcgtaacactttgggaggccaaggcagatttcttgagtccaggagttgagaccagcctaggcaacatggcaaaaccctcgttcctccttaataaataaataaatgaataaataaacaagcaagcaagcagggcttggtgttaggcgcctgtactcctagctactcgggaggctgagggggttgaacctgggaggcaaaggttgcagtgagccaagattgcactactgcactccagcctgggtgacagagtgagaccatggcacccccctccccttcaaaaagaaatcagcctcataatcaatttctctggattaaggagtaagagcgtctcaagatttgctgtttatagagagggaggctaatagtttgagagagatacagaatctagggagagtgtgggtttttggtctttcagttgtttgccagccttggataaagaatgaagattacttgagcatattatttagagacaagtggagagaataaaggcacatgccagataggagataattaataaagcacttgtccaaaatagaaacttgttgaacaggaagagacgtcaagtataaggagattttaagatgggagaagggaattttgagtgtttgtattggatgacctcagggttcccagtaaagcaggagctgaattcatcgaaggtgatgtgttggtcaggatcaagagagaggttgggagaacaaagtgctaaaatcgttgtggtcaagagtttaaaaagtgtataccagaagagttattgagtgataggggtttgaaataggcaaagctgtaggaaagggggctggaaggaatattaggaggaacactaaatatacttctgaggtctacctcctggtctgtgaacataaaggagctgaaagagtaatggctgaagttctttagtttagctaaagttttttagctaaagctagaattgttgaaagttgtatttgaggaaaaaaagttaaggatacagttgaccgttcgataatgtagcccactgttgaccagaagccctacccacaacataaacaggcaataacacatattttgtatgtgtattatatagtatattcttaacaataaagtaaactagagaaaagaacatgtatcaagaaaatcataaggaagagaaaacacatttacagtactgt

SEQ ID NO: 5538 - DNA, 2300 bp, Homo sapien
taagagaaacattctttttgaactcagctgtttgtgaattgaattttgtaattcaaatgctatattatgtaaactattgatgactttcaatctgcatttattttgtataattatttagttaatatttgccacttatattccttaaaaaataaaattgaggttgggcgtggtggctcacacttgtaatcccagcactttgggaggctgaggcaggcagattgcctgagctcaggagtttgagatcagcctgggcaacatcatgaaccccatttctactaaaatacaaaaaattatctgggcatggtggtgtacacctgtagccctagctgtttgggaggctaaggcacgagaattgcttgaacccgggaggcagaggttgcagtgagccaagatcatgccactgcactccagcttggcaacagagcaagactcttgtctccagaaataaaaataaataaattgtattaacatcctgatagtttatctgtttagtacctagcaagaaagaaaatgttgaacatcttaagaagagggtcatttaaaaggcctcttaaagatcatgtttgttacagtgcttaaaaattaatatgttcatctgcaaaatggaataaaaaatctgttaaaaatatatttcactaaatagtttaagatgagtcatatttgtgggttttcattttaaattttctttctctaggtgaagctgtacttcacaaaaacagtagaggagccgtcaaatccagaggctagcagttcaacttctgtaacaccagatgttagtgacaatgaacctgatcattatagatattctgacaccactgactctgatccagagaatgaaccttttgatgaagatcagcatacacaaattacaaaagtctgaatttttttttatcaagagggataaaacaccatgaaaataaacttgaataaactgaaaatggacctttttttttttaatggcaataggacattgtgtcagattaccagttataggaacaattctcttttcctgaccaatcttgttttaccctatacatccacagggttttgacacttgttgtccagttgaaaaaaggttgtgtagctgtgtcatgtatatacctttttgtgtcaaaaggacatttaaaattcaattaggattaataaagatggcactttcccgttttattccagttttataaaaagtggagacagactgatgtgtatacgtaggaattttttccttttgtgttctgtcaccaactgaagtggctaaagagctttgtgatatactggttcacatcctacccctttgcacttgtggcaacagataagtttgcagttggctaagagaggtttccgaagggttttgctacattctaatgcatgtattcgggttaggggaatggagggaatgctcagaaaggaaataattttatgctggactctggaccatataccatctccagctatttacacacacctttctttagcatgctacagttattaatctggacattcgaggaattggccgctgtcactgcttgttgtttgcgcatttttttttaaagcatattggtgctagaaaaggcagctaaaggaagtgaatctgtattggggtacaggaatgaaccttctgcaacatcttaagatccacaaatgaagggatataaaaataatgtcataggtaagaaacacagcaacaatgacttaaccatataaatgtggaggctatcaacaaagaatgggcttgaaacattataaaaattgacaatgatttattaaatatgttttctcaattgtaacgacttctccatctcctgtgtaatcaaggccagtgctaaaattcagatgctgttagtacctacatcagtcaacaacttacacttattttactagttttcaatcataatacctgctgtggatgcttcatgtgctgcctgcaagcttcttttttctcattaaatataaaatattttgtaatgctgcacagaaattttcaatttgagattctacagtaagcgttttttttctttgaagatttatgatgcacttattcaatagctgtcagccgttccacccttttgaccttacacattctattacaatgaattttgcagttttgcacattttttaaatgtcattaactgttagggaattttacttgaatactgaatacatataatgtttatattaaaaaggacatttgtgttaaaaaggaaattagagttgcagtaaactttcaatgctgcacacaaaaaaaagacatttgatttttcagtagaaattgtcctacatgtgctttattgatttgctattga

SEQ ID NO: 5539 - DNA, 2300 bp, Homo sapien
tgctatgcttataattctctttatgtctagagaaaaaggtttgtcccttcaaagaagatttatatcctacccataactagaaaaaccaaaatttctctaaagtttcaaaatgctgacattttggaaatatatttactttaacccagatatagtctattttatctgtatttctcttagcatgttgcaaagatatgtatattagtagattttgtaaaaccttactagtttagaatatttgaagaaatacttgcttttcaaatttgcaaagttcaaaatggcataccagggctaacatgcatgtgccaggacaggcagatggatgcacttgcacacatgtttccactttgagcccagtgatcatggacttcaagtgtgttctttgggttagtgctatcatgaatcaatgtgaaaagagggaaaataacttaaaagtaaataagaaaaggaagacttgaactcagaacctgacatctctgaagattatcgcaaggtgttgatatctcctttaggatcactgcttcagaataatgaaatgaaaaagctcacgctcctgttcaacctttcattcccaaacaataaagcacacaggcacatactatcaatttagcccactaaatattttagatatctgctttggatgcatcatagtctttctataatgttttcccctgtcattcacatggtacagtcttctgtctaaccatttttttttttttttggtttcatggtaagaaatcaattttggacttgcaacgtctggctgcctttgaagtagtattgttgaattttctaacacttattatccagaaattttatctagcccattcaataataagtttatggctagttggcaaagattttaacatttcttgcctggattatttcttgtttaattattgacatatgacacaagttttgtgaaccatgaatgagattacaaaatttctatttttccctcacacgaagccaacaatctggactagattttaccattgtcattatcggaagtttctccagtgataatgttttcattggcttattcattgtttctaatatgaaaataggaaaaaaactcaaaatgtctattagcaataagcacaaagggcaaaacttaattctctgacttaattctcaaagttaacataaatcagggaactctttgtattaacttttcagagtttttaagagtcaccattatttattttacaattttatatttttcatttctggttcaagcagatggaaagatcagcaaatcattttttctttttataataatataaaatgttctgaatggacaagagtgccacaatactcttacatttacaaaatgactttataatcagatagatataaatgattgaatatggagctatatatatttatatgaataaaccaagggaactcaaacatacttatgatacttaaagaattatatagttttaaatttttaattttaacttataagagtaattgcagtttttctgccattaaaaatgtaatattgaaaatattctatattcctcataattacctcttaatggcactgtacttgtcatatatatatttttctcaatatccctcccccctaccagtttagggcacttaatttcacatggcccttcacataatttttaatttaataattatttattgaatgaatgaatggtgactcagattttcttagctaattgttatcattcattagtgctattgataaaatatgtgtttacttagaatttccatttaaagtatatacatttggatatttttacctgaaacagccaagtctggcattatgtttttacttagatatatacatagatatggcagaaaccaatgaaaaattatcttttgagataatgtagttcctgagaactaaactgtcaaccctttaacataatagcagtataatgctgaattatactcttcaatttattttgactctgtattgttactgatatggtttggctgtgtccccacccagttctccaattgaatttaactcacataatccccacgtgtcatgggagggacccagtgggaggtaactgaatcatgggggcaggtttttcccgtgctgtacttgtgatagtgaataagtcttgtgagatctgatggttttgtaaagggcagttgtacatatgctgtcttgcctgccaccacgtaagtcatgcctttgctctttctttgtcttccaccgtgattgtgaggcctttccagcatgtggaactgtgagtccattaaacctctttttctttataaattacccagtcttgggtgtttcttcatagcagtat

SEQ ID NO: 5540 - DNA, 2300 bp, Homo sapien
attatgaagtttcaagtctcattgtccatgatgatcaaattattaatagaaatgaggaagctggaaaggatggaaaagagcaggagagcagactcagaagaccatgaaggcctgcccttgcttcaccgttgagatgataggtaaccttgggcaaactcacttgaacttagtgtctgtattaacgtgtataaaatggtggcagaggacagttgaaatagattactgcaaatgtactttccagattgacgattttgagattttagggctatggctgtgaatcacattaagcttttaatttcagagaaatctgaacttttaatttcagaaaaatcataaacttcaatgtataattgtacactatttccccaagataaatgtctgctttaaatggcatatttttaaggcttttgacatagtatcagactgtattatgacaaatttgtctagtacacttccatcagtaatataccattgtgtattttgctgtatccctgaaaaaaagacatttttacatttacaaaagtaattcctaacccggggaacatggcaaaaccttatctctacataaagtatacacacccacaaaatgagccacacgtggcggtgggcacctgtagtcccagctactcaggtggctgaggcaggagaatagcttgagcctaagaggtcaaggctgcagtgagccctgatcgtgccactgcactcttgcctgagtgacacaagaccctgtctcaagaaagaaaaaacaaaaaactcaacaaatgaaaaatagtacctcattttaatttgtatttgaatataaaaaattaaacacatgcttattggacttacgtatttctttttattcaagaactctatccaatatatacacattttccttttggcttttgtcatttgtgtctttaagactttgaataatgtttttaaataatattaactttaatctttcatacacctttcagaaatttactatttgtattttgttttgtgtattttgtaacacacaagttgtaaatgattatgtattttctgttcaattccatctttcatttttatgcttaaaaatgtcttcttagtcatatatgcccgtctacattttcttctagttcttttattagatatatctagtattaattcgtcacccatttgatacatggtaatttttttcatgatgtggacatgaagtaaatattctgatttttaaatgtttccattataattggctaccattgtcaattttcttattggttctgatacttattcggtttcttagttttccaggtaataatttatctgcaagtcagcgtaacttaattatttgttttttaatagttcagtattaccattgcctttgttgtttcattgagaacttccagtacaatgtcaggagggggaaaaaaacaacggcaatggcaccaatccttctcttgttgttcatctttatattccttagaacatacggaatgcgttctgacatagaacttattgaagagtaatttggaattttctgatgaatcaactgtctttaatctttacaagtttgaaaggtatacgttattgtttccatttcccagatggagaaattgaggttcaggaaggttacacaaagtcccaggtctaagaaaaatgtctcccagattccaaaagatgtttctattatgctaatagtggccgttcaagcattagaggaaaggttgcccgtggtatcgctggtaaattcttcttcccactttcaaatctagaatagtaaaacagcaaaaatcccaacaggcatgagagttatcgcagtagataggttaagctgcttctctgctgtggtcaacgtcagctctgttgcgaggcgggttctcccaacaatagcccacaccatttccaggcttttctgggcgaggggcagggcgcccggcccccaaagcgagaagacagacagccccggttctccgcagccccaggtttgctcctcaaggacggaggggcctctcagctccggccgcctcctttccgccccctgcaggccggccggaggaaagctcagggcccaggtcggcccagggagcacggaaccaaagagcgctagcgccggttcggccgcctttccagaaagcccgggccgaacggccccgccgcagagactcagcgcggatcgctgctccctctcgccatggcgcaggtgctgatcgtgggcgccgggatgacaggaagcttgtgcgctgcgctgctgaggaggcagacgtccggtcccttgtaccttgctgtgtgggacaaggctgaggactcaggtgggttgtctaaacgccaaa

SEQ ID NO: 5541 - DNA, 2300 bp, Homo sapien
agtggcacgatcagggctcactgcagccttgacctcttaggctcaagctattctcctgcctcagccacctgagtagctgggactacaggtgcccaccgccacgtgtggctcattttgtgggtgtgtatactttatgtagagataaggttttgccatgttccccgggttaggaattacttttgtaaatgtaaaaatgtctttttttcagggatacagcaaaatacacaatggtatattactgatggaagtgtactagacaaatttgtcataatacagtctgatactatgtcaaaagccttaaaaatatgccatttaaagcagacatttatcttggggaaatagtgtacaattatacattgaagtttatgatttttctgaaattaaaagttcagatttctctgaaattaaaagcttaatgtgattcacagccatagccctaaaatctcaaaatcgtcaatctggaaagtacatttgcagtaatctatttcaactgtcctctgccaccattttatacacgttaatacagacactaagttcaagtgagtttgcccaaggttacctatcatctcaacggtgaagcaagggcaggccttcatggtcttctgagtctgctctcctgctcttttccatcctttccagcttcctcatttctattaataatttgatcatcatggacaatgagacttgaaacttcataattatcttctatagcttcttttttctcatccttgatacctatcagccctcaggtctttttgaccgtttctccattgtctcttgaatcatccagtcacatcagattgtacaacagaaaagttgctcaaattccatttccaccagcaatggtagaaaacagtgaacagaatatggtaaggtcggaactttctcttcactgcactctgcccactgtgaacgtttaacatttcaaagagtaattgccaaaaaacgaattcactacttgagttcaagccattaggtttttttttttaagccagtcaaatttagcagtggagggttgtgtatcaactttagtgacactaatgttaataaattctgataacccactatcatcacaccagttcaggccatcagttcttactgggattattaccgtagctttctaactagtcttcctacttcccagttctgcacccagcttctagatgtcattactatcctcaaaaactttctgtagctctcagtttcatacagaattaagttccattcattcatttggcataaaaatgttcaataatatattatcatcctacagttatcacttacatttgtgtcttcatttgttctgtgctttcgctaaactgaatatctttcttttccttgaacacatcctcagattttccacttatctatggcagaagaaaacctttacttacgctgttctctgtgtatacagcatcgtttttgcttgcatctcctgcagttgtgaatccgcatttatctttgtcttttttctttctccctatgatcatacgctctttcaaaaacagttatccagaattttggattgctatggtcatcgaatggaaatagccatagtggtttgcaatttctcattacgccccaacctccatgggttacatctgatttcacagttaatagcataatgggtccttggttgactacttggcagtagtgcagctttctggaaaggtaagaatgactagatgacctagaatgactagatcacctaggattgcaagataggtgagacagcccccatgtctaatatttattttttcctaatcaccttgaccttttcccttgacttttttcctattcttgatcttttcaaggctgactccttgaatgacttcattcaaatcagcttaaaagccacctaaaagaggtcttctctaaccacttgacctaaaatagccacccagtgactccctagtccattaaatgatggaaaaatgaatgctttattttcttcatctcaatcccttttagaagtaatctcacttttttacctgtttacttatttattatttattgtttatcctactagaatttaagcaccaagagggtagaaattttgtcatgttcaacgcagtttccctggcaactagaatcaaagttagaattctcagagactatgagggttcactatctgtttgctggaagatatacaagacttttgaggataatacttaaatgaagatagaccggatggtaattcagttggataatgatcagtgacgttgaacttcttttcatgtgttcattggccgtgtaaatgtcttcttttgagacctaacaatacttttaagactgttgct

SEQ ID NO: 5542 - DNA, 2300 bp, Homo sapien
cttgaatcatgagtaaaacgtaccaagcaaaaaacagacaatttgatctttgacgaacctgacacaagcaatggggaaaggattctctatttaattaatggtgttgggaaaactggctagccataggcagaaaactgaaaccagaccccttccttataccttatacaaaaattaactcaagatggattaaagacttaaaataagacctaaaaccataaaaaccctagaagaaaacctaggcaataccattcaggacataggcatgggcaaagtcttcatgtttaaaacaccaaaagcaacggcagcaaaagccaaaattgacaaatgggatctaattaaactaaagagcttctatgcagcaaacgaagctatcatcagagtgaataggcaacctaaagaatgggagaaatttttacaatctatccatttgacgaagggctaatatccagaatctacaaggaacttaaacaaatttacaagaaaaaaacaaccccatcaaaaagtggttgaaggatatgaacagacatttctcaaaagaagacagttatgccaccaacaaacatatgaaaaaaaagctcatcatcactggtcattagagaaatgcaaatcaaaaccacaatgagataccatctcactccagttagaatggcgatcattaaaaagtcaggaaataacagatgctggagaggatgtggagaaataggaacgctttttcactgttggtgggagtgtaaattagttcaaccattgtggaagacagtgtggcaattcctcaaggatctagaaccagaaataccatttgacccagcaatcccattactgggtatataccccaaggattgtaaatcattccactgtagggaacacatgcacacatatgtttattgcagcactattcacaatagcaaagacttggaaccaacccaaatgcccatcaataatagactggataaagaaaatgtggcacatatacaccatggaatactatgcagccatgaaaaaggatgagttcatgtccttcacagggacatggataaagctggaaagcatcattctcagcaaactaacacaggaagagaaaaccaaacaccgcatgttctcattcataagtgggagttgaacaatgagaacacatggacacagggaagggaacgtcacacaccagggcctgccaggggctaggggacaatgggagggatagcactaggagaaatacctaatgtagatgatgggtggattggtgcagcaaaccaccatggcgcatgtatactatgcagcaaacctgcacattccgcacatgtatcccacgagcaacagatgctcatgatggttgtaaaggatcaactgtattttaaaacataatttaatatatacttttaataaacacattcatattgttcaaactataacccatagatttttttgtttccttttttttaacttttattttaagtttaggggtacaagtgcaggtttgttacataggtaaacctgtgtcctggagatttgttgtacagattgtttcatcgtccaggtattaagcctagatttcttagaaggaaaaagacaccaaaaatatgttcttaaaggtcaagggctgggttttgtatgatagctagaccattatctgtaggatttgagaccctggtcaaagaccataataaaatattaatctttgctgaacacattcacttatctaaccatctagtcaaaatagcttatgcgctgcatttttaaagaataacaggtggccttttgtcattttatgcctctctatctgagccaaactatataatcatttgcattatacctttggctcaaaaacgtttatatgtttaggctatcaaggattatttttaatggttcctaaatcattttaatcctcagaactactttggccaatatttgtctttgttaaaagttaaaggtgagcactcagtattatgtgaaaatgaatgcaatatttaatttttagttttgtcctgttaacattagatgatgcccagatagtaagtctttttggtaatgtaatcagtggatgaggaatctgaccattgttgaaggttttgtatataagaagtcaatacaacattgaccaaaatactaaccagccagagaaacagaatcctaactatttctgaggaaactgtaagtagaacttctgctgaacaaaattgttatttgaattattagattttttctttatcccaagtgatgcatttttaaaggcttagatatttgttgcatattcacctgcataaatgtatctgtttaaattatggcttattcctctaggattt

SEQ ID NO: 5543 - DNA, 2300 bp, Homo sapien
ggcctctgctccccacattagagtaccatgctcccactcctagttgtgaccaccaaaaatgtctccagacattgccaaatgtctttagtttccaataaaacgacgttctccattaagcaacataattttttagtgtatgtatgtcccatatgacatttcagaaatttatctgaaattcaaatttaactgaacatcttatctttttcgttgctaaatctgcagtctatctgggggcgagataacccctggttgagacccaatggcctagagttaaatccaagtgttttacaaataacaatgagtcaactgcttttttcattggtttgttttttgagctaaccctacatcatttgcaattataatgagtactgttcctttagaaccagatgttgtcaagagatgcagaatctaataaaatgagttttgatcctgattgaaagttaaagaaacatttagagctcagtcagggaggaaagagcttgaagaagaaagctagcagcaaccttaggagagaagcaatgacagtgaagagttctgtccacacaaattagttgaaagaggttacaaaagaggctaccagaggttacaaaatattgcataacagagtgaagtacccaatggatataccattaatgtttttctaagtcaatgggaagacacttaaatgtcttaagagtctacagaaatacaaaatcaaaccaagccaaagaggaagtcagctgcaattttagtgggtattgcagacttccctctcctccaacggaagaattagctaattcttaaactccagagaggctggcctcgatgtcaactgcatagtgaaacataaaatctttgaaataattataaaaatagctcagtatatccaccagtggagtaagaagaatttccctgaatatttataagcacaggcctagtatcctggtcactagtttctggccactaaggagcctcaactgattgggaaaatcacatcaattggtttgagatggttgaactatttcttccatgatattattgagcaaataggcttgctgccccctgctcacagaagccaatatctggacactgggttttgaggaaagaaaaactttattgcaagacaggtcagcaaggagacaggaggtgggctcaaatctgcctccccagtttggaatctgagaaaatgtatggcttagagggtgagggaaaggatttaggaatgttggtttggcagggactgattgaagggcttcaaatttgaccactaaaggtaaggtatgttgaggcagatttcagccctggatcttttgggccaatgagcccctagcttctgaaagaggtcctgcatttaggttcccgtcatgtccttgtcttcttggttcccaggggagggatcatttgttctaggttctgttagaggcaaaaacatttttattgtgcatgcctgggctaaatgacttacagtttttggctctgttatatctacagagtaaattgacatttgttatcaacaaagtacggcccatttgggctggtcccatggttataatgggtgtgtggacggtcgagtgtttcaattctgggaaagtttgatgtgattgtattcagttcaaggaaaatgtgtgaatgatatcatatatagcatataaaatgtttacaatatttaagagattgggcatactagcatgtttgataaataaattgatgatgcaatttaaaatgcataacagagtatttgattttagacttatgatttttaaattgaatattataaagtaatttggctaaatgtgtgaatagtattggaatatttaaaacaacttaagatttattatgttagtaaatttattagtttacaaaactgcataaatagctggaaaagcgttacttgttaggctgagaattttgaagattatttttcaagttctttgccagacacgtgtggctctcacaagtaagtttgttggtctctagcctttctcaatggccactgaaaaccagattttgattacgaaatgtctgaaatacagtatcttggtttgaaccgtgagtccttcctgccaatgtaagaacttttcttcctcccttaactttgcttccttctttcctgcatgttaccactggcagagcaaatatgactcagaaaccggctcctcagggttgtaacattagatgatacaggcttgggtcgttacacatgacaccagtgcctttgtttcattgggctgggctctctggaaggtgtgctgctgcctgagctgctggaaaagcactgacaggtgtttgctagaaaagcactcctggagcttgccaccagc

SEQ ID NO: 5544 - DNA, 2300 bp, Homo sapien
ttcccctgtgcacactactgaggatccgtgaaggaacatggtcactgtctccagtccagcttccagtactggagtggaacccagtaggcactatcaggaatgaatttcactacaagtgtggtcaactctgattttcaagggagtaattacttgcaaattatacccttgctgaattcaggaggtccgaaaccctgttctaccatatcagaaaatagcccaggatttcctcactgctctgccttcatgtattctgtaacttgagccctcattttctcatctgcaaaataatagtgcttatgtgtatttgcatatagatttgaaatcttcattcaaggtttagtagggtaaaattgtctcaaaaataagagaaacaaaagttctggagcaaaaagaaatctggattttaaattactattgagattgaatctttaaaaatgcaagtaaaactataggtcacttaaaaattctctaagataaaagttgtataaatacactggtgcttgctcttcattaactcaattaataaaagggaaataaatcacacctaaagttgctatatcagagttcttggtcacaacgctgaaatcatttctggctaactgaatcagaagagaaatatattggaaagtcgttaagtagcataccaaagagacaggaagtttggcaaataagtctccttacacaggaagggaagcttagcagctgaaattacaacaggtgggtcatcacaccattcaaatagctcacttaggacaccactgacattgccgcagtgttacctctggcactactgtccctgaacacaaaacccacttcacagataatggagacatttctaaaatgtttcttcttgaaacacataatccagattcaaataactgtacaggagtctctgaggctgatgttgggtcacaaaatggtactctagccgctggggagcaggggacgatgggtattgggccattttggcttttatgagaatttggatgctagatagcaagaccatgatcaatgaccactctaaatacgtacgtggaattttttgtttcataatgctttttaggaatctggctaaccttcttaattaccactgaattttaaattgtccagtaggtcatgagattatctggttcaatactgcaaactcaaatgcctaccatattctcaaatgtcagtgaggtgggggtgtatgggagtggtggggactgtggaaaactgaagagtgtcttcacagtctaaaggcgacacctgctattcagcttcagctgatggttgctagaactcgccatggaccaaatgtctgatgttacgattttacagaaaatgtgaaaagtctgaatttctgtgaaatttcctaacttcaacatttggaaccaacttaaaactaagcaaaacaacactgttgcttcttaaaaatcaaggctgcaggctgcctccaacaatcaaactcttcatttaaaaaaaaaaaaagaatccagggagatgaggcttaagaaggtgaaatgcttgagaccaaataactcagttggtggctgagccagggctagaattttggtttccagaggaaaggctaactaagaaaagccagtgtttccccaccccactctgcagccatttctctcacttggaagtaagctcccaaccaagctcaagaaaagcgactctatttcatccagcagcagcagtctccataaaatgtttatcagttaatagaacctgtgaagccaatagaaacagctttcagtgttggatcagagtttaaatttcagcttctactgctttctaggtgagtaacctgggataaattattttacttctctgtctctcgttcatggaaaaaacaaaaacaaaaacaaaaaatgagtcccttttatatacagggttgtggcagatggactaagattttgtgtaccgactgcctgacacagtgccagaactgtagtaagaacaccacacgtgatagtaacataacatccaggagatattctaatacttcttattttccaagtacacacaaattgggggtagggggaagggctaagatgcttaatagtgggcgtagccagttgtggataaatatcaaaaagggaatcctaacatgaagtataagtgggattttcaccaaaaccctatccttccccagactccagtgacagtttaacggtcagctgcatcaaggcttgtgtactgtgcagtcttaaaaggcaccactcctgtccatctcggtgaaattgatggtggagcaaaagggagtttaggtggttccggtctggggagaagacgtgcagggtttcagatgc

SEQ ID NO: 5545 - DNA, 2300 bp, Homo sapien
gaactgtccaattgaacgtgtgaatgtacattcagaaatcctgagttgacatcagaatgttcaactcaggaataatctggatgtagctacatctggatgtggcttttgtcagaaattatttgcatttctaagcaaatcagattaacgtctagtacaatcttccatctctgcatgtcaagtggacaggccaatttaacatttggcatactgctgagtcttcaaaacacatattgtttgatgctctaacttttaaattaaatctgtgttatttttttccattgatgtggttggcttagagacattaatttgactggtggttgcttagtaacttgtgtttattaaaagaagtcccttgatataaacaccagtaattcttatgtcttgatttgctgtagttaacctttcaaggtactcttttggaaatgggtgcattgtcttgaatattaaggatgttatgactcctttttttttgtttttgttttagttctgactttccatctcctgtcattagaaagtctcccagttattcaggttccactttcaggatgacagattagaaagctatctgaaatttacctggatattaactttctagtgggtaataataatgcaaattttattcctgaaattcttcctttcatgtccttctctgatcaagcttgtttcattctgaatgaaagtcaaatgagattctcaatttattttaaaaaattgggctatgtccaaagataaatacataaaagtaaaatattatgtaaaataaaaaactgcttatcactgttctgaagtagcacaaacacagctattctctgcataatgaaacgtggccgttcctaccaagtatttatttgacaagtaggctcttaagcacttgaacagaagtgaaaagcgggtttcctccatgtcatattaaggcccttgaaaggtgggggtggaattttgatttgaggtggtagccaattgtaggttccttgaaagggagcaagtgaggaaagcatgttgtcagaagaacactttggcagttgggtggagagtggattagtattagggagtgaaggcaataatccagtgtctgatgatgacagcctgatctcagatcccattgagatggagaaaagaaaaccttaggcagatatcaggattctttgttttatgtgaaagagattgaaaacctgtggcacaagtgtgatcactaataccttccacacccacagagacatcaccagtggattacagcattctttcctgcggagccctggtgtaacctcagaatcttgcaaacatttgacaaatatttattaatagctgttagttattgaagatgtgctatatgccaggcactgtactaagccttaacacaagtttatctcaatgatgatggagtggttggaaacaggatactttttccccacgtactagtagtgtacccttggacaagttactaacttctgtgagtctcagtttccttgcttttcaattgaaacgttagtttctatctcagaaggttttagggaggattaaataaatagctgtaaatgcaaagtggttagaacaatgtctggcacaaaattaagtgctatatgtgttcgttgttattctttttactattctttaaacaaccttatgcctaagtaccattttgcagattaaaaaatgtgcaaatgagctatgtgaattgctcagcatcataggctggtaaatgatagagctggccgtcaaacccaggcaatatgactccaacacctattttcctaacttgtatggatccctgtcttctatactgcatgccaggtgctggggatactgattagagcaagaaaagtaggggcttgtcctcatggagcttcagtgttccagtcctctctaatgtagatctgccatctccaatgtagaattagtagccagattataactgtttctccttgatgttttcgtattttgtaagtaatgtttttattaagttctttattaagaagtgctccaatttgtgttttcatatatgctttgaaaatggattattttctgggtctttaccctaacacagttggcatatacaatacttatgtctctccttatactcaaggcttcttatgcctccctcatataatagatcagattctggggcaagctttagtattctgaaaaacttctgtgccatccacttccctccatactcccagagtctcaggtatctcccattgtgagctgtggtggagtgataatgacatttctaaccaccttttaattcagcttattcagaatattttatagagtaatggcaaagcaaattttagttgttc

SEQ ID NO: 5546 - DNA, 2300 bp, Homo sapien
tcccagggcagcagctagttgctggagttgctggtgttggtagtagaagctgtagaatcccctgttcatcaagtgatagagatagcagaggtgttttcaccagaccaatgctgctgtgtagtctggggcagtgttcttggatatgtagcttccaaacctgatttctctggccttcctagaagtttgtgttttttttcattatccttctgtgaattcaagagtcagacctttgcctgcaattaagaatcctgcttaattcattctgaaatgcagtgtctctcaaagtattgtttggaaacctcatgtattggaatgactgggccatatctgacaatacctacttgtgggcttaaaaccgatggattcagaatccttagggtgggtcttaggagactgcattttaaacagatctcaggtttatgtgattttagatgcagtaaaatgtaaaaaccgctatcctaatattttcaaccttttaaattctatgctctctctttatggatctgagcaatcatcaaaagaaataattctactttttaaatattttatttttgagctggagtctcgctctgtcacccaggctagagtgtagtggtgccatctcaactcactgcatcctccgccccatggattcaagcaattctcctgcctcagcctccctagtagctgggattacaggcgtgcactaccacgcctggctaatttttgtattttcagtagagacggagtttcaccacgttgcccagactggtcttgaactcctgacctcaggtgatccgcctgcctcggcctcccaaagtgctgggattacaggcgtgaatcactgtgtctggccaattctactcttttataaggccctaataaatgacttactagtgttttcttgttcccctccctccccggcttcacattccccataagcctttgctctgtctttttaacgcttttaacgtctttttttcctggtttatttcttctcactgagaagtattaattcctcagttgggattgcctacattcagtggtgccaaaattgttaactcagcttctaaactacactgtgatgaaccatgttttttctttcttgggcattttttagcctgcaggcttagagctcaatgtttaccccagggattactggagacaatggaggggaaagactggaatacaagagtaatttttcttgaagggttcctccaccatggatttaggccagaaaatagcactggagctgttgattgatctacttctgagatttctagaatcactgaatattataactgaaaggaatccatcttaaccccttgtttcctaagtgaggaactgaggagaagatccatgttcaaagtcatctaagtgatgaatggggtataaaggacaaaataaatttagaagtggaaagtggtgatacagagcttgacctaaactagcataaaaaggatgggaattactaatatttattgaattaatatttaaacttgggtacattcacttgacttctctgagcctcagttgtctcaactataaaataaagattctaataatagctaacattgataaaatattgactatatgctaggagctattgatactctaaagactttatgtgctaactcatttgatcctagaacaaccacatgatgtaggaaccactgtttctcccattttgtagatgcacagaaaggctatataacttccctgcagtcacacagctaaacatatttgttttctattgctgctttacaaatttttatgaaattaaaggcttaaatatacatgtattatcttgctgctttttggttcaggagtctaggcacagcttatctagatcctctactcatggtctcacaaggcagcaattgacttgttgacatgggctagagtctcatcagaggcttgcagtcatcttccaagcttgtatgatcattggcagaattaatttccttgcagctttggaacttgtggtggctgagtctttaaggccagcaggagagaatctacttcttttaaaggtcttacctgattagatccagaccactcaggataatttttcttttaattagcttaacattattagggggattcttatatctacaatatctcttcatctttgtcatgtgattcaacatattcatgggaataatattccatgacctttgctgtcttctattggttagaagccaactacaggtcttaaacacactcaagtggagaggattacacaaacctacagatatcaaggggcaggaatcacagagctatcttagaattctgcctgttatagttctaaggttgagttt

SEQ ID NO: 5547 - DNA, 2300 bp, Homo sapien
ataccgaacaggactttcagtctctccaggcctttgtatcctcaactctaaaaaagaagaggtagttggactatataagaattcccagattttcctgccattaacgatctctgaggaagctgtttgagatccagattcccagaccccttctctacaggtgttaattcagtagatccagattaggcttgggggggtctgtatttttataaaaagtgcctcagctattctttttacagtctagcatgtctggaaatccctatccaccatatattctctcacatcccttctaattctgatgctacatgatttatgtactatagaacaagtcattgatctcaaactcactgcctaaaaatggggtaccacaaaggtagccacaaagttctagctatttacattttatagcattgggctataacaaaatgcttatccaatcagtggggccaataaaggtcttacaaaagggataatagtgtttctttcctgctggaaagttatattttggacccataaaaaagagatttatttttctgccatcatctttggttactcatgactttatttgcagtatacctaccagctgtttttctttctcacctgatgatctgaaagagtgtattgaaaatcccactaatcaatatgtatatatatttttaaaagaaactgaaggagattgcattcccaaggacagatgaattgaaaaacgaccttttaaagaaatataacgtagaataccaagaatatttgcaaagcaaagtaagttcagttggtacatttatttcatgactattttatgtacaagtattttttgaatttcatttttatgtgatgagtttttcaaatgttttgtgcatttaaattaaaaattaaagatgcagtgatatggaaccaataaaaaatttatgctgatatccaggttaagcagtttcaccaacaatgtggtatttctatttccctacaatatctaacaaagcaatgtgttagaaaacagatttcctgcagcgatttaagtagaactttttgattaactcttgagccagataaccttgagccagatggctgctcttttgccagatgaacagccagtaggaggtagggagagcagtatatggtttctgatgtgcctaatgatgtaggccttagaaatgtgaatttgattcttagaatgttacagtcagtattgcattgagatagaataacagctaaccttgtggttgaaatgtaatcatatcacccaaaagtggtggcttctggattgttattaataaagagtgaacattatgataatgtctgagaggcagaaaggcattggaagaagaaattggccagtgaatgtatgggatactcacgttcaacatagcatcattatagatgttattttgcttttttgtttgtgttttatttgctttaggggttaccaccttcactgactctcacttcagttcaatctcatcatctctgagaatgctcattgagctttttgactttctatgggcataggtggaaggctggcttgagtggagagttttaacgaagtggtagagggaatggtgaaattggaaatgtccctcaagtgtgtatattaataatgtgacttgaaatatgaaagatagaaattttcttggagggtaagacaaagcaacaacagcaagggagacgaaagcccagttcaagtctcctttccacggtcagcaatgtgtatgatcttcctcttcatgatcttcctgggaggaacaggctctgcagctgttgcatgttttgcctttgataccagtcacttcatagcctacagtggtgacccatgtgggaatctctgtgggtttagaatagcaggactgagcctaggagagataaacagcaatgcctgtgagcccttgcttcaccagcattagcatcatttggaagcttgttagacacgcagaatctcaggccccaccccagacctgctgaatcaggatttgcaactgcaattagccccaggatgatttgtatgcacctgaatgtgccactataagctgtgtcccccatgctaccgccatcttacagtagctcccaaatctagtttctatcaaaatcacctgaaaggctcattaatatttcatattatctgacctaataagcctggatattttgttagaactggagagcttgggactcctcctttttagcaaaactctgggttagtggtgacagagaaggttggaacacattttaataaccattttttagtgattccttcttatccataaatttccagcagagtatgagttctagagtcaaatgcgaaaggttctagggca

SEQ ID NO: 5548 - DNA, 2300 bp, Homo sapien
gatgtcatttttttttttaaaggaaggcctgaagttacatgattttaggtcattttgtagggaatttcaggttatggcatatgcagagaggtcttaaaggaagaaaaataattgattcaatgaagggacagaggactaaggctcaaaactaaatgtgcagggaaagaaacagaaggcaagaactaagaagagtataaaaagaacaccttttgatgtggtgtgtctgcaataccacatacttttctccaaggataaggaaatctgcttaaggacccctgaattttaggcctctggaaaactgtcattaacctcacgatacggaagcctgttccatcatcagttttccttgaggatagcattgtttcaaacccagacaaatagtaatcatttttattccctttagccaagaaggggctagaaattgctctaaggaggacattctgggagagctacagcctccatgagtaaattagactgagaggtggcaatgtttgcatgttcatttcccagatgtgagatgaataatttaacctgaaaggtgaaatgctcaggaaaagcaataatttaacctgaaaggtgaaatgctcaggaaaagcagatggtccagagatgccatacttctcatgcaacattgcttccattgcttgaaattggtgtctgattttttcatagaaaaaatgttatgaatattactttggaaaattgtagtgaagtcatggtcacacttgtgtgtgtggtccagttctttggggttctctttttcccaggtatgcagcacttttacatctctgggcctctgcttggaacacatcccatgcaggtcctacttccccttcccaaaccttaaccccttctagcccccagcccttttttttgtctactcaattcttaccctttaagcttctgcttaagcactatcttctcagggaggcagcctctcctgagctcctggctcaagttagagcccatggctataaaagccagtaccccatataattcttcttttgaacccctgacaatgtacccaactgcttatttagtgcccatcttcctcacttggctgcaggttccatccaggcagaaccttgcctagttctatttccttgacactgctctctgtcctagctcatagtgctcttcagacattacttaagttgactctgctctcccaggaataaacattacttcatactctgaaaaggaagaaccctatctcaggctgccccattttctctccctctctcttttttttttttttttttggctgtctctttctgaataaactgagctgcgctgcagcaatggcttctggttgcctgcaagtgtgtgttggtccagacagcctcctccctaactacagtcagacgttcttctccaagctgttctgttagaaattcttctaaagagaatttcctagctacacaaatgataccacattaacaacagaggattattattattattattattattattattttgaggcggagttccactcctttttgcccagattggagtacaatgatgcgatcttggctcactgcaacccctgtccctgggtttcaagcaattctcctgcctcagatgcctgagtagctgggattacaggtgcgtgccaccacgcttggctaattatgtatttttagtagagatggggtttcaccatgttggccaggctggtcttgaactcctgacctcaggtgatctgtctgcctcggcctcccaagacaacagaggattatttttaagtaaataatgcctcttcccacacatctgctcacagtaatggcagcatgatgtgaattaatgtcattagaaacccatgctgtcctccagagttgcaaaagcctgtcataggaaaattttatagtcatagaaggatgttcccctcctttgagagtctggtttgctattgttagaggagagaagaggattcagaaggctgccaaacctgtatgttgctggttttgtctcctctggagattggtgtgacgctcatgaaggggactcagccacctgtgcaaagcccagccctttattaagtcactgggcatctcatggagtcaggggatgaattactgatagatgactgggaggagggtgcttaggcactgcagttgagtggctcacaaggagctaaaatttcactaatgcgtattcagtgggtggttctggtttgcctgatttttgcctctgggcatggctgtttcagcctgagaggctgttccaagaatgttgctttactaggagctcatgccgcctggtggtaaatatgaagtacagcagtgcaacagaccagt

SEQ ID NO: 5549 - DNA, 2300 bp, Homo sapien
cttggatgggatgtgaaactataaatctcaaacccaggcaataagatcatttaatcacttgtttagaaatttattttcaattataagtctttcctggttagtgtcatagattatttgaaaaaaaatcttgcaagaaaaactaaaccttgagtcctcttccaatatgtctctttatttcatcatagtctgattattatcagagctttggatgtacactaatggtagaaatgatgtaagaatcataaaagtgaatgcaaaaactcttctctttggtgtttagatgaacagtcacttcataaagatcgcaaggactacacagacactgcgtgagtcaaaagcaggaggaaggggaatccttcctctactcaaattgccctcctactcaagaaaatatggaaattttgcttcacatgattcctgtgatgaaaattaatgaattaaccccaaatgcccaactttatgttgtactgtgtagattttatattttaacattctaatggccgtgttttctggttggtaaaagctagacaaatcccgagcagtatagagaaatcctgttatgatttagtcttaagctatttaaaattttctaatcaatagtgcaattcttcaaagatatatatgtatgtatatgtgtgggcaccattaatcaaacagatctgacatagtaacatgagtgaacagctggtcatggctgtaaaataaagccactcattttgggatttttctcacatgtccacagtccagaaatactcacagtacccacaaaaatatttctttatgagtttagtgagaacctagtagacaaatataaaatcactgaagctattcattgatgcttgagatgagggcttatatctttgagaaatgagagggtcacctggtatcttagtccattttcacattgctataaagacatacccaagactgggtaatttataaagaaaagaggtttaatttactcacagttctgcatggctggggaggcctcaagaaacttaaactcatggcaaaaggggaagaggcgtgtcttacatggcagcaggcgagagagagcaagcaagagcagggaaaactgccttataaaaccatcagatatcgtgagaactcactcactttcatgagaacagcatgggagaaaacgcccccatgatccagtcacctcccacctagcctttctctggacatgggattatggagattagaattcgagacgagatttgggtggggacgtagaaccaaaccatatcacctggtctctctacttcctgtcaaggaggttagtgggcagagaggagggctacagaggcttcctttgaacaatctcctttcttttccaaactacttctttgacaggctgctgggtagactctctggtcaaaggatggtccctacttatgctgctaaattgctcggtgacaaattagtagacaaagctaatgcaccaaaaaaatgaatgtagttatagtaatgctaacatccaaattcctctttgtaagacataggcctgtcaaccttgtctccatacttcaattcctatttccactcacctccctcaagaacttgatttataaacagtgtgcctaccataaaatcatcactccctctatgtatttatagacgactgaaggaatatctttcttctttgcatgctaccgtggtagaagggttttaaaagtccgtgctaggcagaggcagccctttctgcccctttctgttctcagtttattaggaaatggcctgaaattccagcatgatagcaagctggcatcctctgtggaatgtgcaaaccatgcctgcatctgcccattaccctagctcagtgtctctgggcatttctgcagttgttctgaaggcttggcgtgtttatctcccacaggcggctgaaccgcctcccgtttcatgagcagaccagtggaatgcagtggaagagacccaggcctccggccacccagattagagagttttgtgctgaggtccctatatggttgtgttagactgaacgacaggctcaagtctgtctttgctccttgtttgggaagcaagtgggaggagagcaggccaaggggctatataacccttcagctttcagcttccctgaacaccacccagtgtggagcagcccagccaagcactgtcagggtaagtggcgccaggccaaggatgtgacttatagattccagtggctcttttaattacccggtataataagacatcatctgcagggatttggctgggttcatgcactgatatttctgaatgaagattgtactactaaaatgattgtagcttttggcttt

SEQ ID NO: 5550 - DNA, 2300 bp, Homo sapien
tgttttgttttttatcttaactcttcctgtttttttacatagtcaagattcttgtttaagtgttattcagaatgttcagaaaccaggatatcttttgagtagaagctttaacttatatggtatggtttgaataaggatggttgtccaaaatatctccaacatctgttggagtgcctgaaattctattattaaaattttatttctttgcccttgaaggcctgaggactctcaggaatatgctggtaaaataaaaataacctttagagatgcccaaactgttttccccagaacaccagcattcattaggtgttcattcaatagattcttcaaaggattccaaaggcaaagaagtttggggaacagtatatataattacccaaccctttgacattagcatactaagggccctgagaagttttggattcagaaagttttcaaattaaagtaacccagaattttctaagattatttgaccatgaaacatatgtctccccacaaagcacatattcctatctccttgaacttgaggataattagacgtacgtgggcagagggtaggggaagggggtatggcatagaaagagcaggaccttgggagcaagaatatctaagtttaattcctgactctgctatttattaactaaccatctttgccaatgttgcttaagcttttttggctacatttttttatttgtaaagtaagtttaataatcactcatctcactgggctataatgataagtattaagtaaggaagatccacatatgtgagttgctggcttataattcacactcaagagatactgattttgtcaattgtcctttcccctttttttctctcttccctccttccattccttcttcccttacctctcctttccttccctcacaccccttttccttccttctttttacatttttttatttaaatgaacttttcattttggaatagttttaggatttcaaaaaatttgcagagataatacagagaatgcccatataccatcctccttatcccacttctttttgtgtctattagatgctcagagtgtgtgcacaaggctggcacgcccagggtcttcctcatggcactaacagtctactgaaaggtggaacagagacaagcctatcaacacctacaagactggtggtaagtgcagtgacagatgcaaaacacagggtgatggaaagccctcaggagggtaacctaacctagatttgagggcccaaacaggctccagaagaaaatgtcaactgagaggaagcctgaaggatgaacagtgggctaagcaaagggttattaatgtgttattaatgggttgaatctaattgggaagggagagaggttgcagagtgaggtgcagagcttggtggacgatgccaaaggaatactgaaacctttagtgtgtccagtctggaactgcatccaaattcaggttcagtaatgatgtcattatccaaacataccttctgtaaaattcatgctaaactacctaagagctatctaccgttccaaagcaatagtgactttgaacagtgttcaccagagcacgaaagaattacaagatttttttttaaagaaaattggccaggaaataatgagtaacgaaggacaggaagtaattgtgaatgtttaatatagctggggctatgcgatttggcttaagttgttagctttgttttcctcttgagaaataaaaactaaggggccctcccttttcagagccctatggcgcaacatctgtactttttcatatggttaactgtccattccagaaacgtctgtgagcctctcatgttgcagccacaacatggacagcccagtcaaatgccccgcaagtctttctctgagtgactccagcaattagccaaggctcctgtacccaggcaggacctctgcgctctgagctccattctccttcaagacctccccaacttcccaggttgaactacagcagaagcctttagaaagggcaggaggccggctctcgaggtcctcacctgaagtgagcatgccagccactgcaggaacgccccgggacaggaatgcccatttgtgcaacgaaccctgactccttcctcaccctgacttctccccctccctacccgcgcgcaggccaagttgctgaatcaatggagccctccccaacccgggcgttccccagcgaggcttccttcccatcctcctgaccaccggggcttttcgtgagctcgtctctgatctcgcgcaagagtgacacacaggtgttcaaagacgcttctggggagtgagggaagcggtttacgagtgacttggctgga

SEQ ID NO: 5551 - DNA, 2300 bp, Homo sapien
agaggcttcggaattcaaatgagcctcatggatccacatcccttcaattagcaagctggcatttctgagcgagggactttccaaaacaggctgctcaagtttcttggccaataacagggtcatgcacaataaaaaaaaaaaatgcaacccacagctatttctcaaattaatttgtaaagtaagtttgactctttttctgtctcctttagaaatttgtcaactttttgggatttcaaacttttttattgtaagtgtcggagtaaaaacactcagaaataggaaagagaaaactaacaccaggaaggttgagagaaggaaagagaaagagaagcaaaaggggttaaggatggggatacttgttgactatagttatcaccagagtcagaggactaggggaagaggggaaaagcagaaaacagctccccacccatctatgtccagcccattaatagaattaaaatttgcttctgtattccaagtaattagcactttgcatctattttatttattgctactactaagaaaacataaccgtgaaggcataaaagcaaacattttctgtagacacatgaggtgacacaagagtgttgaaacttctttaaggataaaggcctgatgttaggcatgtcgtgagcgcaaaaccaatttctgtgtaactaaatttaaaagagtcatattagaggggagaaatggaagataaactgcaaaacgtaaacaatgattacttaggtgatagagttatgtctgatctttgtatttgactcatctgcatttataaattttatttaataagccttaatttcctaggccatatatcatatacaaatataagttatacctaacttataggtattataatatgtatatatacataaatgtatgaatatttacatatgcgtgtgtgtgtgtattctttcagaaaagcaaagttttcttcgggctttaaacacgcagcctctggtaaaggtgctattggtacaaaagttcaacaagcatagctccaagctttgacaattttcttacactttactaatactgctgtccaaaaactatgagattttcaaagcagccaacattgcagtggtgcaatggttaataacaagagagagaagagtgtggcctgaggttgtataaatgttttctcaatcttgaatcattaattttctccaaggaagtttctaaagaatcccaaatagtgcacactatttctgaaaggaacaggatttttttttctaatcataaaatggacccagacatctcagcctcttggtgtaatctggatatcagatgcaatcagcgaacagcctgagttttggaattagatctgagttcaatcccatatctcccatttactagctgtgtgatcttggctgaattactgaagctctctgaacctcatttcgccatctgtaaaatggggatgtggttatcttccccactacatggctctcgtgagaatccgcggagatcacatttgtaaacacttctctcgctatgcctggcactttgttggggcccaataaaataaaaatccatggactctcagaggctccggtactcaaatgagcctcctggatccacgtctctttgattagccatctgcaagctggcatttctgagcgagggacttttcaaaacaggctgctcaagtttcttggccaataataggcgccgggttctgtgcggtgggaacgagtaccaccaaccccagcaggagaccaagcagaaatcaccatgggagtgcaagctaagaaagggcaaaagaagaaagagaagggcagaaaaacaaaacaaaatgaaaccactcaggcagcgacttacagtcttaaagagagaattcccggaagggagacaaggcagtttctttttctgtgtgacaataaaaaacggtaaacaagcctccagaagctcattcagcccccatataactttttcgagaaagaaaaggtgccgttcttccgagccctccggcttaaccactgcttcggtgctgacttatttcctacgtctgagaactgccagaaaatgagcaatatctgttctgaaggctgcaggctctctccccgcccccgcggggcggcgcgcactcacccacccgcgccggagcggacctttggcttggcttgtcagggcttgtccaggagttccgctcctctctccaaccggggtccccctccagcgaccctaaagcttcccagacttccgcttcaattcctgtccgcaccccacgcccacctcaacgtggagcgcagtggtctccgaggagcgccggagctgccccgcctgcccagcggggtcag

SEQ ID NO: 5552 - DNA, 2300 bp, Homo sapien
ttgttctttgatctgtgatttagagataagatgatcataaactctttgcttatacttttagatttgtgggtcattgatcattggatccataagagatgttataggtgatcttttccaatcctcttaatttataaatgagaaaagaagatacagaaatgttatgtattgtggcccaggttatttaacaaattactgggtatatggcaggatttggagttagaactcaaggttgtcttgtttctgtattcccctagtcagctcttcatagacctttaggacttagctatattctgaagtactataaaaagagaaataaacatggttttcactaatgggaatttcatttagaaaaacaaattttcagactattttctatttttcagatgttgacttgagtaaatatatcaccactattgctggagtcatgacactaagtcaagttaaaggctttgttcgaaagaatggtgtcaatgaagccaaaatagatgagatcaagaatgacaatgtccaagacacagcagaacagaaagttcaactgcttcgtaattggcatcaacttcatggaaagaaagaagcgtatgacacattgattaaagatctcaaaaaagccaatctttgtactcttgcagagaaaattcagactatcatcctcaaggacattactagtgactcagaaaattcaaacttcagaaatgaaatccaaagcttggtctagagtgaaaaacaacaaattcagttctgagtatatgcaattagtgtttgaaaagattcttaatagctggctgtaaatactgcttggttttttactgggtacattttatcatttattagcgctgaagagccaacatatttgtagatttttaatatctcatgattctgcctccaaggatgtttaaaatctagttgggaaaacaaacttcatcaagagtaaatgcagtggcatgctaagtacccaaataggagtgtatgcagaggatgaaagattaagattatgctctggcatctaacatatgattctgtagtatgaatgtaatcagtgtatgttagtacaaatgtctatccacaggctaaccccactctatgaatcaatagaagaagctatgaccttttgctgaaatatcagttactgaacaggcaggccactttgcctctaaattacctctgataattctagagattttaccatatttctaaactttgtttataactctgagaagatcatatttatgtaaagtatatgtatttgagtgcagaatttaaataaggctctacctcaaagacctttgcacagtttattggtgtcatattatacaatatttcaattgtgaattcacatagaaaacattaaattataatgtttgactattatatatgtgtatgcattttactggctcaaaactacctacttctttctcaggcatcaaaagcattttgagcaggagagtattactagagctttgccacctctccatttttgccttggtgctcatcttaatggcctaatgcacccccaaacatggaaatatcaccaaaaaatacttaatagtccaccaaaaggcaagactgcccttagaaattctagcctggtttggagatactaactgctctcagagaaagtagctttgtgacatgtcatgaacccatgtttgcaatcaaagatgataaaatagattcttatttttcccccacccccgaaaatgttcaataatgtcccatgtaaaacctgctacaaatggcagcttatacatagcaatggtaaaatcatcatctggatttaggaattgctcttgtcatacccccaagtttctaagatttaagattctccttactactatcctacgtttaaatatctttgaaagtttgtattaaatgtgaattttaagaaataatatttatatttctgtaaatgtaaactgtgaagatagttataaactgaagcagatacctggaaccacctaaagaacttccatttatggaggatttttttgccccttgtgtttggaattataaaatataggtaaaagtacgtaattaaataatgtttttggtatttctggttttctcttttttggtaggggcttgctttttggttttgtcttccttttctctaactgatgctaaatataacttgtctttaatgcttcttggatcccttagaaggtacttcctttttaaccttaacccttttagtagttaaataattatttccataggttgctattgccaagaagacctcttccaaacagcacatgattattcgtcaaacagtttcgtattccagatactggaatgtggataag

SEQ ID NO: 5553 - DNA, 2300 bp, Homo sapien
caaatatgtcagcagaatataataatgttttcatagtaccctgggttaaataaaaaggctgctgtagggctagaggctactgctgagggctcctgggaatgagcatctaaggaatgtcagtattccatcagtggcagttagtggacacacaccagttaggagattctgaattacaaattggcctattatatgtatctatatcttatatattacatattatgaattggcatattatatatatcatatgtatgcatatataccatatatgatcttagttttaggcccatatattggtccatatttttgtagtacttgttctttcctcataatagatggcgttatatcttttatttctctttacataatcttacttgattttaatttcaaatttctcagttattctttaggtaacgtgtggagtacaaatttaaaataccatgcatattacttggtgtgtttgctgtgtgctaggacctatgattttactgctgtaaacccacagcaataataataatcctacttcttggcagggtgaggaagccagcttttttgaggattggataaaatcaattcagataaaacatttagccaatgcgtggcacctagtaggtgggctttacacggtagacttattatttttccatttaatactccaatttccctttgtggggaatcggggggataagaaaatgcaagcttcaaggagtaaagggctggacacaaccacatagatacaagacactaagcaagaattaggagtgctccctggcttcaaagctggtgtctaaaacgtctatcccctaaggggcccttgtatcgtgtcatgtgtcagaccccgggttgaacgcgaggatttttgtgctgttcccagggtctctcaagagctctcctagtaccgacctccttgtgctcggtggcccctggcccgaggaccccagatgggtggcggagaaacgcaggggatagagactagccccctagccgggctccgtgggcccggagtggattcaaggaccggtggcagagggcgactgcaagttggccccgcaaagccaacaaggggaagggtagggtagtgacgacatcacctggtccttcaatagcctcccgggaggcttcaggaactcacatctctttcccttgacgaacaacgcaggtggtttgctgaattaagtgttcccgccccaaattgagatacaacgggctttttagccagattggcgcagactgggagttaaatccagcattttcccggcaaagctgagcctggccgccgcggagccctctttccgctgtgcggtgcctccggctccgatcgcgggcccggcgccccgggacgcgccgccgagggtagctacgcggccgggctgcggcctctcccggagagcctgcgtgcgtggtctctctagcttgctgcccgccggccaggaaaactctggggacaagctggagctggcggaggttcccatccggccacccttcccgtctgatttcctgagctgacggtcaccgccggcgttcggggaccagcggttccctgtgcaaagggctcgtttctcgatcgccgctggatagaccgcaaccgggttctcagaaaacacccgagctacagaccgcatgtagctttaaacagtttttaaaatgcgattatgcttgcgtctttatgaaagcacatggatgcagttatacgtatgcattaaaaaacacaaacaattctgcattgattgcaaaggagcgctttctggtggcaatgtaaacggtctagtttgagacccgtgatgacacacgtgaactgagttgccaaactcatagaaactccacacggtagatctgtacattgtgtcccgtgttaattgtacgtcaactgaaaaatcagaacttacatgaaaagtacgaagtgccactgcatacacgcatatctaaaagccggtaagatgcggctatagatgagcacatttacagcaatgaagggccactctgccgggttgctagcttattcaagcttcgcatcgccgggaaagggatggaaaggcagctgacatcactcggggcggggccgtgagtcctgtgaaaagtcgatgggactcgagcagcagcctcagctgccttgcacagcctcgcaatgagctgccacaactgctccgacccccaggtcctttgcagctccgggcagctgttcctgcagcccctctgggaccacctgaggagctgggaggccctcctacagtcgcccttcttcccggtcatcttctccatcaccacatacgtgggcttttgcctgcccttcgtggtcctggata

SEQ ID NO: 5554 - DNA, 2300 bp, Homo sapien
gggtccccctgcaaagccacaggggcagagctgcccaagaccatgggaacccacctcctgcatcagtgtgacctggatgtgagacatggagtcaaaggagatcattttggagctttaagaaatgactgccttgatggatctggacttgcatgcggcttttagctccttcattttggccagtttctcccatttgaaacaggtgtatttatccaatgcctgtacccccattgtatctaagaagcaactaacttgcttttgattttaccagctaataggtggaagggacttgccttgtctcaggtgagactttggactatggacttttgagttaatgctgaaatgagttaagactttgggggactactgggaaggcatgattggttttgaaatgtgaggacatgagatttgggagtggccaagggcagaatgatatggtttggctgtgtccccacccaaatctcatcttgaattatagctcctgtaattcccacatgttgtgggagggacccggtgggagataactgaatcatgggggcagtctagcccatactgttcttgtggtggtaaataagtctcacaaggtctgatggttttataagaggaaaatccttttacttggttctttctctcacatgtgccgccatgtaagacaagccttttgccttctgccatgattgtgaggcctccccagtcctgtgaaactgtgagtcagttaaacctttttccttcataaattacccagtcttgggtatgtctttattagcagcatgagaacagactaatacaccttctaattagtctccctgcttctgtagttcagaatgatctttctaaactagattatgctgcccttctattgaaaatattacactggcttctcatcttactcagaagacacggtaagatcttgacaagtggctcccaaggcaccagacttctaggacttcatgttctattactttctactatgtacattctgttttagcctcaaagacctcaccactctggctaggacccaccaggaatattcctaccacagggcctttgtacctgctattttcacccagaatgtgctttctccagtatctaaggctgttaactacctccttgcctgtgctcaggtgtcacttcataagagtcctttcctgattaccatatacatatcatcctccttatccctgtttttttttttttttgggggatggagtctcactctgttgtccatgctggagtgcagtggcatgatctccgctcactgcaacctccacctacctggttcaagccattttcctgcctcagcctcccaaggagctgggattagaggcacacaccaccacacccgctaattttgtatttttagtagagatggggtttcaccaagttggccaggctggtcctgaactcctgtcctcaggtgatccgccctcctcagcttcccaaactgctgggattacaggcgtgagccactgtgcccagccccttgttgtttgttgttgttgttgtttgtttgtttttgttgttatttatagcacttatcaccacctcatgtattatatagttattcatgatgtgtctcttcccatcagaatatatacaagagaacaggaaccttgtttggttggtttctatacctccactgtcttactaatgcctggcatttagtaggtgctcaataaaatctttgttttagaaaatgattaataaataatatgtacatattgaatattgtttcctcttttaacaaatctttaataataataaaaaatttaaagcagcaagattgctttgcatcaggcacaatgataagcgctttaaatggagcccatgattcactttcatttatagagcccacatgctctctgtcaggcgcagaaggtgccagccctgcaggagcttcgggggcggagcagaaggccgcctaaaacagcctttgctaagagagcatgcgtaggcgacgcgctggtagagctgtggacctgccagcctgcgaggcggaggacgggctccatctcttagaaacgcctacggcgcatgctctatggggtcaactggggggctggcaagcggcagcgctggtctggggcggagtctccgaggcacttcccggtggctggctgctctgattggctgaacaaatagtccgagggtggtgggcatccgccctcccgacaaggcagaccaggccccctgcaggtcccctatccgcaccccggcccctgagagctggcactgcgactcgagacagcggcccggcaggacagctccaggtgagagtgccggcgccgcggcgctgccaggtg

SEQ ID NO: 5555 - DNA, 2300 bp, Homo sapien
atcaaaaggatacctgcactcacatgttcatcacaccactattcataatagcaaagatatgaaatcaacataggtgctcatcagtgaacaaatggataaagaaaatattgtatatatacacaatgggatattattcagccattaaagaggaatgaaatcatgtaatttgcagcaatgtagttggaactggagaccattatgttaaatgcaataagccaggcacagaatgacaaatactgcatgttcttactgaaatgtgggagctaaaaaactttatctcatggacattgagaatagaataatagataccagagactgggaaggggggtggtgggaagatgagagttaggttatgggtacaaacatgccgttaaataaaaaaaataagttctaatgtttgatagccgactagggtgactatacttagcaacaatattatgtatattttaaagtaactagaagagaggactttaaatgataccaacacataaaaatgataaacactgaaggtgatacataccccaattaccctgacttgatcattaaacattctttgcacgtaacaaacactcacatgcaactcataaatatgtaaattattatacatcaataaaaagggggaaaatattgtggggcttggggaagccaagaacataaggagatgttaggaattgtttggcttaggtcagtaattgtgatggattgttgaatgtcagaggagataaagttctggaaaaagccaacattgaaatttcccctggccgggcgtggtggctcacgcctgtaatcccagaactttggcaggccaaggcgggcagatcacctgagatcaggagttcgagaccagcctggccaacatggtggaaccccatctctactaaaaatacaaaaattagccgggcgtggtggtgcgtgcctgtaatcccagctactcgagaggctgaggcgaatcacttgaaccagggaggtggaggttgcagtaagccaggatctttccactgcactccagcctgaaaaaaagagtttcccctctgatcactttggttaacgattttagttaataattataatagaaactagcatttacttattactgccaggcattattctaaggacatttcacgtattctctcatttcatcctcccaacaccacaataaaccagtagttgtattattcccaatttacaaaaccgaagcagagacattcaataattttccccagagtttcatagcataaaggtggaagctgatttcaaatccagatagacagacatcactgcccatgcttctaatcatgtattcatttagtcaacaactacttttggaatgcttgccataccatgcaatgtgcaggttgttttgcagggactggagattcagcaatgattcagactaaaatcccctgccctgtcgaggctaaataactgctccttacagtggcctgtggatcatattggtataaggcagagcaaagatgggttaatatggtaatcacaaggcagggagctttgtaaatgtgtcctcctaggagttgtgctcccttgatgccatcagtacattccacaaagaggaagttcttctaactcactacgcagctgggcttggctcttactcaagagcattttggggtgaaaatatctaagtttaccagcccttgtgcaaatctgagatgaaggactacattaaaagtaaaattcaccttagcaggaagtggggtttgctattctgtgtatatctttaacagtatctgctgaaaagaacccttttgttaaataattgtattacaagtccccaacttaatcttttcgaatatgaaataagagagggacagtgcacaagagcaatgtccccagacccatctttaagtgaagcaccaggccgatgaaacatccctctctgctgccttctttctctgatcacaactcagctccggaggaaaaagagtcctctaaagtataataaaaagaaaaaaagaaaaagagtcctgccaatttcactttctagtttcactttcccttttgtaacgtcagctgaagggaaacaaacaaaaaggaaccagaggccacttgtatatataggtctcttcagcatttattggtggcagaagaggaagatttctgaagagtgcagctgcctgaaccgagccctgccgaacagctgagaattgcactgcaaccatgaggtaaatattttcccttcgtattcggtagtgctgttgagtcatcttgtccaatgcaaatcctgagaagctatgttcccaaagagggccagctccattttagtgtttgtttatagcctt

SEQ ID NO: 5556 - DNA, 2300 bp, Homo sapien
caaacctgtacgtgtatacctgcacataaaatataagttaaaaaaaaacctacaatgagatatgatcttaccctggttaaaattgcttttatccaaaagacaggcaataacaaatgctggcaaggatgtggaaaaaaggaaactcttgtacactgttggtgggaatgtaaactattataactactatggataacagttcggaggttcctcaaaagactaaaaatagaactaccatatgatccagtaatcccactgccaggaatacatcaaaaagaaaggaaatcagtacatcaaagagatatctgcactcccatgtttattgcagcactattcacaatagccaagatttggaagcaacctaagtgtccatcagcagaagaatggatacagaaaatgtggtacatttacacaacggagtgctctttagccataaaaagaatgagatcctgtcatttgcaacaacatggatagaagtggaggtcattataagtgaattaagccaggcacagaaagacaaattttacatattctcacttgtttgtggaagctaaaaatattaagacaattgaacttatggagatagagattagaatgatgattactagaggctgggaagagtagtagcgggggaagtggggatggttaatgggtacaaaaatatacttagatagaattaataagatctagtgtttgttagaacaagaggatgactatagtcaacaatagtttattgcacatttcaaaataactaaaagagtataattggattgtttgtaatacaaagaataaatgcttgaagtcatttaccctgatgtgattattactcattgtatgctcgcatcaaatatctcatgtaccccataaatatatatatctactatgtgtccacaaaaaatttttaaaaataataagaattggcttaaaaaatgctgtttcctgggccccaccctagactgatggtcagatacctaatgttgacaaaaaaagtcaaactctgtaaaacatttgaagagatttattctaagccaaatatgaatgacctatggcctgtgacacagccctcaggagatcctgagaacatgtgccaggccacaacttggttttatacattttagggagacataaggcatcaatcaatacatgtaaggtgtacattggctaggtccagaaaggtgggacaattggaaacagggaagcggggcagcttccaagtcataggcagattcaaagattttctgattgacaatttgttgaaagagttattatcaatagaaaggaatgtttggagacatccaatagaaattcaatagacaatcattagaaaggaatgtctgggtcgtggagaccaaggttttattatgcagatgaagcctccaagtagcaggcttcagagagaataggttgtaaatgtttcttaatacacttaaaaagagcatgttctggctgggtgcagtggctcatgcctgtaatcccagcactttgggaggccaaggtggttggatcacctgctatcaggagttcaagaccagcctgaccaacatggcgaaacctcgtctctactaaaaatacaaatattagccgggcatggtggtgggtgcctgtaatcccagctactcgggaggctgaggcaagagaatcacttgaacccaggaggcagaggttgcagtgagacgcaatcatgccactgcattccagcctgggcaacagagtaagactctgtctcaaaaaaaaacaaaaacaaaaacaaaaaaagagtgtgttctattagtaattccaaaaggaaaaaggatgtaatgaggcatatccagcttccccttcacatcagttttcaggttaactttggaatgcccttggccaaaagcaggggtccagtcacatggttggtgagtatggccttagaatttaattttttggtttacattaggaatgcttccacattctctcaaacaaattttagtcacagttttgaataacgtactctggctcagccattgcaggtctcaagccgttaggtttcattttcctcctcccaacgattttaaattagtttcactttccagtttcctcttccttcccctaaaagcaattactcaaaaacggagaaaacatcagctgatgcgtgccctactctcccacccctttatatagttccttcagtatttacttgaggcagacaggaagacttctgaagaacaaatcagcctggtcaccagcttttcggaacagcagagacacagagggcagtcatgaggtcagtgaaataagaatgcataatcatgcttgtttttgagtgcaaattg

SEQ ID NO: 5557 - DNA, 2300 bp, Homo sapien
tggccaaaaggtgaaagatcttaatgctttcaactatgctcactttagagagggggccagggatgggcttcctatctggagagtaagggccagcctttgatggttacccatgccttagagtggccaaagccacaagaactgaacccagatcttggagaagggtgaaagtggttctccccagggcataattttctatcatttggatgaagggaaaaggaaattcatcctagggcattttaaggataagggaatgaggctcagtgatatgactcaagaaatatcccagaactaagcaaagaggtcactgaaatccaggtgtcctgtggttttcttcccttcactcaagatgcctgataatgctgcttaattcaccacattagctccataaataaaggggaaaactgctttttaaaatacctctatgacagcacttctcaaaatgtggtacaggaactcctgcactgaatttccaaggcacttgtgaaaacacaggtttctaagctcacatcagattcactgcaccagaatctctgggagtaggactgcatagtcagtactgtcaatatacaataatcagaaggctcaggatccagttaaaagagtttattcaacaaaaagttgagggcagcagtcccaggagtagagctgcacccaagaatggtgaacagtacttccagtgtagagaaaaatgaggactgtttacataggcaaagacagaggtgttcaacagaatgacaacttctcttgttgttgttgtttttgttgttgctgttgttgtttttgagacagagtctcactctgtcacccaggctggagtgcagtggcccgatcatggctcactgcagcctcagactcctgggctcaagggattctcccacccagcctcccaagtagctgggactataggagcacgccactatgcctggttaatttttttgtattttagtagcaatggggttttgccatgttggtcaggttggtcttgaactcctgaccttaagtgatgcacccaccttggcctcccaaagtgctgagattacaggcgtgagcctccgtgcctggccaacattttccatacagaggctaacatacagatatacaatttgattggctactattgattacagtccaagggaattgcttaatattcttttgtaaagaggtaacatggctggccgcagtggctcacacccataagcccaacactttgggaggccgaggagggcagatgcttgagctcaggagttggagaccagcctgggcaacatagtgagaccccgtctgtactaaaaatacaaaaatcagccaggcgtggtggcacgtgcctatagtctcattgactggagaggctgagatgggaggatcgcttgagcctgggaggcagaggttgcagtaagctgagatcgtgctactgcactccagcctggatgacagagtgagatcctgtctcaaaaaaaaaaaaaaaaaaaaaaagtaacaatcaaaagggtctctatttccataacatgaggtctacgttttaataaagactaggttgtctgaggccgggcacggtggtgcaaggctataatcccagcactttgggaggccaaggcgggcagatcatgaggtcaggagttcgagaacagcctgaccaacatggtgaaaccccgcctctactaaaaatacaaaaattatccaggcatggtggtgcacgtctgtaatcccagctactcaggaggctgaggcaggagaatcacttgaacccgagaggcagaaattgcagtgagactagggagtctggttaacatgtaacccctcaccacacaggtcaaagagcaacagtcatgcacctgagaaaaaaaacagtcacgttacgtgagtcagttttcagggcttaactttgcctcttgacataacacatttggaagcttctaaaattttattttctttttacagtgcctttttacaactttcaaaccacagttttccaaatctgtctggaacatgttcctggcgtgagtgagctcagttctcacagattctgtttcagtttcccctcaagagggatcttgatagggttccatcagtttcactttcctttcccctttcataaaagcacagacctaacagcaccctgggtggaaacctcttcagcatttgcttggaatcagtaagctaaaaacaaaatcaaccgggaccccagcttttcagaactgcagggaaacagccatcatgaggtaaatagtccctgcttctctgataggaaacagaatttcttatgtacaacttcctgacttatgctatttcagtgtttgctt

SEQ ID NO: 5558 - DNA, 2300 bp, Homo sapien
tttatttgtgtgtattctttgattttgtattatgacctgatattccttggaactttatcaaacttggaaattctttgagaactatgtaaaaagtgtttccctttgaggggtgtttttatttgcttttgttaggtgcatgggagcactaccaagccagaattgcttaaaatgaaattttctacttgaggtttttttttttttttcttgccgcatggatagtgagaatttcagcccaaaacaatcatgcttctccacttaagattagaaattatcaatgactttttttcctccctgctttacttagggccaaagccaaaaacaggcatgtgtagccccatcatttacgtctgcaaggagtttgttctccagtttaacctctgaatgggtcctggttttatgtgagttctatgatacaatgtaccacgtgcaggccccagactttgtcttccatctccttcataatgtaatgtagtccatgagaaagtgatgtagatcaccaacacaaatgaacacatgcttattctggtggattttcactttcctgtcatttctggacttcagggaattccttactctcttataaatgcagctgtgcatttaaaaaatatgttttgcagattatatagcatttttcattgtgatacacaggctttttgttctgtgtatatctggtctaccataatgcttgtaaggaaacacatttaatcttctgtgaggtataatttattattcccaggttttatgtaggaatatcttagggtcacagaggttaggtgatttttcccaacactgtagagatactaagtggtggaggtgaggttgaaataggtctaaacccaaagccaaggcacttttaaaagattaataaagtttgtcgaatgatacttggactaactcctgcctgaattaagctagaaattaatataagttctttaattcagttaggaagatcccaaatcagaaacaaatcataataaaaattgagatcaggaagcttcctgagtgtagctcctcatatcactgtcccacacataagtactgccccatatggcaatcgggaggccccaggaatgcttgctagggtcaggccctgctcctctaagttagttgaaagctccctccctactcagtgactgctctcatacttcttcactgtagctgttggctctcagaacatgatgcccaaagtatagcgcctcggtgtgctgagtactttgaactgaaagacattggaagggcctccgaagaaagatctctttgaccttctcctgccctcttgtctttcatgcttctttctcccctggagtgaaccatggaaactagaattcctcttccgcaagacaatgatagaaactagaagccctttccccaaagcaagccataaaacttaggaaggtcactctctcccttctcccttctcatttgaagacccttaatccagaggaatcctgccccatacttgcaaagaagaaatgctacacagagagtccaagaagaatttgaacccagtctattaccattagatcatactcttgtccaaacacatctctacagagctgcccattcttcatggaacctaagcacaaaaacagttttccctggatctttgggtcttcatttctgaaggctctcatatcacataaaactttgattaagtaaatttgttatgcttttctcttgttaacttgtcttttgttataggagtgtcagccatgactcttacaatgagtaaggagaggtattacctacctccttttacccctacatgctcttggagctgattatcacagtttgtaatttttccaccttccattcctgcttctgtgtattttgataaatttttgcaggtcagtagacttcccatggcagaatatttcctgcttctcaccagcccttaagccaatccaaggaaaacaaaagaacatcataatgctttgtcatatgacaagattacaaaagcagcatccagtggcagaatgcccaactgctccgggacacagccaatagctgacttcagtgctccccatccctgcttgtcagtgattagtctaaattgttatcacaagcccagtctgaccaatgaatgtgagtgaggggccattttgattgtcagctcctgattctgcagaaaacacgaaactgagctgtacaaagatgctgatgaggggctgcagcatgcaattcacttcaccagcagtcactaaggtctgatctcttttctaaccatacctggaagatggaatgctggacccagggtatgcatagaaaatgggagttattagaaaagcagctttgcttgc

SEQ ID NO: 5559 - DNA, 2300 bp, Homo sapien
acaggtgcatcacctgaggtcaggagttcgaaaccaggatggccaacatggtgaaaccccatctctactaaaaatacaaaaaaatagctgggtatggtggtgcacacctgtagtgccagctactctggaggctgaggcatgagaatcacttgaacctgggaggcagaggttgcagtgagcagagatagtgccactgtactccagcctaggtgatacagcgagactctatcttaaaaaaaaaaaaaaaaaaaaaagaagaagaagtcaagaggtccagcacattcttctaggaacttgtctcatgcgaatggggagatgtggtctatctcaagttgcctaaatccttccttgaatagacgtggagatgggtttttaattcacatagagagagagattatatactatactctttcttaagcatattcttttcctaagatgtctgctctcatttcaactgtgaatgcataagatcttatgtgacgttccttttctgggtagtccttcttgtctatataatttttggctttagaaaggtcaggagcagtaactggagcagtaactcagaagttccctgaaaagaaagagaagagctgccccagacatctgagagcatcattaacacctgtgaccatgatgggtcaagacaaaatacaaggccactctgtaatcaggtctgagtgcagacaaaaatacgaatattttccaactggattcgaaaataatcaagcagccccttaaactggccaatatgaatgactgctgcttcctttcaaattacacctgtcaccttggtctagtcttctctttttccagacacaatttaagatacccaattatagaatcatttctgcttcctgacagcctcccatcccatgcccatgaccacaccttaccacatgggagcctgggaaatatagtctagttacaggcccaggacaaagaagaaatagcacagcgaggctacagtttcatttggtaattatgagaagactgtaatgaagttaataaccctaccttgaaatgctcactcagagggaaatcgctctcagtctttgcccttttgcttatcttggtgcactacccctacaaaaccaagatccagaaacgtacaggatgacattgtaacaattcacaagaggaattcagaatagcagctttccaaattttcctttttctctgctaattgtgtgggcaattacatcagccttgggatcatataaatttttcattaaacatgtgaacattgtttgattgactctctgatggttgttgctttgtaacagataatcttcaaaatagtagaaacagaagaaacataaggacaactcagaagaactatgtgaatttggatttagatttttaacccccatgaccccatcacattctctgactacattgcatatgtttctctactgaccagctcaaacattgttgtttgaaccactaatggtgaacagtaaagatcatcaaaacagtcaatatgcttgaataggctccactatagccagggttggcagtaatgcaaatgctgctggaggatgtaaccagtatgggacccttcttatagaccaatatctcaaaattgaggagttgttttgcctaacacagccccacagaagaagacctaaccatctgcaacctcattcttccacaaattgacaatgactttctacagtattcttttaggcacaaaccactgaccctggtctaaggagcttccattgtagacgtccctggaaccacctggcgggatacatgtgatagtaacaagtttgacaacagagtctgacatgattcacaaaaatatacgttcctgtctgccactggtttttccacaacactgaatgtcatcataaagtccagttaccctctatctcctacaccacattgactccagcaagggaatttgcgtatcaaaactgcttctcacacacccatcctcttagctgccaaaactcagcatgtatttgtaatcaaagcagagacagccctattcctctgtatcattttcaccctgccaattcactaggcatcaagggtgtaaaaaactgcctggatatacctcccatatataagcaccatgcttatctgagaagccctagaactctgtggatgaaccttgaaggagcctccaagcctgaaccaaagcactacagatcacctgctatcttcatagcaccatgaggtaaagtctttctctgcttcactgaccttatttctgcacactttgaaattctaaaactttccttaagggccaattttttgacaggccttctcctaagggagctgtcccactggtg

SEQ ID NO: 5560 - DNA, 2300 bp, Homo sapien
tcctgggaatgaactcacaacctagtgctgaaatttcattttctaaatgtttgatcctctctggttcccattttcttttttatctgtaaacacacacacacacgcgcgcgattggcttttctttccttaatgctgttctatcctgtgtccctcatgggtttgtttagcccaaagagacactaagcaagattctgaatacctaatcagcctgggccatagccccgtagaaccaagactgctgccaaattcacagcaatggcaagataaactttttgttcatatctctgcatgctatctagtgcattggcaaattgaaaacccattttttcccataagaattccaaagacatcttgctccccaaaagatgttttctaattcatctgtttcagcatttgcttatggcctgatcatgtatctgagtgcaagacaaaacctgtcctattaattcagaaattcttatttgtgtagaactttctaactagttgttgaactctctgtggaagcttacagaattggtgagagctgacatgggagatgagtctggcagggagttgagcagaaactgtttagatctggcagtgtgcccagttaagtgtttccaaaaggaaaatactcttgcacctgctcctcttctgcttcttatgttaaaagacaaagtaggtaggtttttttaaaggaaacattgtttttatatattgttatgattatttgagacaggggctcactctgttgcccaggctggagtgcagtggtgtgaccatggctcactgcagcctctacctcctgggctcaagtgagcctcccacctcagcctcctgagtagctgagaccacagacacacaccaccacacccagctttttttttcagtttttttgtagagttggggtctccctatgttgtccaggctggtctacaattcctgggctcaagtgatcctcccgccttgccttccaaaatactgggacttacaggcctgagccaatgcacccggacaacaattttttattttttatttatttatttttttagacggagtctcgctctgtcaccagactggagtacagtggtgtgatctcggctcactgcaacctctgcctcccaggttcaagcaattcccctgcctcagcctctcgagtaggtgggactacaggtgcacaccaccacacccagctaattttttgtattttagtagagagggggtttcaccatgttggccacgatggtctccatctcctgaccttgtcatccgcccaccttggcctcccaaagtgctgggactacaggcatgagccaccgcacccagccaagaatcattatttttaacttgatgactgaaaataataataataatagttaccacttatttgcatgcttctatgtgccaggtagttgctaactatttaaactcaaattccatgaactgtagtggaggttgtactggaatttgattcagaatgacagtgtccatgatggagcaatagagggctctctatttcaaaccatacctccttgcttttacctcctgcctaagtcatcaggggttagaaggctttctaggtattggtctctttccttcattcctaaaccagattggttgcttatttccgtcaagctgaaaccaaaagtaagcaaccaaaaagcaaccagcaaccaaaagccttgttactcaattaattaagagtagatttttatatttgatagtaggttccttctaaatatagaaactgaaaatagagctatctccttcaattctcctttttctgtgtattcatccagaatccagccaccaactgccacaataggcagcaatggactgatgttctttagggaggacgtgaatctcgttccaaatgctggccagtcattgggtttctgcagcactagaaacatctatggttgcaggtctgcagtttatctgttttaaaatagaaacaaagtttcattccccacccccccccgtcagcaggaattccgctagctttagtttcactttcccctttcggtttccctaggtttccaacttgcaaggacacacccacagcttacaccattggctgctgtttagctcccttatataacactgtcttggggtttaaacgtaactgaaaatccacaagacagaatagccagatctcagaggagcctggctaagcaaaaccctgcagaacggctgcctaatttacagcaaccatgaggtaaggatttctttgctcctctgccataatgtctaaagtttttgaaaaaatggtaattaaatactatttcaacaggttagatctcagtgaggtcaggttttct

SEQ ID NO: 5561 - DNA, 2300 bp, Homo sapien
ccaaaccatagcacttgtcaatacttgttcacctattctccttttctaaaattattattgtagccaacttactgggtgagaagtgatagctcatggttttggttagcatttttctagtagctaatgatgttgagcatcttttcatgtgtttgctagtcctttgtgattcttctttggagaattgtctactcaagtcctttgcccatttttaaattgggttgcttatctttttgttgatgagctgtaaatatacttacatatatttctccatacatgagtaatcacatacatacaaatatataaggatttggttctttataaaatagggtcgtgttttggacacttctttacaattcacttttcttgatatatatgaaagtccatcaaactcaagtagttttgatctaattcatgtagtctagtggctacataatattctatggtatagatatacctttatttaaccgttccctattaatatttccagtttgttgctaatatatacagtgttggtaatgaatattcttgagtatacatccttatgtactggttatttttttctgggagatagattctgaggagtggaattactttgttgaaggaaatgtaattttaatgaccaccattaattttaattttgattttaaaattaaaattttaattttaattactatcaattttcatggctgtcatcagattgatcttgaaggccataataatacatggcttcagaaattgtgtcctcatccatttaaactcttgccaatctgagtggaataaagttataaattattgcttctttaatttgcatttctctaatggctagaggcttagggcatcttttttctttttatagagacagggtcttactatgttgcccagactgatcttaaacttctggcctcaagcaaatctcctgccttggcctcccaaagtgctaagattataggcatgagtcattgtcttgatccagagcattttttttcatatttattggccatttatattggcttttctacaaattatctattcacatagatttccagtggtctgttgaactataccaatttacaaaaacactttgtatattacagatgagagtcttctctgtattacaaacattttccacgtttttgttatttttctatttactttgtttggagtacctttgccataaataaatcacaaattgttttattatggtaaaacatatataacataaaatccaccattttaaccatttttaagtgtacagttctatgacattaaatacattcactttattgtgcaaccatgaccaccatccatctccagaaatttttcatcttcctaaactgaaattctgtactcattaaacaatcatttcctattccctcctcccccagtgtggaggatcagtcagagtgacgggaaaaactatagggaaagaatgcaagccttctgaaaggtcagaaggttctgcagagccctgggggagaacagctgaaggcagctgttctataactctgaggcagagggcaaggagtaggtacaagggagtgtgggggaatgtatcttaaacaggcttgtttatttatgttgaccaggaactgacctttgatcatccacatgcgtgatgttccctgaaaggggaacaataaatgttaattccctacaggttgtgttggctccaggttttcggcattgtgcctgcactgaataaaagtaagcagctccagcttctcggggatgttctctggccactagagccaggcagtcacctagctgctcttacattgcatacctgtgtctgagtactcatttcatccatcagccagggtctgtgggacagacccggcaccctagtccctgttaatcactattttactttctgtctttatgaatgtgcctactctaggtagcttatataaattgaatcatacaatattgtccttttgtgactggcttatttcacttaacataataccttcaaagtttatccatgttgtaacatgtatcagaatgtcttttcttttttaaggctgaatattccattgtatgtatataccacattttgtttatccattcatccatcaatggacacttaagttgctcctaccttttgctatgtgaataatgctgctatgaatatggacaaataaataatctgcttgagtctctgctttcacttctttttgggtataaaaccaaaagtggaattgctggatcaaatggtaattctatggttaatttttctgaggaattaccataccatttttcacagcacttgcccccttttacattcctactagcagtgcaca

SEQ ID NO: 5562 - DNA, 2300 bp, Homo sapien
gaataaaagcaggccaccccagccagcagcggcaacctgctcgggtctgcttccacgtcgtggaagttttgttctttcgctcttcgcaacgaatcttgctgctgctcactctttgggtccacactgcctttatgagctgtaacactcaccacaaaggtctacggctttactcctgaagtcagtgaaaccacgaacccaccgggaggaacgaacaactccggacgcgccacctttaagatctgtaacactcactgtgaaggtctgcagctgcactcctgaagtcagcaagaccacgaactcaccagaaggaagaaactccagacacatctgaacatcgaaaggaacaaactccagacacgccatctttaacaactgtagcactcacagcgagagtccgcagcttcattcttgaagtcaccaagaccaaaaacctactggaaggaaccaattccggacacaccatcacctacgtattaagctcagcatcacttagctatacttcttgatgctctccctcccaccacccccaactccaacaagccccagtgtgtgttgttccccactgtgtccgtgtgttctcatcatttagctcccacttacaagtgagaacatgcagtgtttggtttctgttcctgcattagtttgctgaggataatcactggaaatacttgctctgtatttagagttcataaaatttgcaacttataaaaagcagattcgtatacctaagttattccaaatgtaagttttctattaacttatcagtttttaaatttatattaaattaaaaatcaggttcttaatagccacaggtgaccagcagtttctgtataagacagtacaactgttagaagtgattgctttaaatgaggcactcgcttcaggcactaagttttgaggggtggggtgccagaagctcagtgatcaaggtagacaatatttcaatgcaatatgtttttaaaaattcaaaatcaggccaagcatagtggctcatgcctgtaatcccagcattttgggaggccacgatgggcggaacaatatttaaggtttagaaaaatatttgtgcccaggtgttggagaccagcctgggcaacatggcaaaaccccgcctctacaaaaaataaattaattagcccgacatagtggtgcacgcatatagtcccagccactcaggaggctgaggtgggaggatcgcttgagccatgaaggttgaggctgcagtgagctgtcatctcaccactgcactccaacctgagtgacagagtgagaccctgtctcaaaaaaaaaaaaaaaaccaaaatcaatgcaaaagatgaattatggacaggatattgaggttttgaatacagacattaactcaataagggtaaggcccgtgtctgttttctttattgttatattgacagtactttgaacaaagtctggctcttacagttgtttgtcaatatttgctgaatgaattcaaaggggacaaaatgtttaaggtatgggtgtttgacattttctgcctagatccccaataccactcttgtctttattgggtccttattacaaagcaccattggcgaaggtatggaagagaagcagtctcctacaattgtgggtaagagtggatttttaaagctatttggcaatatccgtcaaaacttaaaatgtatatagattttagctccaaatttctcagtttacacccaacagaaataacagcatagatgtatagcattgcagtgttgcttgttgaatcaaaagactggagtggaagcagggacttaagtttccgcctgtaatcccagcaccttgggaggcagaggcgggcgcatcccttgagatcacgactgggtgacacagtgagacgctatctcaaacaaacaaacaaacaaacaaacagttacacgggcagcatgcgaactcagcgtactcagggaggcagataaaagccgagaccaaagtgaaggagcccagctgcaaattcaactccgaaagaccctggactccgcaaacgtctggccgcggctcttgagctcttctattaagtttcggtttctgaagcttacgtttagtttcgatttcttaagtttcagtttctgagcgctcggcatctgattcaatctccagtttcctgttcttgctggggctggggtctctcctttaacaaagacacgccgcgcggccgagtccaggggctgcagaggcctggcgcgcgcacgcgcacgcgcacgcccaccgcgcggcttcccgcggtccccggtgctgaggagagagcgatccgagggactgcgccgcccggacggcctgcagag

SEQ ID NO: 5563 - DNA, 2300 bp, Homo sapien
ggctttaccagccccctgcctaaaacaaacacctgttttgaaggtctctaccagcccagcccaaggaggatgaggagggctgctcaggtattatggatttggttgtaagatctcaaagggacattcaatcaggtactgacgtggtttgtccaggctctggaatttatgcacaactggacaccatgagaatttttattgtttaaactttgtctacttaattttgtaactttgtctttgggaagctaataagagagaagctattgcatcagaagaggtaacacgtatctttcggtaattctgttcttctgctaggaagaagcagactttcattgtccttgggagacagtccccaatggggctgagcccttttcctccccatcctgcatatatacggtgcacgccaccgtctttttctgttttttgttgttgttgttgttttgttgttgttgttgttgtcaagccccttcctgatagcactctcctttcttacaaatgttagatgtggccaggcgttgtggctcacgcctgtaatcccagcactttgggaggctgaggcgggtggaccacgaggtcaggaattcgagaccagcccggtcaacatggtgaaacccgcgtctctactaaagatacaaaaaattagccaggcgtggtggcacacgcctgtaatcccagctacacgggaagctgaggcaggggaatggcttgaacccgggaggcggaggttgcagtgagccgagatggagccattacactacagcctgggtgacagggcgagactccgtctcaaaaataaagttagatgtgtgggtggcacttaaactttttttttaaacttataatgggaataattaacatttattgtgcaagtattatgtgctaagcagtcaactgataggatttattactgtccttttccacagtcccaagagatggacaccattaatttttacaaataaggaacagactcacagagtttgagaaactttgggatcactcaactagtaggagttcagtccggatttagaacaagggactatctgcttttagagcccaagaccttaacatctcattcctcaactcattaaatgcggaaggttcactaaccacgtgcagggcggggtgctagcccctggggatacaaaatgatcaagaaaaggacgccatcatactaaatcagtaaaggaaacagataaagaaatcctcataaaacagcggattgggtgggacgataacaatctgtgcttggtacagaggtagctcctgggaagggaagaactcagacccagaaatcagaaacgcaaactggcagtggcaggcgaacctgacgcctgcagggctgcggcgaaaccgcgtatgccacaccgagggaatggcagctggaaagagaggcacgcgacaggcctaaggagacccgtggcacgtagcagctgcccccggaacagcgcctgggggctctgcaggcgctgaccagtttcccggaggcggcggccgcggacccagcacggtcaccgtcgccgctgccgagaagagccgtcgggtcgcgatgggtggacaggccttccgggggagcgtcgcccggcacataccctgacagtcccgaccgcagacgccagggatgggacaggctcccggggagcatctcctgttcctcctccctgaccggccttcttaggcgctggggaggggccggactcccgagaagcgtccactcggccaccctccccggcaggcccgacttcagacgccgcgcgccgggacagagcgcccggggagggtccccaacgcagatgcccggttgctgggcgcgaggggctcggcccctgaaaaggccgcagaactgcgctggaaatgaataaaagcagcccggtttgaaaccaaggccgacgcagggcttgggaggagaggcaaaggaaaacccttacctcatgatggcagcgctctgcaggccgtccgggcggcgcagtccctcggatcgctctctcctcagcaccggggaccgcgggaagccgcgcggtgggcgtgcgcgtgcgcgtgcgcgcgccaggcctctgcagcccctggactcggccgcgcggcgtgtctttgttaaaggagagaccccagccccagcaagaacaggaaactggagattgaatcagatgccgagcgctcagaaactgaaacttaagaaatcgaaactaaacgtaagcttcagaaaccgaaacttaatagaagagctcaagagccgcggccagacgtttgcggagtccagggtctttcggagttgaatttgcagctgggctccttcactttggtctcgg

SEQ ID NO: 5564 - DNA, 2300 bp, Homo sapien
atgtctacctacctagcagttaaacagagctggaaatgagattacattaccctaatgaaaatgcatctccactgtaattcagccagatggtaaaagcaactgcagctttctccttggaattagtgtatgactgagattctgtactcagaagaaacaagatattacccagggcaacatgaattttcagcaatggtcattcttccagccattgccaagacattaaaatactattgacggtcaatctgagttgctcctgctttataatgaatattgctgtccaataaatgggagtttctaattttaaaaaaccctttattgtgaatattcttatattacacattctttctcaatgctgtggaagtatcactttagcaaatcataataaatgccatggaaaaaagcaacatgtacattcaataaatcactcttacagagactgcataggattgtgggactgcaatgggagtttgcctatcactcaaaggggtgtggagagtagcgccaactcctgtctgggcattgtgccattggtgtggcgtgaataaggtcaataaaggacgtaacctcatagtgaggctataaatttggctatgttagctaaagaaggtacacccacccctagtaacccaaagaccctgactgctgctatggtgaccaatggatcccagtttaccaggcactgtcctggttttaacactggaagtcccacatccagaaacccctcagtccaggcaactctgggttgctggctactgtgcactgcagttggaagcaggagcttctgaaggtggttctctttttccttctctgacattctagttgccataaaatccaggctcacagcccctcagattttcttcacttaaaaagtaatagaaattgatctttttttttttttttttttttttttttgagacagggtctatctggctcggtcctcaggctggagtgcagtggcgcaatctcagctgcaacctctgtctcctgggctcaagccatcctcccccttcagcctcctgagtagctaagactacaggtgcatgccaccacacctggttaatttttgtatttttttttgcagagatggggttttgccatattgcccaggctggtctcaaactcctgagctcgagtgatctgcctgcctcagcatcccaaagtgctgggattacaggcatgagccactgcacccagcccaaaagttgaaggtctctaaaaactttctaaagtgtcaacatttgtctgctgaccttaagagatattttcacatatatgaaaatatacattgctatgttcacatataaaattggcatgatgtttcccaactatgtaaaattaccctggaattttcatagttgtacatgctatttgaatccaaattccagagtggtgcagattgtcagtgttgtgtcttcataggcagtgaagcgtttagggaattgtctggataatttaagttaaaaaatggaggaagtgataagtttctttggttggcattatccagattttctagtgaattccaatttagtttgtgtaattatttttatgttcttcatttaattttgtttatgaagtcatatttccttaagggtgttctccctaaaaagaaagtcatatatattctacattttccaaattgtgaatgactggtgaggggagactcattttaagcttggtgtaaaaagcagctttaaaagggtttaatgagaggtcagattctctttaatataaatcattgtattctgagatatcattggctgtttatggtacttcagcactcatagagttctctttatcctcaggtcttggatttgcactttgttactctccagctattgccatggttggcaagtacttcagcagacggaaagcccttgcttatggtatcgccatgtcaggaagtggcattggcaccttcatcctggctcctgtggttcagctccttattgaacagttttcctggcggggagccttactcattcttgggggctttgtcttgaatctctgtgtatgtggtgccttgatgaggccaattactcttaaagaggaccacacaactccagagcagaaccatgtgtgtagaactcagaaagaagacattaagcgggtgtctccctattcatctttgaccaaagaatgggcacagacttgcctctgttgctgtttgcagcaagagtacagttttttactcatgtcagactttgttgtgttagccgtctccgttctgtttatggcttatggctgcagccctctctttgtgtacttggtgccttatgctttgagtgttggagtgagtcatc

SEQ ID NO: 5565 - DNA, 2300 bp, Homo sapien
tatataaatcttcatgcttagagaagtattggggaaggataggattatgtcgtcatgagataaacatattcattatgggtgtaatttcattcaaggaactccgaaagtgttatataaggtatgtagggtgttctagaaatgtatggaattaacattccatctgtgtagtagaggacaacaaacctggcatttgtttaaaataaatttcaaactcacgttattaaattgatgtcttagagagtttctaagattaaatcaaattgtttgtagcttagacccacttaatccattcatttcaatgagttctgagtattttcggaaattttcatctcttcaagccatgtcttagtggcaaaagggaaataatacctgtattcagtaactcataataaccattttattccattctaggcactgactcatatttctttttggaaaaaaaattcatttactcatgaatcagttaaattgtactgaaatgtataatatttgtttggttgggaggaagttgagagcagttctaagactaaaagcaggtttcatgagaaggctaaatcaactcaactctttcaactaagaagaaggtcttaagggatcaaaaaatcatatattcgagttatagagcttgtcttttttttgaaaccacttgattttcagggtcacattattagtcacagcatttgcatcagcacaccaaagaagccatgtttgtcttctcagaggataaaagtgactaatttccctcatttctatcttttggaggatattcataatcccccaaataggaggaaatgaccttaggtgaccaatatggtcacacagtcaatatggttcacacagtcaagctttgagtagggttatgtcagaagcaacatatttaaattctatgcaagaccaagaggcctgttgtacacaattaccatatacctacctgctcaccttgtaacataatattagaacattaaagttcagagtatggatgagagtctgcagaatcacatgtgggacacccactgggaacagatctgctctgtgatgaacagagaaggtaacagttgacccccaatttcagtctgatcaatacaaaaatgatcatactcttcagacacctggaaaatcaggtcttctgatcttgctactaagagttactgatgtcagcatgaatttttccttagaaggaaattcacatgccttcctcacccatcactcctgccattagtctgagagacccaaagagtaagggcgtgaaataacctcacactcggtgttaggtgctcttgttggtgaccttgggccatgccatatacccctgaacttcagttccattttggtctctggttttacttaatattctatgagccttgaggccaacataattctgatacactggtaagccacaaaccaagtgagaccaaccagaatgtcaccatgggcatgaagcatttttcttagattttctgggctttgatatctcaaccacagggtgtgctgaagcctgaaaactgggccagattgtggaatttgtctatgatctctctccctggtcttttactgcataaccctgctggtcacatggtgttatccactttctttctccagcaattaactgtcaccattattgctaatgatatatgatcaacactatagtaagcatccctgtgcaaatgacatgtaatttagagaaagttgatccactgtttaaaaaacaccctaccgtcctgccattatgactataatagaatgaagaggattgagccctgaaatgcaggtcaggagacttgagttctattccaaccctgctgcttattatctgtgggaccatggacaatcacttcctttctctgggcctcagtttccaaagctgcagaattaatagggtgggctcaatgctttaaaggttctctcctctgtcaatgccacatcacagcctttcacagtgccctcaaggcctttctgttgaacctatttcttattgtttttgaagctccacttgggagtgttgtcagtaaccatttatcctgtcaagtgggaatcatgctgggtggcttgcttgcatctactggactcatcctgagctcatttgccacgagtctgaagcatctctacctcactctgggagttcttacaggtaagggcactttgtaccacctgtctcaccccactccattcaggggtttccaagcacatcaacagagaagtaattcataaaatattcattttgttagatgcataatttagttgacctagcttatgtctacctacctagcagttaaacagagctggaaatgagattacattac

SEQ ID NO: 5566 - DNA, 2300 bp, Homo sapien
gtattcaagcctttaacctaaagaccttcacggctgagaggtcagggctcactcatggcagcctctacatttacaggttcattttcaatgctaatgaattcttttacaagctgtatttgttctttcttttgtgagttttgaacatttattcactaatcatcacttaaatctaacctagggttttttgcaagtgaaaataggacttaaattcagatttatagttaaagggcaggaaactgagaggagggggatgactaaaaatagccagagggtaaaatgagaaaggactatactagactatttaaaaaaacccctggcttgcacagtggctcaagcctgtaatcccagtgcttggggaggctgaggcaggaggatcccttgagcctaggagttcgagactgcaatgagctatgatcgcaccacagcactctagccttagcgacatagtgaaatcccttctttagaaaacaaacaaaacgagactccttcccaaaaaaaaaaaaaaaaaaaacatacctacggtgccttgctgcgtggcaaatgctccctactgttcatcagtaactctttgtcgggcagatcatgaggtcaggagttcgagatcagcctggccaacatggtgaaatcccgtctctaccaaagatacaaaaaattagctgggcgtggtggcacgcgcccgtaatcccagctactccggaagctgaggcaggagaatcgtttgaactagggaggcggaggttgcagtgagccaaaatcgcaccactgcactccagcctgggcgacagagcgagactgcttctcaaaaataataataataataattccaaaaagcctaattcattttgaaattttgacatacagcgaaatcaccagggaatcttgcaaaaaatgcagattctgatccgcggttgggcctgagattccgcatttttaacaagcacccaggtgatgacctcgctgttggtctacgggccactcttgaagaagtgaggacgtaggctccaagatattggaaccagaccttgtcagttcagaggccttgcttctgacaaggagaggactttacagaaagttcgcctggaacctgtcctacgtggggtacgtcctggcagctcccttttcaggctttgagtcaacgtttggggaattgtattatgtaccgggcgcctacacctcactcatttcatactcgcagcaacaacatgaagtgggcgctatcatcctttgttttacaagcaaaagtgaggctcagagagttaaattgcccaaggttatgagattttcagatgcgttgaacccaggtccttttgactccaagagataacgcttttcactagcattctggagcttcagtttcctgtgctgtgaaatgggaaggattggctagcagggtccggatccctgccagatacacctaaaggaggccttgtattttttctcgagatcttgctctttgaccctgaggggaaaagttctttttgggaacaccgagctcccctcggcttgccgaggtcaggggtcatggctcttcccggggagggtccggcagtcctagagcggtttggctggggacacagaaagccggtgcattacataaccgcgagacgtccctcctccgctgcgcccctcgcccctagccaagccacagtacttagagcggatccccgcgctaaatcctctttgccggccaggcagagtccccggcggagctggcggggctgaatgagccggtgcatttcgaaggccgagcactgggattttccgcgctacgcttccctctcccggcgttgccagctaggcccccggccccagcctcgccggcgcctccgcccagtccgctccccgccccaccgaagcgcggatcgcgcagcctggggcccgggaaggggccactgcgcagggacgcggctcggcgggtgcgccccgggggcatgtccgcgcgctaccgccagggctgcagtggtcccggcgaggtgaggaggcggcggggccgggctgggggcgggtgtggcaggagggcgggcggggcatgggggtggtctgcgcgctctgggcgggctgcagagcgctggagcgctggagctctgggctgtcccgggctcagtctcgccggcggcccccgctcccggatccccagcgccctggccaagaagcttcctcggctccccctcttccctctccctgacacggttgtgcagagggcgcggtggctcaggtgacacgggcatccttcaaggaagggcggcgggacggcggggcgctggcgctgtcgttggagctggaggaggacggggaccctc

SEQ ID NO: 5567 - DNA, 2300 bp, Homo sapien
acatggacctcttcctttactcatggaactgcatctacagtttgggtatctgctactggtggtacctagctacataattttccatgaaaacccataatttcaatcatatatatatgtgtgtgtgtacatatatatattagtaaatgaagttatatatatatatatatatatatatatatatatatatatattttttttttttttttttaagatggagtccggctctgtcacccaggctggagtgcagtggtgcaatctcggctcactacagcctccaccagggtacaagtaatccccgcacctcagcatccagagtagctaggattacaggcgcgtgccaccaaggctggctaatttttgtatttttaatagagacagggtttcaccgtgttgaccaggctggtctcaaactcctgacctcaggtgatccacccaccttggcctgcaaaagtgctgggattacaggcataagccaccacgcctggcctcaatcaagtatacttttatacaaatgacaatttaagaatattacacatagtttcactatttcattttattttattattttttgagatggagtctcgctgtgtctgtcgcccaggctggagtgcaatggcacaatcccggctcactgcaacctccacctcctgggttcaagcaattctccttcctcagttttctgagtagcttggattacaggtgtcagccaccacacctggctaatttttgtatttttaatggagacagagtttcaccttgttggccaggctggtctcaaactcctgacctcaagtaatttgcctgtctcagcctcccaaagtgctggtattacaggcatgagccaccacgcccggtcagtttcgttttagatgcatcttcaagaactatgtacctatctacagttttgtaccttcttgttaacagttattgacattattaaacataaccttaatcccaaattgattttattcttagaagtaaaagccagtgctcaaacacaaattgaatttccaaagctagtagctctttggggcttcagaacagatggatgtgagcagctcttcttcatttactcttctacatggtaaagaaataggaaaacctatgtccattagctttaggaatcaatactccttttcctgctgggagttcactggcgatactttactctgaatctgcttttctttccattaggtaactttgatattaatacacaattgagttcattcttggctactgtaattactttctaattttgtctaggctgttttagaggaactttccctctaaacaagtcaaagctttttaaatgtagttcaaccattggaaccactttatgacctttgttactgttttttactatggagtggtaagtaatatactaaaaaccttctggagagtctactaggaaaaaattcagtatcagatcagtggttcctttctagaaatattcaaggaggctaaatgagattatctctgctagagaagcaaggtcaggtaaaacacagcttttaagacaggccactcctggcacaatcctgggtcagttttgtcatcagagggtttggcttcatagctttgaactatgctttatgtacacacaaattctttttctaggtatttatattcagctgcatatggttttttaataggagttatttcttggttatttgctgctttcagaccacccaaatagaagagatcatgatttggccccatttcataggtgggaaggctgaacaaagcactcaggttagtggctagttgaaggtctcacaacagaaatcagtgagagtctttctttggttttgttctcaaatttaggggcaaattttccttgatgtttatttttagtctctgccctcttttcatatccagtctaccctaaagctctgttgcaccctagcactttaattcaagtgcccctttgttcgtctgcttttattcacccatattaatagtcttgacgtagttggggacttggatgggcatatcttaaagtaaaatttaaaaataaaccttattattccttcagtcttggaggtggaacattcctaggcctatgttgcttgctgactggttgtgagacctttgaagaagctctggaaatggcagctaaaggcgacagcaccaatgttgataaactggtgaaggacatttacggaggagactatgaacgatttggccttcaaggatctgctgtagcatcaaggtagagattaagtagctaggagcagtagtgattaaacacaaggcagcctctccaccctggccattcactaagttgttttaaaatgtca

SEQ ID NO: 5568 - DNA, 2300 bp, Homo sapien
aaatgagtaacatgaagtcaaaaattttgttttagctctttttttgtttgtttgtttagacagaatctcaatctgttgtccaggctggagtgcagtgacacgaccatggctcgctgcagccttgacttcccaagcctgagtgatcctcccacctcagcctcccaagcagctaggaccagcagcatgtaccccacaccaggcttttttttttttttttttttttttttaagagatgggtctccgtatattgcccaggttggtctcaaaatccgtggctcaagtgatcctctcacctcggcgccccaaaatgctggaattacaggtgtgaactaccacaccccagcccgttttacctcttaacttttataatgaagataatatctttttgacaaaatatctgagtctagtacttgtgtaggctgtttccagactccagaagcagtacccattatgacaatgaagacacgagaagtacagcaagtcattgggagatatttgctagttgtgtcacttagggaaagttatttaagttctgtgaatcttaaccatagaataaggttgatagtaccaacttttagggttttagggagaattaaataatctggtacaagggtttagcatgtagtaaacagtaaatacttgctattatatttttaaagagattttttaaaaatttatattgggtctcttaaattatcttcatttgttcagtttcatgttggtgattgttagatttttttctttctttggtccatggaaaatgatgtttccagatctctgggccagtagtaatatatttgaggatcataaattaaacttttgagaaggcaaaatggctaccagaccctaagcctagccctcagccaggtcattcccctttacctttttgcccctgtacatttttgtctcacaggaacataatagggcacttggggaccaccccagacattaataaaagagccaacattttttgaatgctttgtatttgccaaggcttatgtaagcactttacctatatttttaggtaatcttcacagcaacagtgtgcaatgaatgttattattatcttccccattttacacatgagggcactgaggtttgagaaatcattcagttaagtaaattttagagctagaattcaaagccagatctaactacagagcccaagcctggaaaaaggggagtagggctttgtgggctcaaaggtgattcaccccagttcccagtccctcgggacttcatgctctaccaaggaagtatagcatttttgttgctttctgaatattctcagtctgctcaccctgtgtaagcacctctttcttggcagcattccctattagattcctgtcactgctataacaaataaacttaatggttcaaacaacagaaatttattcgtttgtagttcttaatgccagaggttcaaattcaaagcattagcaggaccgtacttccttcagtggctcttggggagatgccattctttgcctcttccagcttctggtggctgtcagcattcattggcctgttgagcagcactccagtctctgcctttgtcttcacatggccttctcctttgcatcttttaaatctctcctgtgtgtctatatgcttgccattggactcagggcccaccccaataacccaggatggtcacttcttctcaagatacttaattagatctgcaaagaccctttttccaaataaagtcacattcacaagtgctcagaattaggacatagtgccatctttcagggaccaccattcaacccacaacacacgctgatgggtgcatttcaaacaatcaggcaagctcttgtcctttagcatgcactgtgggcaggtatgacatctagccaaggctacttttccagtgcagtggctgattatctgcaagattttacaacttgttttaagggtgtctccatgcttttcatgtgaatgaccccatcttaaataaaacctctggggcttccccttagatggtcgcctatctcacaaggttttattttgttgtgtgttttgttttagattgctgacctgcagctgcataaactggatgaactggactgtctgattcagggcctgctttatgtcgactctgttggcttcaacggcaagccagaatgttactattttgaaaatcccacaaatcctgaattgtgtcaaaaaaagccgtactgccttgataacccataccctatgttgctggttaacatgggctcaggtgtcagcattctagccgtgtactccaaggacaactataaaagagttacagggaccaggtaaacatgtttctg

SEQ ID NO: 5569 - DNA, 2300 bp, Homo sapien
tcttttgtatttcttaaggaattcatggaaagttgatagtagggaagaaattcgagataattttaatgcaacccattccttttacagataaggaaattaaaatccaaagaggtagaaggagctacagtgagctacttactgtctgctgcttcagggaagcagatgttccgaatcccagtctggggctttacctattacaacatgctgctcctacactgtggcccatgctgacagtgagttttagagaataaaccaacagacttcatctgtgatctgaatcaacaaatgaggatgaccagtttccagttttttcatctcctgctaggacaagcgagtttcccaacctacactggttgcagaatttgctttgtaaacgtctgcaaagaaaacaagacatttgttaacttggtcttgtcagtgaaatttgttgctcttaatcttttgagggcctggaattttatttctataatgctagagttcctgctcaacaagtgagaagcagctatcttgggtcataaccaaaataacaatagtgaggcagaggaaagaagattttgtttacagaaatggtttcctgctaggcactcctccctcagccctcctgaattgaaagctaagtactagtaggggtgcctagaaaaaagaccttctgcagggcccactgatgtttctggcagtgtggacaatttgacaagggttcatattgatgttctctagggctgaaataaaagaaacttggaaggaagccatttttgcaccctgagtctttaaattcagttttaatattacagttttgggttttgccaatggattctgtgagggaaataaaaaggaagactctaacctttgggttcccatttgggtttgctctgtgttcattgcagagcatttgacagcatggcattaactttccaggctgtctctaaataaagtcagactgtttaggtagctcacctctgctcttttcagctcttaacaataaagagcttatataactaaaaaaatcatcatgatggagattcattttgtcatagataagcatcacaagcacattaagtatactttcacctagaggcatgcctttgtgtttcagacctggccatggttcctctggtttagtagtttccaagcctgcagattgcaaccactagggaacttttaaaagatattcatgtctggatgccatgcctgaattaaacagaatatgtgcgagaggaggccagaaattgaatattaaaagcttctcagctgattctaaaaggcagccggattgagaacttctgagcaggctatttggaatagagaggatgtctctgtttaatgcagaaataaattagatataatgcgagttgttctttttagaatttcatgtctgctcatcatctctcatagtctacttcctctctctttcccctttctatacactgtatagattaaaacagtggaatcacatcttctaaagtcagttcataaagcaaaaatggaatcattgaaatgcgccctaggttagagaccgacataccatctcttggtacacccagcatggtcagtttttcctctaggattgaagcagatccgtttctttggtaaagattctgacaaaaatagttagcaattgggatccaggatgtatgcaaaaatatatatatctatctttaaatattagtataacactcagcttggtgagatacttgagccctaggaagcacacaggaattgagactgccttagggaactgcagaatcctatttctcatctcactcaattctgagtggagtgcagtggtgtgtgagcagagccttgggcactcttttgattgtaaaattttctctgtctgtgccaccttttaggcacatatagttgaattcaaataaattgaatgttaaatgcacatgtagatatgataccactgcttttgcttatttaatattcaaaaactgaacacttctttgcacgcatagcattcagcagcactctttctttctgtcctttagcattcccatggtttggcatggacatcggtggaacgctggttaaattggtgtatttcgagccgaaggatattacagccgaagaggagcaagaggaagtggagaacctgaagagcatccggaagtatttgacttctaatactgcttatgggaaaactgggatccgagacgtccacctggaactgaaaaacctgaccatgtgtggacgcaaagggaacctgcacttcatccgctttcccagctgtgctatgcacaggttcattcagatgggcagcgagaagaacttctctagccttcacaccaccctct

SEQ ID NO: 5570 - DNA, 2300 bp, Homo sapien
tcagtggctgagttggaatttgaacccagtgctaactccaaagctcgtagtgctggtcaccacgtgatgccgccttcccttcttagaagaggcaactccttactctataaataacatgacattgtcttttgaagtcctttctgggtgaggaaagtgctttttatagcatggaattgctcctgtttacttgatctctttcagcaccgattaatcctgcctacagttttgtccttcactgtccttacactgtattcctaggtttcctccctgcaaaagacaactccatgagaccacatggtgtttgagtgtgtgtgcgtgccagcaaagaaatttcactcccctccctccccaagtctgccaacttttctataaataattgttctccctcccctcaggcctctaagtagtttggtcacttaaccaaacgcacaggcacacacgcgcgcgcgcgtaagcacacactcacaaagcggggagggtaacgtgaatgaccttgcaaaggtatcttgctcactggggacaggattagcaaacctgacacctctgcaaataattgtcttcctcccgtattcctcctgaaacggttcgctcctttcgctgtctctcccagacccatctggttttcacatcgccatacaaagcccaacccgcccatctcctctctgcaagcccagagaacttgattccccatgttgaaactcgtcggtggcggtggcgggcaggactgggcatgctcagtggcggggaccagtctgggaggcgaggaagccgcgtttgaagtcgcgcggcctggggatcaggggaaggcgggcggcgggagccccggctgggggtgcgcggggatccccgattccgcgcccggggctggcgtgctccaggccggcgccgtggggccggcgcgcggggggcagggcgcagaggaggtgggggagtcggcaggaggaggggaggagcgccgggttcgccatccccaggcgccggctctgcggctgctgaatcggaagccgcagggaggatccggggaaataaagacgccggagaatgacctccagcgaggccgcctgagccggggcccgcgcacagccccgccagcccccggcatgggcgaccgcagcgggcagcaggagcgctcggtcccgcactctccaggggcccccgtgggcaccagcgccgccgctgtgaacgggctgctgcacaacggcttccatccgccgccagtccagccgccgcacgtctgcagccggggtccagtgggcggcagcgacgcggcgccccagcgcctcccgctcctgccggagctgcagccgcagccactgctccctcagcatgactccccggccaagaaatgccggctgcggaggaggatggactcggggagaaagaacaggccgcgtaagtcccgctgggaggggagcgcgggcgcaaggcagacgcagcgtgcggggcccgggactgggagcggctgaggcaggcgccgcagcacgccccgtgcgcccccgcgtctgcggtcgagggactgcacagagtaggttcccgggactgattcttttcctaggggacatcaagcactacaggtctttgcctgagcctgccctttgctcgcttctatcagtagaacgaggattggacacgaagcttgagcgggtccctaggtcaaggatatataataagcgaacgctctgtccgcccttctaattggtggctgggaaaacgcaggtgtgtgaacatttgctggggtccaggagtgaggataaagtgggcggcacaccgagggtgctctctcctttctcacccctctcgcttctctgagcgcgtcctactggggttgcctgccctttgaatcacagagtagccagcagcgtctcgggtctattggagagcgcaagtctggaggcgtggagtttaactaccccccaaaatcacagcctattagaagctgtttcttcacggccaatgagagggttttttgggagggacacacccactgataccatgtgggccggaactatgtggaccaatgaggattggaggtggattttttttttcaacgaagggggaggttgagttgagggtttgtaattgtaatgtacaccggagaaagccgaagtgcattatttcacaatctaaagcttgtatatataatggtagtttgtaaagtgtaccttccccacaggacgctgtgggatgtaaatttgtaggtcgagtttacagctggtttttcttgactgaagctcattcaactggttacttctttgtgggtgtctttaatgaagcttataaatggcaaaaagcaaagtaag

SEQ ID NO: 5571 - DNA, 2300 bp, Homo sapien
ggtaagatgggcaatcaaataataataatgtctttttctagcacttacaatgtgctggacactttacatatgttaaccttaaataatgagatttagagaacatgattaagtatgaagtttgagtgcaaagcttgaggatagccacctggaaacactaactccaaatgagtgggatcagtgctccaaagtggagaagttaagatttcacttatactggcagagatggagaagttccagcagaattacattttccatacaagaccaatgcatatgccacagcgatttgattggttgcagactgctgcattccaaggaagattattactctgtgaggagaggcagtgatccaagggattagtatctctggccctgctcggtcttcctaattatttacaaggaaaaaaggcaagcccaggcatggtggctcattcctataattccaatactttgggaggccaaggtgggaggatcgcttgagcccaggagttggaggctacagtaagctacgactgtgccactgcactccagcctgggtgaaggagtgagaccttgtcttaaaaaaaaaaaaaaaaaaagcagaagttgtagctgcatagccacatttctctcaagtctcacaaaaaagttccaatagcttgaagtttgaattaattttacgcatgtgttatgcatttcatcagtctaacaactcagtgatgtcctattattctcaagttacaaatgagggaacagatgcatggtatagttacaaaatgataaggagtcataaacagagtacaaggagtaggaagagggtatggcagggagacctaatgtagccctaagggtcagggaacatttctctaaatatgagaagttaaagaggagatctaaagttggagtctagtagacaaaagaggtcttagagaagagacttctctaaggcaatggaaacagcagaatgttgtttaaggaattgaaggcagcacagggagcccctgatgaggcaggagaggtagggaggggccagatcacctgggtttttttctctgtctttaaatagcataaggttagggaagctaagagagttgagatttggagtttagtcccacctttgctcttaataacctcagccatctgtctgcagctcagtttcctgatacgaaaaaagtatgcaagagtggatagaccagagtgctccagtggcccccatggttctcaagctctgattctaggtaaggctctgctggaaggaattgccagatgcaagccctagatgctgctgaatgcactgaagcccaggggcccagcaacccagtagccagccagcacctgccagactctgactcctctgtagattaattgcaaatcacggagaatatcacaaaataaatcacacaataaatacggctgtaagcatggtttgttcccctgtcgaaacaaagggtgaactgctaatcataatagcgtaataaggaaaactagctttctgagcatttactgtgtgccaggattgtaccaggtacttttagtagattttctcacaacagccccattatggataggaaagtgaggcctcaagagattgcataactttgggaaggtattcaccacccaaattagtcctgcatagtgagcatggacagtcccgtttcctattgctagaagtgttaccttgagcattaacgttatctgggtttgctcagtggctgagttggaatttgaacccagtgctaactccaaagctcgtagtgctggtcaccacgtgatgccgccttcccttcttagaagaggcaactccttactctataaataacatgacattgtcttttgaagtcctttctgggtgaggaaagtgctttttatagcatggaattgctcctgtttacttgatctctttcagcaccgattaatcctgcctacagttttgtccttcactgtccttacactgtattcctaggtttcctccctgcaaaagacaactccatgagaccacatggtgtttgagtgtgtgtgcgtgccagcaaagaaatttcactcccctccctccccaagtctgccaacttttctataaataattgttctccctcccctcaggcctctaagtagtttggtcacttaaccaaacgcacaggcacacacgcgcgcgcgcgtaagcacacactcacaaagcggggagggtaacgtgaatgaccttgcaaaggtatcttgctcactggggacaggattagcaaacctgacacctctgcaaataattgtcttcctcccgtattcctcctgaaacggttcgctcctttcgctgtctctcccagacccatctg

SEQ ID NO: 5572 - DNA, 2300 bp, Homo sapien
aggttcaatttcatttttatactttttacaactagcaattgttgttgttcccccaccctgtaaaatctaagttctgtgagtagaataactgtgttttgtttggtcgctaatgtatcctcaatgactctctaacacaagacaagcaaatcaatatttgttgaacaatgaatgaaagctgatgtggctgggtagagaccatggggaggagtcaggggagtgaatctgtaggcatgggccaaggccagaccctgtaagccttagccaagttactgacttgagtattacgaaatgcttactggataaccagttttaagcatgggcatggtgcaatccaatgtgcatctatcttttgaaaaggttaatctcctggagaaactagaggcagccagggaggatgctgttgaaccagttaggaggctgttgcaagagatcccaggaaaagataatgataatgtggacttggaagatggcagaggagttgcagaaaagtatccagattttaaaggtactttttccgacgtttttcatttcagcaccagctgctgggtttttcccttagggagatgcagagccagcttgattgggaagtgcttaagatttagtacccattccaaagaattccatctgtgcccttgaaatgaatattaacataaaatgaaaaatttggtaagttacatcaagctgatttttctgccctggccacagtctctactgttagtaatagctaactttctttatgccaggtagtattcttagcactttatactcatttaatcctaacagtaactctgtaaggcaatttgttgttgttacagccaattaatagaagaggaaactgaggcatggagctagtaaggaaatagtaaaggtatctactaaatagaagtgttgaagattaaatcaggtagtagtgtaaagtatttataaaagtatctggcatatgttaaataataacttgcttcaatttatataacaaacagagagactggaatttgaatctgggtgatccggcttcagagtctgtgcattctttggcctctcaaagtttggatccaacacccctggaattctcttaagaaaatactaagtgcttaactccacctgcaaagccatctctagaagcaagactgaagcagctgacttttcaaccccaaaataatacttttgagtatgtattaattgcaaaggtttaaataacaagttcaacaaaaatttatcagccacccactaagtgacagatgtctctacccttgagaggctcttaagaggccttcatctaaagtagcccttctcaacctgggatttcaagagacaattaatccctaatgcctttaggcacccattgtatataatgtattaacttctttcatatacatctagaatggcactggttctacaccgtcctgaaaataatttttttatctcctgtggttcatatggggaaatccatatgcaaagtatttcaaaacatgacaaatgttgtaatagaaatgaacaaggaataatgggagcagagtgagcatagcttaaaagtaatggctgtgaagtcagacttgagattgagtataagcccagccacttatagggctcataaaattgttgtaaggattaaaatagcatatgtaagttatttagtataatcctggtacatagtaggtttcatagtggtaggaatatttattaaatctgtttgttaagtcattagaatgcaaactcgttactatcttggtcctctatagccccaacatctaaaaccgtaccttgcacaaaaacaagtactcaataaatactttttgatgtaataagggatgtctactagggaagatttcgtaatgtagcatgtaggctgaagaaaatgattgggatttgccagtgaattacaggaggaggctattccaggccatggaaggctgtgagacaatgataaaaagaacaagagttcacaaaagattccaaaaactaaatacctacttcagcatgactgtgaacattagctgaagtggataatggcaggagataagaaaagtaggcagaggctagatcataaagggccctatatgacatgctaaagaagagctagaattatattctgtaaggcctaggttttgctcagcagaggtatggaaggaagagtgtaggaagagaagaaagaaaaggattgagtcttatgtctataataccaaaatcttaacaaagtgcaaatcaagaaatgagacaacaggatgtagaagtttaagcatattatttcagtgtgcaaaggtaaccagtacaggaaaaaatatatgtaactagagctaagt

SEQ ID NO: 5573 - DNA, 2300 bp, Homo sapien
gtcggaaaaagtacctttaaaatctggatacttttctgcaactcctctgccatcttccaagtccacattatcattatcttttcctgggatctcttgcaacagcctcctaactggttcaacagcatcctccctggctgcctctagtttctccaggagattaaccttttcaaaagatagatgcacattggattgcaccatgcccatgcttaaaactggttatccagtaagcatttcgtaatactcaagtcagtaacttggctaaggcttacagggtctggccttggcccatgcctacagattcactcccctgactcctccccatggtctctacccagccacatcagctttcattcattgttcaacaaatattgatttgcttgtcttgtgttagagagtcattgaggatacattagcgaccaaacaaaacacagttattctactcacagaacttagattttacagggtgggggaacaacaacaattgctagttgtaaaaagtataaaaatgaaattgaacctgcaaataaaaaaagagtgctcacttgagatacagtagccaggaaagtcttctttaagaaggtactattttagacgtaacctaaatgatgaagggaagtgccacgtgttgaatggagaagagagaatttaggtacagggaacaacccatgcaaaggttcatacatgctggaaagaagttggtgtttgaggtatccagagcagatcaacttactgtacagttagtggggagtgaggtcggctgacacttgattgtgcaggacctgggaggccatggtaaagatcagaattctattccttttcccccctcctctttttattttataaaatctgttattttagaaagttgcaagactggtacgatgtacaccattatacccttcaactagattcaccaattactaatattttgccacatttgctttctctatttttttgccatatcttttgaaggtaagccgcaaacactgtgacactttgctgctaattactttagcaagcgccttccaaaaacaaaggcattcttccacttaatcacaaattaattctcacatgcaatcaatttaaaactgattcaatatcatctaatatgtagttcatatttaaatttccccagttgtccacaaatgtctttcgaagtttttttttttttttaaaaactatgaaccagccaagattcacaaatttcatttggtttcttttgactctcgactaaagtaattttccacttcgtttttttctttttcctgtcatgacactgacatttttgaagagcctaggcctgttgtcttgtagaatattctacattgtttttttctgattgtttcctcatgattaatgtcaaacatttctagcacaaatactatcgggtgatattagcgatgctaagtatcttcacttggttaaggtatgtctaataaatctcttcagtgtaaaattctattttccctttataataagaaatgatctgtagggtgattctttgagatactaacatcctcttccctacaacctttcagttaattgtttgttttagcatcttgcattcattagttttagcattcataagcttacctatatcaatttttagactggcagttgcacaatggggatgcagcgagggaagtgaccctccggatcccgggatgccgagcctttttctgccccgtagggacaggactgggaagtggctagcccgccattcctcggcccgtccttaggggagtcgcaggactaagtgcagtggcagtggcctcacctcgggccttcgccacatctttattgcctcaaggacagaattggagatcggtgtcccagtcaacagcgtggtacttatgacagccgcgagaaagcgcactactaaagcccggctagcagagctgggaggcaaaccagaccgtcagcaccagggcggcccacgcctgcttccgcccattggctgcccgcgtttcaagacccgcccccatattggagagcttcttccggtagccactggaaagcccgcagcgcgagccggctacgctccctggcggagctctggacgccccacctactcccagcgttcagtgcggtgccctggccgccattgtttgaatttgaaaacggtaacatcgcagtgctgctcgcgggtctggctagtcaggcgaagtttgcaggtgaggaggtgacccgcgggaatgtgtggggaaggaggtgggtgactgcgcatgtatggggcctaaggtggggaaacggctttggcaatgtggacatgttccgacagggctcataccccagtggaggtt

SEQ ID NO: 5574 - DNA, 2300 bp, Homo sapien
ggccggtactttaacgttttgcagatgctcccccctctgcacccccttacccatgatctagatcagtgctttccttagtctttttgcaatttaggggaaaaaagtcaactatgttcttgtgatacgtttaggaatttcagcctgatcaaggaaaaagattgacaacaagatggcaggaataaacaaggattttgacaggattgtaggcaaaggaaatccgtctcagtttgggaccttttctagaccagggtgaggggccaccatctagaggggaaagagggcaaggggaatggggagtcggggaggaaagaatcatagaggggcttacatgcctaaatgatgttgcacagtggagagtctccggatcatagaaactctcaagggcagcagtggcttgggggtcttgataatcccgggttttatgtgtctggcaaatgttgggtgcagtttcatggggcattcaaacctggcaggctctaaatggctaaaaatatgcttattttgggccattttgaaagtaaatggatgcttcagaatttgactttggcgccccagcaggcttttcccttttttttttttttttttgacgcagtcttgctctgtgttcaggctggagcgcagtggcgcagtctcggctcactgcagcctctgcctcctgggttcaagcgattctcctacctcagcctccttagtagctgggactacaggcgcatgccaccacacccggctaatttttgtatttttagtagagtcggggtttcaccatgttggccaggagggtctcgatctcctgacctcgtgatccacccacctcggcctcccaaagtgctgggattacaggtgtgagccactgcgcccggccgtaggctttttaatttttattttaaacattcatggtccttgatccagtgggcttttgagctaagatccctaccagctgtgaagaagtttacactgtagagctattatgcaagggccatctttggttcattttatataatacctgtgggtgatggtcgttactactttcttgagctaggaaccttagtttgggagtcactgatctgtatattttttaatcttgtcaaaaaacagcacagagtcctcctcctctctctggtattgtacatctagtagattctcagtaaatattagaatgttagtattttttagttaaggttatccttaagtttaccttttagtttagtgatttgatgtttaattcaatggtaatagtttactgatgcattattcctatttaacttaaaacctgtgatgtgtcaggtactgttttgaatgtgtttacatatattattttactttttacttgaatttgaaattgaaaacaatttttcagataactgagttttgttttgttttttttttttgacggaatctcactctgtcacccaggcttgagtgcagtggcgcgatcgcgattcactgcaacctctgcctcccgggttcaagcaattttctgcttcagcctcccgagtagctgggattacaggtgcctggcaccacgcctggctaattttttttgtatttttagtagagacggggtttcaccatcttggccaggctggtcttgaactcctggcctcgtgatcgacccgccttggcctcccaaagtgctgggattacaggcgtgagccaccgcaccagacccagataactgagttttaacttttaaatgctaaaacaaagtctgtaagtaacattctacaggagtcactaagtagatgacacaaggttataatttaccctgtgatctccttactatttgagttttgagaggatttcacggagagagtaaatattttataccatctttacagattacctgtactcacgaaacctctttgaatggatattatatgaaaatagtaggctgtgttcagtattattagaatcagagtctgtaaatataatttgatctttagtctttcctgtagggcattgtgttataaatgaagcaatgtaatgcgtttcttttctaaaatctagttatttggagggaagtagtgggctagacttttgaaagtgtgggtggcttacatgctgacttattaaggttgttaaagaagttgctgttattcttgcagaatggaatctaattttaatcaagagggagtacctcgaccatcttatgtttttagtgctgacccaattgcaaggccttcagaaataaatttcgatggcattaagcttgatctgtctcatgaattttccttagttgctccaaatactgaggtaagtacaagaaaagtattgtgttgattatcatgcctccttctaat

SEQ ID NO: 5575 - DNA, 2300 bp, Homo sapien
gcatgagccgtgctgtgcctggccttgttctatattctttataaattcttgcagtatagaagattcactgttgggatagagtgactactgtggagtggtttaaagtaatttgttagtttgatgcttcattctaactaggagggcattttctttttctgtcttcccccccccttttttttttaaagacagggtctcactctgtcacccaggctggagcgcagaggcatgatcatggctcactgcagttttccacctcctgggctcaagtgatccttccaccttagtctcctgagtagcttggactacagacatgtgccaccatgctgagggcattttatatacataaatagaattgtttgtaatatctgcattttaagaattagttgcaataactgctctgcccttttttgtgtgaaacaaatgggtagaaaataacacgtaagtggtgcctttgcattatgaaatgtacttaaaaagcactagctccttttcttctctgatgctatgccagttctttactatttagcatatgccacctatttttatcctgagttttagaagtggctttttctgaaacattaccctgttgtggttgaattagcagatttttttttaatgagtagggtgtgcttctagtgctatcaaaatcctttttattgaatgtaacagtaaagtgtcactagagcagcatatgtttcatagttattcagtgatacatatttttagatgcttagatatttattttcaatgttctttattttttcagaatcagattcattgattcaagagcttgagacatctaataaggtaatgctttaagttttattttgtcttgataaggtatttaattaacaaaggggtatgaatgatgactagatttgtttattttaaaaaataattaaacagtaatatagtctcttggtatgcatgggggattggttttattctgttattttttctgttcttctttggcttgagtcttcttatttcaacttgtatttatcctttcaaaaagctgaatattttaaaatatgatcagatataaataattcaagatcttggtatctaatatccagtatttaaagaacaaaaatgtacttagaagacattacacctactgtttatacaattcctatcttttcttgtattttttctacttatgaaaatagtagacactagttgtaccaattaccttaagctatataaatagaaaataaaaaatttcccataatgttcttcctaaatttaaaacaaaaccaaaccaacttgtttggaagctctttagactgttactttatgtatgtatttatagaacacttaccatttaccagatactccttcaagtgctttttattaactcatttaaatgttagagcaactttatgatgtaacttgcccagggtgacatagtttttttagttttatttatttattgtttttgaaatggagtctcactctgttgcccaggctggagtgcagtggcatggctcactgcagcctacgtttcctgggttcaagtgattctcctgcctcagcctcccaagtagttagggttacaggtggccaccacccccggctgatttttgtatttttcagtggagacgggctttcacgatgttggccaggctggtctcaaactcctgacttcaggtaatctccccaccaggtaatttggcctcccaaagtgctgggattacaggcatgagccactgtgcctggcccagggtgacatattaaaagggatagcagctaggatttgagcccaggcagtctggctccaaattcctcttatatgctatatagcttcttttttctttgtgtgtgtgtgtgtgtgtgtgtgtgtgtgtgtgtgtgtgtgtatgtaatttttttaaaggcaaaaataagatcatgctgtgcatagtgtgttgccactgattagctttatttaactttaaaatttgaaggaattataaaactgtttgcattattaatcatatttgcattctagttatcctaaagtatattcatgaaacattgctttttcttctttccaaagaaaataattacacagaatcaaagaattaaagaattgataaatataattgatcaaaaagaagatactatcaacgaatttcagaacctaaagtctcatatggaaaacacatttaaatgcaatgtaagaatttaaccttgtgttatattaataaattagataagcatatgttttggttgaaaggaaataatttaaaatagcttatgcaactaagactaatttattgagaatgttgaattgcttatgcaacattgaactcaattta

SEQ ID NO: 5576 - DNA, 2300 bp, Homo sapien
aaagccacaatataattgtagcttaaaactgttcgttaggatatggaatgtctgcctagggtttctcgtcatctcctcctctctgtcccatattgaaatgacaataaagatttgtggtacaaaatttaaataatactgaaagttagaaatagctggtaatgctactcagaggtaggtagctgccatcattttggtgtacttcctttgctaactttgtattaccttgtgaaataataatttttacataaatgggctcataccacatgttttaaaacctgttttttctttttttctcaacagcttatttcattttttttttttaattagaagtttacttttacatgttttgtatgtttgaatattggcttatatggtgactttttggttttattaaggtttgccagattaataacaattttcttatttttaaagggtctatccatgttagttcagctatcactgaagaccaaaagaaaagtgaagaagtgcgaccgaacattgcagaaattgaagacatcagagttttacaagaaaataatgaaggactgagagcatttttactcactattgagaatgaacttaaaaatgaaaaggaagaaaaagcagaattaaataaacagattgttcattttcagcaggaactttctctttctgaaaaaaagaatttaactttaagtaaagaggtccaacaaattcagtcaaattatgatattgcaattgctgaattacatgtgcagaaaagtaaaaatcaagaacaggaggaaaagatcatgaaattgtcaaatgagatagaaactgctacaagaagcattacaaataatgtttcacaaataaaattaatgcacacgaaaatagacgaactacgtactcttgattcagtttctcagatttcaaacatagatttgctcaatctcagggatctgtcaaatggttctgaggaggataatttgccaaatacacagttagaccttttaggtaatgattatttggtaagtaagcaagttaaagaatatcgaattcaagaacccaatagggaaaattctttccactctagtattgaagctatttgggaagaatgtaaagagattgtgaaggcctcttccaaaaaaagtcatcagattgaggaactggaacaacaaattgaaaaattgcaggcagaagtaaaaggctataaggatgaaaacaatagactaaaggagaaggagcataaaaaccaagatgacctactaaaagaaaaagaaactcttatacagcagctgaaagaagaattgcaagaaaaaaatgttactcttgatgttcaaatacagcatgtagttgaaggaaagagagcgctttcagaacttacacaaggtgttacttgctataaggcaaaaataaaggaacttgaaacaattttagagactcagaaagttgaatgtagtcattcagccaagttagaacaagacattttggaaaaggaatctatcatcttaaagctagaaagaaatttgaaggaatttcaagaacatcttcaggattctgtcaaaaacaccaaagatttaaatgtaaaggaactcaagctgaaagaagaaatcacacagttaacaaataatttgcaagatatgaaacatttacttcaattaaaagaagaagaagaagaaaccaacaggcaagaaacagaaaagtaagctaaatgttattcaaaatattttaaaatacacaaagcattcattttgctatgcagctttaaaaaagttagatagtcatacttaatctggtaaagcgtagcatgtatgatgagtgaagaacttgaactttgtccatataaacctttggaccataggttatgtgaaaagatcagcttataaaaatcatatgaaatattttctgaagaactcattcatagtttggatattccaaatttgtgaaaagatataattttgtaaagattgttaccatttcacatgtatggtcctaagcagttaatgatgcattaccatagaaaagtggtttatgttttttagattgaaagaggaactctctgcaagctctgctcgtacccagaatctgaaagcagatcttcagaggaaggaagaagattatgctgacctgaaagagaaactgactgatgccaaaaagcagattaagcaagtacagaaagaggtaggttatttgaaaagttatgtggccagtttatgataaagattgttttccttatatatcaaacttagacattaatcttaggattgaatagaacatttatccactttataatttttcttaaaattacaagaacagttacttcacgagagaaaatttag

SEQ ID NO: 5577 - DNA, 2300 bp, Homo sapien
gtgggatgtggatagaacagttaggaagctgttgcagcagttcaggtgaaatggactgggctttggtcaggtggttggccattgaaatacagagacattttatcatttgggatttggagtagctgtaactgaaactccaaattacagtggcttggacagatatttattcctctctcgcataactgaaatctgtacatagcctagaattcaattggtggctccaccattcttagggaccagattccttccattttgtcaatacgtgacttcaacctcctcattgacggtggctgctttaattccagtcatgttgttttcatcccagacaacgtgaatgatgaagggaggaaaaaagatacatccctttcctgtaagagaatttctagaaattatacgtgatgcttgcagttacagctcattggaaagcactcagtagcatggccccatgtgattacaatggaagatagacaataaaatgtttactctaggttactacaggtctagttgaaaatcaggacgtctatgactaaggttgaaaggaacagaaaacgttgataaatagccaacatctgtaatacaagtagataaagttgagacttgttttggaaataaagttagcaggatttgataactgatttaatgggggttgggtgaggacaagagaaggaacaaatctcatttctacttttctgagacaatcaatggtagtacctttttggaaatgaaaaaaatgaaaaaaggggcaggtttagggcaaagaacaaaaattaattagctgttgggagcttcctcaaaattatagagggagcaatttatcaattttttgttgttgttccattctagagatgttttatgcccatataggaatgtgggtgtgcatacctgatatgtgtgtatacacacatattttatttttacaaaaatggtagggtttaattataccattatatacctaaaatcctttacttgatatatattggggatctttccatataattgcatgaagaagtgccttactatttttaatcatcacagagtatttcattgtatggctttgccataatttatttaaccagttcttatctgtacatttgtttctgtttttttcagattataaaaaatgctgcaatgaatgtctacactttaaagtaaaattgttgggtttaggggcacattattgaaaattttggcttgcgtatttttttcatagaggtgtcagcaatttctactcccactggcaatatatcgggatgcctgttttcctttactcttgtcaactcaatgtgtcaagctttctgatggttaaaataatattagatttttgttttaatttgctttttcttagcagaaatgaaataaaacacttcacatgtttaaaatgttttatttctttttctaaacatgtcctcatttttgctattggattcttattttcttatttaattgaaggaactggttatacgttagattatctgttttgcaaatattttcctgtttatccttttttgtcctcatagtaaatttctttctataaattcaacttatttactatgaatagcttcttgttattaagtaggtttaatacagttaccacgttggtttgcatgctttaaactttattctcctctgtaaaatacatcattttacagaaatgagctcatactgaatatatcttttaggtttctgcttttattctcacttaataataaaaatctttctaagtcattcattgttttaacaaattatttttaattgtttcatacattattctgtcatttggagttaacaataatttactcaagcaaccctcccgctgttgcataattaggttattttcatttaaaaaaaaaccgatataagctacagccatggtagtttcactatgataaagtcctcaaagtaaaatttggaggtcattgtgcaaaagtactctccttgtgcttcaatgcttcccgcagctagaccaagctccgcgggcaggagctggagtccaagctaggggaaagaaggaccttccgggcccataaggcgggaggcaaggagggcccctgggcagccccgcgcttgcgcgccaatcacggccgttatggatttcgatacgttaccaaacggtctcctacaaaggcagaaaccgtttaaatatttcagaaggattgattttcattttgcaaatataatactggttcattttctttctcttcctccatccattctactattgaacataaaacgtgtcaatagtattgtagttcagcatgtatctcaggatattaaaagggcagtgtgactcagctagaaaa

SEQ ID NO: 5578 - DNA, 2300 bp, Homo sapien
aatttcatgtgctgaagaaatcattaatgttcctaatgcataaatgaagaaattgaagctcaaagactttgtttattgttttcaagactggctgagcagtacagtcacttaggaagctttttttaaaaaaaataatttaattaaattaaaaaattcttgcccacctcaaaagcacagtagattaatttgttataaattactaatttgaggggaaaactggtttgtcataagacacacagccttaatatggcaaaaccaagaatcagatctctagttcctgtctccaaactcagccaaaccattctacatcctacagtcagacattgcttcacaaaggacattcatctatatcttatgtgatccatgttgtgtcacatgtgaaggctagtcaaggtacactctggtgggattgctgtgtgagtatttaaaagtctgtgcatgtgagttttaccacactcagaattagaaggtaaaagcccagattttcaaggaactgaaaggaataagacttattatcagtttgtcaatattttatgtaaaagagatgatggagaaagaatttcacaagctaccaatgaaaaaagttttttaagaaatctttgaaaaacaaggttgttgatgaactggaatttcacttttagttctctcaaacccctatctcatcaatttggggtccaaattggcatggggatgacgatgccaatcaggggcattatatattctcatgccctatgcaagagcacaagaatatgggagaaattaaacctattatccttaaaccttatagccatttcctgattctgccactcagagatgtctttttttttttttaactaacattaagaattaacattaagatgcactataagtcagagcaggacctccaaacgttaataattgtgaatcatctggaaatcttgttaagatagatccagatctgattcagtaggtctggggccctgagagtctgcatttctgacctgctcctaggtgaggctgaggctgctgtagacccagccagacttcgactgcaagttgctaaaataaaccatggtaccatctgagatgagaaatggcccctcttacataattaactaaggtaacacattgacagcaaccagaggctaccaatcagaacaaacatttaagcagttattgtgaaaaaaaaatctttacatgtgatttatttaaaatgtgtggtcagctgaaggtatttctgtgttccagactgactgagagggctctaggggctaaaaagtttgaggcagttttcctggaactacacacctgggagaaataatcagattgaacaccaactgacacccatgcctcagcattctcttttcgctagatccataccgtaagttattacagcaggattaatgttgggcaataataagaaacctctggagaacggtgaaataaggggaaccaaggaccagtatggaattgggacataagatttcctctgagagttaagctctaagggaactgaaacacagatgtgcaaagttaccttaagacagaaagcctcctaaaccaataacatttgactctaatctaaatgggaaaattatcccacctaaagaaaacagagacctcaaaaagactaatcgcagagactaattttgacactgtacaactaagagagagagagtcctgattcaagaacgtgaggagattcacctacatagacaacatctgatttcaccatagtggaaatgtcagacatttagtacctaatgccacaaaacaggggctggcaaactactgtccatgggccaaatctggctgaatcccattcttttaaataaagttttattggtaccacaggtgcatccatttgtttacacatcatctatggctgcttttgcactacactatcagagttgagtagtcttgacaaaggttatatggcccacaaagcctgaaatatttactgcccagccctttacagaagaagtttgccaacgcttgccataaagcttttcaattatataactaattccccttgctctgattccacactagccaagcaaacttctgattataattggtttcctgggtagtacagctgaacattccaaactccaaattctgaaatccaaaatgctctaaagtgcaaaactttttgggcatcaacatgacttttaaaagaaatgctcattggagcattttgaatttcaaattttcagattagtgatgctcagctagtaatattactgtaaatattccaaaatctgaaaaagtctgaaacatctctggtctcaagcatttcagataagggacactcgatctac

SEQ ID NO: 5579 - DNA, 2300 bp, Homo sapien
atatatagatgatatagatactgataaagcataacaggacaggaacacagaaattatgaagtctttaaaagataaaaagctgacaaaatcaaattgataacaactatgacaaagtcatatcaaacaagttcaagaccatatcactgcaaagactgaaaacagattctaaattggattgaagtgaaaaagcagaaaagtggcccagaaaatcattagggtaaattaattaaagaactgaagtcaaaaaaatgagaccagacctcatcacccttgtgatatacaatagacagcaagtttttgatgggtttttatccatctgtatttgcaatgctatattatttttttcattatcactttttaaatactttttgtataatttaataaattttgatattatattttgcattatctgagtttcttgtttcagcatcagttaatagaattttttaaatgtgatttaaaaatgtgtggcattgcttttgatagtgattacatagttaaacaaaaacatcttttacctgtcataaagctttagttaaaagctactggggggcagcgtttcacaattcaagcaaaagggatgtgtatgtgtatgtgtatatacatatatagaaatatttttatatattataaattatatataaacatgtatatattctgatacatttatgtacaattttaaaataattcaaattatagtccaaaaataaagtcagaataagcttttttttcttctttttttgagacagagtctcgctctgtcacccaggctggagggcagttgagtgatcttggctcactgctacctccacctcccaggttcaagcaattcttctgcctcagcctcccaagtacctgggataacaagtgcccaccaccacatctggctaattgttctatttttagtagaaatggggtttcgccatgttggccaggctggtcttgaacacctaacctcaagtggtccacccaccttggcctcccaaagtgctgagattacacacttgagccactgcacctggctagaataagctcttaaagaaaattaaagattatataagaatgacacatatacactttagtttgattagctcttaatactatttcaagactatctactgtgatgctggtgtacaattttcttgaatttagatacaaaggggagacataaaaaggggcacagccctaaaggcattagcaaaagatacaagggctctgcttcctggaattgtgttgtataaagtcagaacctcctggaagcaggtgccaagacaggattaatgatgaaatggtgtttattaggagaaatgcttgtgagaaaaaaatggaaaggagccaggaagggctggaaagggcatcaaaccacgatgcaagcttggctttaagtgaaggagagagagggaaggaagtcgggtagaagtgtcctaaattatcatgcatctaagaaacgtttgtcaaagccattggggaatactcagctaaaattcagccgagaggaggcttgtgaaccctcaggaatggaactatattagtattgctgcctggctcagtggttggctgagacgcacatatgggaagcaagggcaaatgcatgatggactcagatgcagaagttgatctctagtcgcttaggttccccgaatttggaggttcgccttatgcattctcatgtccatcacataaagaaagggacagtctgcaacagcaggattgctttctaaagaacgttttctttggggagtactctgaaacctttcttcaaatgatgacgtactctgaagttcaggagataattctgaagtagactttgattttatgcgggagaatgtactctattcccatcatcacagcttgtcccttggcttacataaatattttgctcacgattcaaggaagttgtctaaagcaacttaaatgctaggccaaaataacctgtttgtctctcattaaaaagtttttgttttagaagttttatgggttgaattgtatctcataaaatgatatattacagtcctaatactcagtacctccaaatgtgatattatttgtaaacaaagtctttatggaggttatcaagttaacatgaagtcattagagtgaggactaatccaatatggctgagatccttatcaaaaggagaaattcagtcacagggacagacaggtacagagagaagatgatgtcaagagacaacgggagaatgccacatgaaggtggaggattggagtaatgcatctacaagccaaggtatgccaatgattgctggaaaactaccacaagctaggagagaggtgtttcac

SEQ ID NO: 5580 - DNA, 2300 bp, Homo sapien
aggcaattggagtctgaagataaaaagtctgaagatgagatataaactaaaaaggatattaaaataaattgctatttatttttctaactcgaacccaccatctgtcaatattttggggttaagctattgtttctaataggtctcctggtaaaatgaatttgaggagtgttgactaatttgttcagagtcaaaataaaacatgtagtctactaagaggcaatataatatatggttaagggcagagatgtaggtgccaaatggctagggtccaaaccctggctctatctcctatttggtatgcctttggaaaagttacttaattgcttggcctcagttttgtcatctgccaagtgggaataaaaaatagtacttacctcatagagttatcagggaattaaatttgtgtgtgtacaaatcttacatacccataggagagccctataacataataagcaccataaaagcgctagctgttatcatcatcattgtttctattaatgtttctattttataatgcccaatgtaatagatgaataaacaatgtataaagtttatctctagctcacttgaaagtccaagctggtaggtagttagcagggaagaatatctctgctccaggaggttgtccagagacccagattttatttcttttcttgatctccagttgcctaagggaggtacaaataaactttatttgtaaagggctaagagtaaatatcttagtcttggcaggtcatatgatttttgtcccaataactcaatgctgattttgctatagacaataagtaaatgaataggtgtcattgctagccctgccccagcccagtgatctcccttagagagggctgactctgccactacagccactctagcctgtgggaacaggacaagaagaagtagaaagtaacatcttcttgaagccatcatctgggatttgcacacttcagttgccactcatgtcccattggttagaacttaataatccctggctgcaaatgaccctggaagatggagtctgtggctggattgccatgttttaagataaaacttgggtgatttttctataagagcagaaaagaagaaagaacatttgggagacaatgaataatgtctgccatcagtttgtgtaatacgtttttataattttatgttgtcctggcatccattttaaatataagttgaacttctccataccaaaagcagggttcagtcaccattgacacacagttttcagttctacacctcttcccatttcctctatgtggccaatccagatatctgccttatcactttctgatgactacttctttctgggacagctagataaacctacttgagtaaccttctgacttccacatccctaaagctgtgcagttatgccatagtgactacctctctgtcccagcgtgacctcttggaactcatgcctacttgctttaaacccaccaattaaaactcccctgtttggataatggcctagcctcaacaaaggctttggcccacagttcctatttctccctgcctgttctgcttaacctgtgtatgtgtagtcttcaggtgtgctgtgtaccacactccccacccaagatgtgtgagtgataaaatctttattgtcttcttgtgtctttcctaatcactggagggatattttccaccttgaagatcctaaattaaaaatttggccagtctttaacttaaatacatattttgttggagaaaaaattaatgggcaatatgattgtttatagagaatagaggttgagtatcccttgtctgaaatgattggaaccagaagcattttagatttcagattcttctagattttggaatagttacatatatgtaatgagatatcttgggaatggaacccaagcctaaccacaaagttcattcatatttcatatacaccttatacacatagcctgaagagaattttatacagtgttttaagtaactttgtgcatgaaacaaagttttggctacattctgatggcaattcatcacatgaggtcaggtgtggaatcttctgcttgtgacatcatgtcagcgctgaacatgttctggattttggaacattttagattttgtatgtttggattagggatacttaacctataatatacaaaggattttatatccccttataaatatgacatgttcaactattctgcaaggtaagcaaggcttagatgaaattaagcctcagaaaacttgaggtttttctcaaggtcacattgctacttgttcattgagtcttgtcttcaacttcaaactctatgtccttcctctatagctaaact

SEQ ID NO: 5581 - DNA, 2300 bp, Homo sapien
tggggaatatactacatgaaggaatttttaaaagaccttaagacaattccaaacctcaaaataaaaaaatggagacatttcaatgcagtcacatatgatcttggataagttataaaatttctcccagcctctatttcctcctctgcactgaagggtgaacaaatggtttcttagatgcattccagcaacaaactatttgtcttttgtctgagatttcctctctcccaagatccccagtggatgcctaaaaccccggatagtacccaatcgtatatatactatgtttttttttttgatctggtaagagagagggctactaagtgactaatggtggatggcatatacagtgtggatatgttggacaagggatgattcatatcctgggtaagatagagatttcatcacgctactcagaatagtgtgcaattgacaacttacacattgtttatttctgaaaatttccatttaatattttcggaccgtggttcaccacagataacaaaccaagaaaagcgaaacagagaataactaacataagtaaggttgaagaaatttcctcatccatcttaactgttagataatattgctttgtggcctaggtattatattcaactcttcctctgactcaatggattggtttgcttatcctaggcagagaggagcctctgaaatgttgatcacagcaaaagagctgtgaacattagggcttttttttttttccattaaaactttttctgaatgtgtacagggaagaatatgggcatagtaatcagataaacttgggtttgaaacataactattccttaccagctgattgcaagagctaacaaccttccctatctggaaaaacagagctaatacccaccttgaagaatgaaagtactattcagcactctgatcaatatactttgaggtttttattccttttcttcttatttataatccgctagggcctaacaagaaaaaacagatttgattatttttagagtcttaaactacagaaatcactgctggcttccaatgaaaccttcaaacaaaatggaatgaagcaagtctcacaaataataaaaatcagccgctctgacagggtttggataccaaggggaattttagccaataggtattaaatcaacatacacctccaggattcctttatagaagagtataaccggtcatttctttgcttatgtgtaagacttccagaatgctacgggaaaattaactctcttttcaatatattaggctttgaagtctaaatataaaggcaatcagggtctattttcagagcggagaggactgtttctagacatccaggaaggattagtccaaatgggtgtaacccccttggaggccttgtccccagagcatcctcatctcctgggtgccaggggcttaaggaatccccctccctcctttttttctttcttcctcttctcggagctcccaccctcaccccattcggctgcttcttttccatcttcgcttcttcccataagcggtcaaaatagaaaacggaagtacctatttgttgcttagtgtagtgctcagagacgtttttttggttgttgtttaattaagaaaaataaaatccccctctaggttcttcatttcgcaatgagcccaaacatccgctggctcattaggcctcttaacaaaagaaaaatgcccccactgaactgtggctgactagtgtgcggaggctggggtcggctggaggggttctaagtatctatcatgcggcaaggacagcttcccgggcgaggggacccgggatcccgggaggcgcgtgcagcgccgccccctcacagtagggaggcgcgggagaggcggcggtgcctgcccagcccgggtatcccgtcccaggagcgcgagggagcgggcagcggccggaggcggcggcggcggggacgcggcgcggctgccgcaggggagcggcggcggcggcggcggcggcggcgggcgcgaggggcggggcgcactccgcaacttctgccgctgccgcccgggcgctctcggcgcagccgagctgctgctgcgaactgtggagctgccagcggagcccagcccgagctccctcgactccgcgcgtcccaggcgtccgtcgggggccgaagcgcctcccgcagggagtccccgtgaggccgcgctgccgcgttacccgcagcggccgggggtccggggagtgcggggctccgagacagagccaggcgccccccagcggtcggcgcgggccccatggctgggccgggcggagcggaaccggtgaggtgaagccccggggccggcagccggaggcgcgt

SEQ ID NO: 5582 - DNA, 2300 bp, Homo sapien
aactagcaagtaaattcagtgaagttgcaggatacaaaattgacatacaaaaaaacagtagcattctgtatgctaatagggaactatctaaaaagatcaagaaaacaattccatttacaatagctacaaaaaaagatacctaggaataaacttaaccaagaaggtgaaagatctgtacaataaaaaaaattaaggaaataaagatgacacaaataagtgaaaagatatcccatgttcatgaactgaaataatattgttgaagtagacatactatccagaacgatctacagattccatgcaatccctatgaaaataccaatgacattcctcacagaaatattttttaaaatcctgaagtttgtgtggaaccacgaaagtcctcaaacagcaagagcagtcctgagcaaaaagagcaaagctggagatatcacaaagcctgacttaaaaatatgctacaaagctatagtacccaaaacagcatggtactggcagaaaaacagacacatagaccaataatgtaacagaatagagagaccaaaaataaatgcatgcacctatagccaactgattggtattgagggagggattgagggaggaggatggggagaggttggtcaacaggtacaaagttagataggaggaataagttctgatgttgtattgcacacaaggtgactatggttaacagtaaggtattgtttatatatcacgaaacagctagaagagttttttttaatgttatcaccaaaaatgcatgaggtgatgaatatgctaattaccttgatttgttcattatacaacatatacatgtatcagaacatgaaattgtaccctataaatatgtataattacaatgtgtcaactaaaaatgaaaaaataattgaactatcaccttattcaccttcaccacacattggtcatatttctgaccaatctagattgttatggtcataggtgatgatgcctgtgtgaccctgcaaaattaacactagatattctcatgaaaaacaaagcgtttgcttcatatgaccttattctatttgcagaagtaatattctcttctactcccacttaggaaatatcaagtactggaaaaggcaaaatatctcttctttacaaaagttaaccaagaagagaattgcatgctactgcatggaacagatccttcctcccttctgagaccgacaagaaaatcgcataaaggagtactagttaaggtgtggtccatagacgagagactatctgtgaactgtttgtgatcagtaaataagagaaattgatgggtgaagcatgtgggtgggctcctgtaatcacagctaggagagaggattgcttgcgttagagtccatcctggtcaataacgagatactctctctaaaaacaaaacaaaacgaaacgaaaactcagcaggccaccaactaggatactccctaggtcaaatgaccgagcctctaattctgtgattgttgttgctgtgcgcacgttaataaaacaaacaaacaaacaaaaagtgaagatgtttagaaagtttacagtactttggcattgtcctgataatccaagctcctgatcagcagattctattcagccaggtatagggcagttcgagtgttgtcaaatttgtgattcccatgaggccaggctgcttactggtaatgcataaaggaccacatcctggttcgcgaagagtttgggggtagaggaaaaggagggagaaactgatccttcatcacaggtagtttgagagcactgatgtaaactatagtcacacttttgtagtataattgattattatcctcaatagatcatttacactaagtcggaaaaaagtggaaacatcagatatgtgggatatgcgtcaccttgtacatttctcagctggaaaagtgtaaaacatctcaattttgcacctcccttttcaaacatgtctttggctaaatcaatgttggctctaaccgctcgtcctagagcgagtcccgccatcttgtggttgaagatgttgactgccacagagaatagcgggctttgacatcaacagttctgattgggtaaaaagaccctcgtcttggggtagttctcttttgaagtcctagagtccgtcacacacaaacgccttcttcccggtaagtccattgtaaacaacggaatggactttagggaaaggaaaggaaaacgtgttctttaagactctttaaatagcgttttcacccattagcagaattctctgattcatgagcagcactaagtagataccgtgtgcgtgcattttgaatgaattcatttctacactattttatagg

SEQ ID NO: 5583 - DNA, 2300 bp, Homo sapien
ggagcctctctatagaatcagctaggtttcaagggataattaaatgcctggagaaagaaaagggcttggtaagcctccctgcccactttcacttgcattctttgaggtgattgaaacagtaaggagccatttaatcagttttggttgcatcctgagtgggtctaggtgagacttgccctaggaaatcttttgggctcaatgattgtctgcttctgttggatggaatcaggactcttcaacctagcattcaccaactagctgtgcatctgcagcaagttacttaatgtttctttgcctcagcatcctctctgtaaaatgagagcattagtcttgctccaacttcgagggcatggacagctctgggatttcatatccaagacccttaaacatcccacagtccttcccccaaacacttctcctcctaatacctccctcagtttgggtcaggcctggaacaaaaaggcatacgaaatggtagaaaaagtgtccatgactacttctgacttagatgaagagaccaatgaaaatagtaatgactctgtttgcttcagcaggacatatactaaaataggagctatacaaagaagattagcatggactctgtgcaagaatgacacacaaatttgtgaaacattccatatattaaaaataaataaataataaagagaaaaggaaaaaattaaaaagaaaatagtgatagctgtgtccatctcaaagaaaagcccaggagatttcctttaattaacccccttttaagatagaatattaggagaccggaacatatgatacaggaggtactgggagggtccctctttgtcaatgttttgtcttggggtggggagtcgatgtcttctcaaagtttcagaaacaccatccactgactgagcattcaagggggaagaggagaatggcagccacatttgttgattgggtgagtttggggagaaatagacacacaaaggtcaaacataacttcctaattaacacttccctccattcacaattcccttctcccattcttctctcctttcttttactgaaaaaaacccagtttttcctgaaactataaaaagaccccagtatttttacataatttacacctcaaagattagaaaccagaaatagagacctttttcaacccttccggaagcaaagtgcattatccctccagccacgtgtctcaaatcttgatgcatcagaatcatctgggtgctttgaaattcaagatgattcctacgagttaccataaatcaactcagaattccctggagtggggcccagggatctgtatttctgacaagctcccacaggtgattcctttccccacagcatttgagaacttcagctcaatgacctaatcagagtcctgccattgctaataactggtctcatttttttcatatatatatatagtatttttggtagagatgggattttgccatgttgcccaggctagtattgaactcctaagctaagcaatcttcctgtctctgcctcccaaaatgttgggattacaggtgtaagccactgcacccggctgatagctggtttcatttactctatttcttgaccactctgatccattttgaagtaaaaatgctccaattattatgctgttttagaacacggtaagcatgtcatgtgctaattatggccagtgacatcataaaagaaaagtgcattactgaatgctttcaatttcttataatgatggtaaggtggcatgtcatggggcctatttagccccagacatcactccaaagaattccaaacagatatagacaagtgcctttagggcccagatcccttcccctcaggctgtttacccagggaataggatgtcctgggacaagtttcccctaagtgaagtgttgataagtctgcttatcagaaagatattactgggggtgtgatatgtagggcatctacattttcttgataggtagtcatatgaaagctgacaaagaaaaaaagggcagtgatgtggtgcaatgtcaacagacagctgtcccctgactcttgacaaataggatgacttgcattgctgagcgatgtgatcaccaccaaaggaatggccctctcacatttcttcctgattcacatattcagcagggttagcttgtcctcccctccctcttcagcttcccagacactgagtctggaatgaaaattcacctgcctctgagttggctcctaatgggggtgggagtgttacttcggttcccaggttggaagattatctcacccggccccagctatataagctgaccggtgtggaggggcccagcagggccaactcc

SEQ ID NO: 5584 - DNA, 2300 bp, Homo sapien
ctcagacccattctccttttgcggctgtcacatattctgtagggattctgagccctgccctctgtcatcttgtccactggcttctcctgctttccaccactgggtgggcttggagggtgggaggcagggagaagccagggggactctcatcccctactttggaagatgtctgccgcagtagttgcactaactttgtggctccaactcctattggacaagccctccagggttccggctgtctcctctctttgcccctccagcctcaggggagaaggcacgtccagcagttgctaatctcaggattgcctcaccttaccctagttgaacgtccagttctttcaacacttgtaactaatttgctgcattaaattattgctattgactcgcttgggaaagaatactttcgctggattcacttgcagagttcaaagacacttttcctaatgggactgcaagcagcgcatcggagaaaaaaatctagcagtcccaggagtcaagaagggtcagggtctacttcagtgtgtgatcagacagcgacaaacccacactacctaacagggccggaaggctcttagcctaggaattagctgtaaaatgactgggttcatgtctactttttcatgatttactctattctctttgatcaccgccagccttggcttaaggaacatctctgtagaattcaattttattcctcaagggttacttaagtgcccattatgagtatggagggcacatagctaggtgtggtggggaggagatatagagacgcaggaaaaatggagggcatgctcagtttttggaagtgtttgcttcctgcaagatgaggtttgcggacctatcaggagagcctcttgataaagactcctgaacttttccagtctcaccagagctgcagacactcggaggcaatattagtcttacagctttcatttctcccatcaccagagctctgttaaaagcagactcctctttaaggaatccacagatcagagagggtacagcacatgcacacaactgacccccaggtcagaatgatgccagccacaaggggggattctgcttgggggagcaggaagactgcacagagatggtaggagacggctacaggagctgagtccaacaaagtttgacaggtggaggcggctaaggggtattctggcagagaacagagaaggatcaaaataaagtgtcaaaggacagacacatttcaggtgttgtctgtaaacggaggctttggggtgagggtagggaagtggaggggagactgaaaaatggaggcccagctattgaggactctgagaatgaggcattaaggctcgaggccatggtgagtcactggaggatcttcagcatcagggcggcaaggtcacttctggtggggtggcgggggtggggtggggtggggggactttgcgattagaagcaaagaagctggaggcaggaaaagaaactgcgagctctcgggtggagggcagcttatacgggaagcctggacttgaccatcgccagggaggcatactgacattcgagctgccttccatctattcaagggcacgcttcctccgtctgtggggggagaaggtgccccctcagaggctgtacgattcgaagtctccggcctgagaagtttcgaatttctccttgccaaggtcgggccactacaggtgggagactgcgagccccgagcgaaagcttggcttcacgcccgcccggggcagccgccgcggctcgtcccctccaggcctgggcaccgccgtgggccgtgcccggcaggacgctccgggagctgcgcggcggcggctcgaggaggcctggcgggcggcggcgagaggctgtgccccagtttgtgtccaatcagggagtgcgggctgtgccccgagccgggcagcaatgcgtaaacaaacccacggtaactcctccgccccctcggcgcgctcgccccgcgcccgccgccgccagcgccgccgccgccgccgcgggctctgctctcctcgcgcccgcccgccgggccggcccagcccccgccccgcgccgctcgcacccccgctgccccgccccgcccccgccggcgcgggctccctcacctaccgccccacgcgcgcgcgctcgcgcaccacgcgccccgcgcggcccgcccggatcgtggcctctcgagagcaaggtaagggcgatgcgcggggacccaggcggcttccccgcccgacgcggcccagggaagtttctggcgtggctgttttccgcggggccgggggggaggccccgggagccaggcgagcccggcgggcgggagggggccg

SEQ ID NO: 5585 - DNA, 2300 bp, Homo sapien
agtggtgcgatctcggctcactgcaacttccacctcctaggttcaagcgattctcctgcctctgcctcctgagtagctgggactacaggcgcatgtcaccatgcccggctgatttttgttttagtagagatggggtttcgccatattggccaggctggtctcaaactcctgacctcatgatccgcccacctcggcctccagaagtgctaggattacaggcatgagccaccgtgccaggcctattattatttttttaaccagacaaatgtttgagtttttaaacttgtttttattttgtgtatgtgtgcatttttttaaattggggtgggagagatggaatggttgctgaagaaggcagaggcgaaaccacagaacacttaactgcaaactattgctgcctctccagacacaaagcacagattgccttataaaagttgtagttctccctcatcccaagtccattctggcaaccccacctccacattcatcctcaggtactgctgtatcacatgtttgtgaccccttccttcattgctaacatatgtcatcctaaaacccgccttcaagctcgtttccttcaggaatactgattaaccgcacttgtgataggtcaccaatcacatttaagccccctggactccactgttattcttttaaaacatatttaaaatagtttcagacacaaaataggaacataccaagtcttttttatatattgtggtatatatacagtaatatcctccaatgcatattttaaacacactagaagtagtgtgatttttcacatactgttctgtttagtctctgaaatgaaagatatgaagcataaagagtaatcctactgccatgaagtcatttgacctcacttgttttctcttactcattgtgattgctgcgacttatgaagttgatcccagcttggacattggcatgtatgattttggaaaatggttctttaaaggactatacgaatgtggtcatttaaagctgtttcagaaaatgtattgctcctgctgtgatattagaaatggcaatttttaaacatgtcaaagtttgattataaaatggatagtttaaaaagctgccttggtctactgcttgatgcattttaaatttgaaatggatctttgaacacttgtatggctgctggactagcggttgttaagtttgttggtttgccacttagagtcatctatcactttagtaagaagttaacgcctatcagttggagaaaaagcaaatattttgcattgacagtctcccctaccctctattattgtcattttcttaagccatcactgctctggcttctagaatacacatttttgaatgaaggtttttgcagtgaatggtctcttgtagatctcaaagtccactagaaagagtactgggtttttgtttgttttgaacgttgcaaacagtaatgcttctttaccactcaccctccccccaccctcaacctccacaacgttcccgtttgcttatagttgtcaacgaccatgatctctggacccacactacagtaacaagtttgtcagtcattttcagataaggtgcaaatcaagggatggctttgtccccacttcggcgcaggtgggacagacttggggaagacgcagctgaagagacaaattctcagggtgcgtcagtctcatcactgaccgttgcttttaaaccctccagggaaaatatgccagtcattgttatgatgtaaacaaccgaaggggtggacggtgaggataagaagaaccgagataatatttggccagagctacgtgtagcacagggagccagggcggcagctgcacctgcgagcagcgcaggcggcaggcgcggcctccgggcgtggtggtgggcgtggccgggcggcgggggcgtggccgggcggcggggcgggcggtgccgccggttggaagtgggtggagttgcccttggaggcggcaccggacctgggccccgaggcccgccgcgccctgtcgggcctgagccgagtggccccacagagccggcgcgctcccgcctgcagggggagagcagacggggcgcggggaccggccaggccgcggcgggtgctgtttctgtttcactttccttcactctgaggccggcgcgctggcgggcgaggagcggcggcggtggcggccgctgggtaggtaccgggcgggctggggagctgcagggacgccagactcctcacccaagtttgcgcctcaggcgagagcgacacctccagacacctgccctggccggcccagcctggagccgggagggcccttcgggtgcagggggctaccgacccg

SEQ ID NO: 5586 - DNA, 2300 bp, Homo sapien
ctggtgcagtagcagaaattaacatttttgacttgccttgttttgccaatatttaagcagtttgttctattgaatgtgactacatgtacagacacacttttatttagtctcacacatgaaaaaagaaagcagaaggcctgttatccaagtggtttctcatccaaacatttttatagcaaattactaaatctagttgaaaacaataggaaagaggatacttttccctctagtatttgttctatcaacctagacttagcacagaatatctgaaattgcagctaaaataaaggcttcattttataaaataacatttgagttgttcctgtatccatgatcagcatacagacctgctaaaagcagaaaataatgttatgttcctctctatgggatgagtatttcagtagttttaaggaaagaaaatcctgaaaaagaatttagaaaaatattaatagaaaggaggaggatgcttcaaagtaatgccgacatacatcattttccctccaaggctattagcactgaaatactttttgctgactatatggcacttattctataccttttgttaattaacaagtaaataggtggcaacagcaactatattaaagtagaaagcctttctataaatgaaagtcagaattcaaaatttagaaggcaacattgtttgcttcagatctacttgttacaaattgtgggtttgaaaacatgcaaccttatctcatgatgcaccataactagtatttagttatactaataactccaaattatgtaaacaatagataccccgaaatcatatttgggtttgtttcagagatatttttggttcttatatttggacttaggtactcttgatctaaaaattcactcaacctccaataaaataatgaaggcacagataaaaaatctgatagagctgaatatcgaaattccttgcttttaacaggcgatacagcgcattcttactctcttttctcctagatcagcaggtgtccccgccgctccagtagactgagaaaaaggaaaaggagggggcgacaagaaaggaaaggaaattgtctaggtgtcctggtggtggaggtggggggtattttaatttcataattaaaagctctcttcttcggctttcaagtttttactcctatttgtaatgatttgattgaggactgtgcagcagagtttgggtatgtacatctctaacataaacggaaaggaacaaggaagggacggataggagacagcaaagggttgcggggagagagcaaaacgtaggcgcgtggggacgggaagggagaggcggatttggcagtcaaagagggacgagaggaacaggaatggaaagtgtggactggccgtccaatcctatgggggaaggggaaagggggggcccaccacgtcgcactcctccccacctccaggcttttcctgtgtaggctgaagccatccaggcgtgtacaaaagagtcggttgctgagccaggaaggctgtctccccgggctgcgcaagctccgggccgcctctcctgggctcaggagggcgggcaaggataagaaggcagaagccccaaggcggacagctttgtgggcgcctggaagaaggcgaaaggccaccagcccagaccccgagggcgcttgcccgcgggactcggcgccgcaggccagggccgtccgtgaagggtagtctgtgcctacgtcctgccctactggtaccactcggacactctatccccgtccgaccctttgcagggctcgacttgtctccccgactgcccgtccttagtccaggttctcctgcgcggcccgggtgcggggtctcctcgtcatctcgggcgacactctgcaaacaatatggcggtcgggcgtcgaccgtggcgccttctctccgggccctcggggttgacgagggggactaccgccggcgctcccgacccgcgacgcgcgagccccgggcgggcgggggaggcgagagcaagaaacctgtgggacctgtggggagccgcgtccgcggggctggcgcgcgcgggggcggcctcgggctcgcgcgcaaaggcgcgggcgcgggcgggggcggagtggcggcggcagcggcggctagaagcggcagcccagagccctctcgcggccgcggcggcagcagcagcgccagccccagcaacactgaggccgccgccgccgcctggcgctcccgccgcccggcccgacatgagtgaggcggttcgggtaccctcgcccgccactccgctggtggtggcggcgcccgcgcctgaggagaggaaagggaaggagtcagagcgcgagaagctgccg

SEQ ID NO: 5587 - DNA, 2300 bp, Homo sapien
tgactatgttcaaaaagctaataaacattaaaaacattgagcctcattgaaatacccccggaaagatgacttttgggaagaggggagaggaaagaaatgctaaattacattaacaaacaattttgagggggaagggaaaaagggaagaagctctatattaagtatgcacatccatgtaagatacagcctaatatgtgttgtgagtgaagtgggggaataagccctccagtaaatgtccttcactatggttggtttttctttaatctcaaagtgaatgtaatacaaaataattcatttgttttctgttcatgttgaattaatcttgtattttataattttgaaaagtttaatgattcattattttgaatgtgtttttatacttcacagtgagagaaccaccaccaatttgccttgatgttagacaaaaacagcgtacatctatggatgcatcatcatccgaaatgaaggccccagtccttccagaacctattcttcctatccagcccaaaactgtgaaagactttcagtaagtttcagctattatatgtaaatgtatagtcatctgcatgtcagcactttacataatttaatatctttatttgagaaattaacttttggatcactataagatattagccaagaggacctcaaaagactatatgtctcaagttgaaggtgaaagaaaacaaatatataaataacaggaagagttagataggctgcagcaaaataaaggaaacactaagtaagagtctgtgagtcaaaacaggcaaaaagagataaaggtggtaattaaataatagactgttaccatttttagaaataagagttcatttatgatgtgacacatactgtaaaagttatgtaaccattcaaaaaatccagatgcatatttgaaggacgaagtgggaatgataaagatagaatgtaaacaaagtctccagaagtttagctatgaagggaaggaaggagcgataattgagcgacatgttaaggatgatcttttttaaaaataagtaaatgggaaagttgaagctagattaatatcttaatccaattaagaattataaatccataaactatattaactgggacatatttctttatttggcttcagtattttgtattgcatgtttggtgacattaaaaagtaatactagtttatctgaataatatttctatatgtatatacggttaatgtgttttcattttagggaagatgtagaaaaagttaagtcatcaggagattggaaagcagtacatgatttttatctaacaacgtttgattctttcccagaattaaatgctgcatttaaggtaattatacataaaacacacttttcatttcacttttagttttaaattttccaaaaatgataaatttacctcattttctacccaatattgatttaaacatgcatatattatgtattgatttcagaaattatacaatacatacaattatgtaatattataaatattatataagtatatgggttttttgagggggttgttttgttttgttttgagatggagtctcactctgttgcccaggctagaatgcagtggtgcagtctcagctcactgcaacctctgcctcctgggttcatgcaattcttgtgcctcagcctcctgagtagctgggattacaggtgcctgtcaccacacccggctaatttttgtatttttagtagaaacagggtttcaccatgttggccaggctggtctcgaactcccgacctcgggtgatcctcccatgtcagcctcccaaagttgctgggattatagatacaagccatcacacccagcccttaaatgttgtttttacttgctctaatgttcatgtttaactccattccttcacttttaaaaaagaaagttattaaaataatctttgtacatttctttttattttcagaaattttgccctaacagttcttttttattatcagactaaaaaataatcaaaattatgaaggaatagtatggttcaaattttactaagaatagtctttaaaatgttgaatatacttaattcttaaattgaatttgcagaaagatgccactgcctcatttaacaccattgaagactctgggattaatgctaaatttgtgaatgctgtgtatgataccttacttaatactgtaagtattatgacatgcaagtaatattattctgtgtctcttctgtatatcaaaagcagccatacaaatattgtaaaaatcaccttataattaccttagaaactctgatacaattttatagtaaatgtagctggaattctcataaagttagatta

SEQ ID NO: 5588 - DNA, 2300 bp, Homo sapien
gaaaatagagaagtaagaggagaaagagccaaaactcaagaataaacatatgtagagatagtaaaagctagaaagatgacacgaagctcagattttaggtgagtatattggtcagccataagctctgctcatattttgttcttctcaagagccattaccagatgaagttatcagctgaggtcagtcccagattttgagttgttctgtcaataagtcagttttgaaaaacacatggtgctctcttatttttcacaatttcaggaggtttttttcaataatatttattttttccatgatgtgctgaaatgtacattgtgctagaattttatattttggaaacattaactaaaggcttttcttagtttacaagtattccttcagcgtccctttatcatttaaaagttgtcagaagctgtatgtgtttctccccttgttctttgtgatatatgaggctaactcattttacaatggcaaaagtttcacaaccagcttttacttcgtttttctagcttttaatcaaggaacacccaggttttttgcttttaattggatgatagtgattggtaccatttatgaaggcactttttatgaaggtgctttatatacattttctttttcgatactcaaaacaacccttaagatagagaatatcattcccattttacagataaggacattgagaatcaaagtgtaaggaacatgcctaagggcatatagctagtaagtggtagaattagccctcagacccagatctgtcttaactccaaagcccatgctcttttcactgtatagccgcagtgtaaatgaaagtctctgttaattaaataacaaataggttattgttattttataatctcaaattttgtttcctgaatttaccacgtacttattaagcttagtgtctttccttttacgtgttaacagaattttaacacaattatctttaatatctttttcagaatcctcagtttaataacacatctacgtatgtcatctatgctcacttgctacgacagatagctaccttagtggaagctgaccatcatttcctagttcactggtttaaaaagtaaatcattctatgatattaagaacttttatagtctcacagttttaagtttggtattagtaattttacaataaaatatatttaaatattttcaggtctttagaaatgatgcttatattcacaatgcttcaaaagccagttacaaaaatctactttagtactacataaaggataattaaaaatctgtttttaatgtaagtaaccaatttgtttgcacaagctgttgagaatttctgtctactgccttcactttttatatagcacattcctattattggttttttacgtatctcaaagatggtgactggatttgctcagacactactattttaatgtgtgtctttttattttctatctgtaaattcataaatttcaccattatttaaatggcgctttctccttacctaaaaatgtcattgtaaaatataggctagccatcaatatcaatttgtaaaagcataatacttttttcacagaactatacccacatgaacaatgacttctccatgactgataaaagtagaaaggcaaaatatttccaaaagaaattttaaatgcagtaaattatcattattcatagtagttatattctataatgtcaccacaaacatggaattaataaatacagaaccattgcttcaaggggaaatacagggttaggttcctgtgagcctctgatcacatttttgtcagccaatcagtatataactttgctttatgagtgttttttttaaagacacacttcatttaatagaagtcattgattcattatcattgaactcacggctagcagcactgtaactcatgcctgaatgaagcttctctaacatacatattttctctgtagggcacatcacaaccttcttgttaggaacactagacagcattttagcactacacttggccattttgaaattgcaaaatcaccaacaaaaagcaccaaaatgtgaaaaacatgaagctaaatggattgcataaaggacacttgcaaagagagagtattgagctaaaacaaggcagaacatcactttgacctcagctggaaatgtgcatgtcaggagactaacatctttcacatgtccccaaatgaccatgaaaacacaagtattgatttggggattaacaattaaattttaccaagtaggcaaatttggaaatatagaatctgtgaataatgaagactgaatattgaaagtctttaaaatgtttgttactaactttatagtaattt

SEQ ID NO: 5589 - DNA, 2300 bp, Homo sapien
tggccaacgtggtgaaaccctgtctttactaaaaccacaaaaattagctgggcgtggtggctcatgcctgtaatcccagctacttgggaggccgaggtaggagaatcatttgaaccagggaatcggaggttgcagtgagcggagatcgtgccactgcactccaacctggagacagaatgagactctgtctcaaaaaaaagaaagtattctcctgcctcagccacccaagtagctgggactacaggcacctgccaccacgcctggctaatttttgtatttttagtagagactgggtttcaccatgttggccaggctggagtgcttctaattgttaaggaatgttgctataccttcctttttcaaaaacatgttttccttttgaaaattgtattgcactgtcataattaaaaatatagataaacaaaatgaggaaaatataactacctataatcaacagtgtgtcatcagtattaacaaacaatatggatgctttcagcccctttcctataaatatttatatacattattctcaaactggaatgtgatcacaatccataatacagtcttcagcatattttcattaattggtgagaaatcaccaatcgctttccacatctttcaatactcatcttcagcagcatttttaatagctcatagaattctatgttatgggacatcatcatttactagtttatttacccagtttcctattgttggacatttgggttgtttagactttttccaccattactaataatgctgtggtgattaacagcctttgcactcatccatgattctttccccccagggcttatcagatgattctctggaaagggtgtacatatttttaaggttaaaaaaactcatgtcactaaatggccttcccagaaagactctgtcagtttgcagtatatgtgacagcacctcatactttttaaggtgctgcctcagtggcttctcagcacagccctgtgtgataagcaaggcagatatgatgactcatcttttggaaactgaaaaaagtcaagtgcaaagagataccttcagggaacttaacaaagtgagttgccatagagagacactgaatgtgataaaacaattaaatgctgggagacagttaacaaaacaaaaagctatggtagctgctctgaagctcctgagagaaattaggtctcagggacaattgtctgttaagtgtttggcaatcaaatcatgtcatcagcatgcaggagaaagcatacctttctgttttctgtcttgagagcaagcacttggggaggcaggagtccagctcatccaagattccagaatggataactgatttagccaaggccactcagagagttagtggccgactcagaatggaaagccaggtcttctgactcccagaccagtgctctctgacaaacaatgtgcctctccaagatacctgggctctggccattgaccaagtcactcaaacttctgtagttgtctagactagagcaatgatctggggatcttattaaaatgtagattctgatccagtctgtctggagtggggcctgaggttctgcctttctagcaagttcccaggtgattcctatggtccaaaccactcttagagtagcaagaagctagagatggctcaggttaaagacaaggcaagtgacctagataaagacatggcttattggcaaataatacagcattttaaatgctgatgatggaaagggtgttcttggttgttatgagccttaaaataaaggtcttgtccctcttctgccagaaacaccctgacatgagaccaaatcaacaggccaaaggaaagcctagggccatggtggcagagggcgtttcagatacacccaccaacagcacaattggccccttcattatgaggaagaagccgcagcaaggcagccagaataaaagccactttgtttaacattccaaaggcgttcccagtgtcccccagagtcctcattaattacctggagaattaccaaggggttcttggacaggatgagagcctccttccactgcaactcaccacccctcatgacacttggatgacgaaaaacagcacttgatgaggtgagaagaggaatggagccaggacacggaagcagaagggcattgacctgtgagatttccaatgcacagacatggcttgctctttctcaagcagaggcaaaggatgtcggtgctattgacagtcctgggcatgaatctttcggactgcaaatggtaaagattttcaacacttggggagtaggccagggagggacgtttggtgccacggaggagtgatgggactg

SEQ ID NO: 5590 - DNA, 2300 bp, Homo sapien
ctatttagctcaacatataatcatgggtagaggaaaagaatacccagggttctagttttggctcagacctagccagcccctggcaagcagcttgacctgtctaagctttcagttcctcatctgtgaaataaagagtttgatgcctatcacctcctacctccataattctaaccattgatgggtcattaaaataagacaatatggtgcagcggttattgctctggtatcagccaggctctaatccctgctctacctgtgagaacctgggcaggttttttttttgttttttgttttcgagatagagtctcgctctgttgcccaggctggagtgcagtggtgcaatctcagctcactgcaacctccgcctcccgggttcaagcgattctcctgcctcagcctccagagtagctgagagtacaggtgtgcaccaccatgcccggctaatttttgtatttttagtagagatagggtttcaccatgttggccaggctggtcttgaactcctggcctcaagtgatccactgggcagatttcctgaccattcagtgtctccgttttcttttctctaaaatgggattaataattggacatatcacatagggttgttgtgaggattgaattgatagcacatagtgtttggcacagagtaaaggctcaacaagcagcagctattctcaatattttagctcaggcaccaggcgccttgaggtgatagagtaaaaactctagctgagagatcaagtagaaacttgggaactagcccgggtggaacacaggcactgggcatcgtgctgagtctgttcattggcaccatcttacttcatcttcagaacgttactatctctgttttacacatgaggaaactgaggttagaacttgcctagattcgtgtagctagtaagtgtcaatccaaagaccttccagctagttttggttgagctaaaggggctagaagacctgccattagttagatatttcatttcaaaaataaaacccaggcatgaagtccctttcccagtgatattcagtgtgatttttttcttcactctaataattttaacaattccactgtttgacagttgtttaaaagacataggaatttttgtatattttaattgactaatggatagctcaattaggggagcaaaactaggatgtgggttttataaaaataatttagacttgacttagacatttaattttacagttgtaaatgatggtctaaaaattcttcaaactaatcaaaataatgaaacttcagcgaaagtgagtggctcagaaggcccatgaaacatacggcgtgattttttaaattttattttaacattttgatttccacaccactgccaaaggacgtcagaattgagtaaggggtttgggttgactgctgcctcttgaccggctgtatgtgtgaaaagggtcatttcacttccggctttagtgttccccgcaggggagaaaattgaagaatagacagaaatacgaagtgtcttttaattaaatgccaccttggtgttttatggggctcgtatgctttcctaacaacatttgttagataagttggtaattcccggcagctgtctactgtgtggtgcatctgtgaactcatactaatcgaaaagcatgcagccagtttgggatcgcgcaggctaaggtgagggagaaatgcggatacaccgggtaatgaacgatataaacatttcaaatgcgatacacattcggtttgagccacatcttctgtgtgcagattcacccgcagtgacccacaaagctattcccaagtaacagccgccccaagcctgaggcactggcgccccgcctgggcgaggctggctgcgctctctcttggccggcgcccgctgcatgcggtacgtgcctgcccggcccctagcccagggttcccgttacgcggctggttccagctggccgcggagtcccagaacctccccgcgatgcccagatagctctctgcacgtctcgccccggggcgatcacgttgccggggcgagggctggcgccccagctgggcgctggttggtcgcgccctggggctcgaggcccggcgattggtcccagggatcgggtcacgtgcttgggagcagataagcggcctctaggcgccgggccctcagtctctcccagcgaccgccgcgggggcaaggcctggagctgtggttcgaatttgtgcaggcagcgggtgctggcttttagggtccgccgcctctctgcctaatgagctgcaccaggtaggttcgctgcaactctgcgcgctaggaacacaggggaacgcgcagctgtgg

SEQ ID NO: 5591 - DNA, 2300 bp, Homo sapien
ctccataagaagtaactcctcatccattcaagctggtttttctgtttgttttcagagacagggtctctgtcacccaagctgtagaggagtgcagtgacatgatcacagctcaccatagcctcaaattcctagatccctcacatgtgcagttcacaatagggtttgcgctcctgtgaaaatctaatgctgctgctgatctgacaggaggtggagctcaggcggtaatgctcactccccgcccatccccaccctgcctccatcccccgccctgcaccttctctgctcacctcacgctgtgcgtccttgttccttacaggctagggaccagtaccggtccaagggccgggggttggggacccctgttctagttaacttgctgcagctcctacatcagtatttgctgcttcaccttacacttctatattatgaagacagcttctttccttaaacttcatgaaccaacctctgctagcttttaacttgtcttctgcaacttcctcaggtctctcagccttcacaaaattgaaggcagttagggctttgctctggattcagctttggcttaaggaaatcttgtggctggtttgaccttctatccagaccactcaaacgttcttcgtatcagcagtaagtctgtttcactttcttatcattcatgtgttcactggagtagcacttttaatttccttcaaaaacttctcatttgcattcacaacttggctgtttggtgcaagggggcctatctcagctttcaacatgccttctgcactaagatgaatcatttctagcttttgatttaaagtgagagatacgcaacttttcctttcacttgaacacctagaaaaccattgcagagttcttaattggcctaatttcaatattattgtgtttaagggaacagataggccccaggagagggagagagatggcagagtagcctgtcagtggggcagtcagaacatacacatttattgattgattgctgtcttctatgggtgtggtttgtggtgcctcaaaacaattacaacagtgatttcaacttatcactgatcatagatcaccatagcagatttatgggaagaaaaatgataaacgcaatcatattggtagtgttctagtcctaggttcgttcatgcatgttcatgttattgataagcaccataacttcaatttcatatgtataaaaatgctcaaaaaagtgtacatcctcttttagcactgtagtgagtcaacattccccaacaaaaactggatttcctgaaaaacaggttaaggtaggaggttgggggggggatgcttttcagaatggcaaaggtcaacatgtatcatcttctgtaagtaaaatgtatgtataggcatacctttctttcagtttaagacaagggggtgtagtggggaattatcgtgtaaaactacaccagtatcttaagcatgaaaatcaattatatgcttttcttttgtttgttggtcaaagaaaaagattataactcagaaaactttcttggagatgcgtatgctcagtgtatccaaactttaggcatgtcaggtacaatattgatttacaaaaagttcctctaatcaatcctgagctaataacttactgtggaaagagtaattgatcagagccatccctccaattggagtcaacttccatgactgttcggatttcctttattttgggggcagttcatccaaacttctattaaacggcaactagttcacttttgagaagtggtttacaagaaacaacaacaacaacaacaaagcagttgcggaggaaagaaaagagacaaagtaaaaaaaacggaaaagaaatctcccaggagaaagggatgtggaagctgaaaacacggacaatttccacagtaagacttccaaaagaatgtgcaagatccgagcaaaactttcaagggctctttttcagtgtaatggtagtgagaaagttcagcctggaaagcccagggcttaaaacaacaacaacaaaaaacacaatatgcaggatcgttcggcttcagcagaacccaccgcaaagatggcggtgggacgaagccccttctcccgccgccgaagcctctcgcctcacatttcccacaaacccttcgcgccgcctcgctagccgaaacctgcccagccggtgcccggccactgcgcacgcgcgggacgacgtcacgtgcgctcccggggctggacggagctggcaggaggggccttgccagcttccgccgccgcgtcgtttcaggacccggacggcggattcgcgctgcctccgccgccgcggggcagccggggggcagggagcc

SEQ ID NO: 5592 - DNA, 2300 bp, Homo sapien
caaaaccacacctctataaaaaattacaaaaattagccaggagtggtggtgtgcacctgtagtcccagctattcaggaggctgaggtgggaagattgagcccaggaggtcacggatgcaataagccttgattgtgccactgtactccagaaacaaagtgagaccctgtctcaaaaaataaaaaaaataaataaaaattcaaatcaagtatcttctaatgccaccattatactcttcagtgtatttgtacaggacgaccgtacttgaagctattagctgagttcgagttcactttattactagtatgttacattcagtaagaacaattgaagtaggctctgccagtccccatgtgctttgggaatcattattccaggtaatcattttattggtatcacctttggtaaacaagttttgaaaaatatgcctacttgagccagccttccttataggaagctaaagctttctatttttcctgatggtagctgctaagcacaagcaggaaaaaaaaaaaatctcaaaactctcagaagttacataagcctctcaccaaagttatctgttgttttggtttgtgagagttctcataacaaaataccaaagaccaggtggcttaaacaacagaaatttgttttctcacagttctggaggctaggagtccaagttcaaggtgttggcagagttggtttcttctgaaaccccctcttggcttgcagctgtctaccttctcagtgtgtcctccattggaacatggtgtctctttctatatgtcctagtctctacttttaaggaaaccagtcaaattagattagagcccaccctaatgggctcattttaacttttttagctctttaaaggctctgtctccaaatagagtcatattctaaggtactggggttagggcttcaacataagaattttgcagggtacaattcatttcgtgacatttgttttaaggtttcactcataaaactggcacagtgtacctttgttttcagtgcaaatatacaatatattgtggtttcagtacagctttttcagctgcattacagatgttaggaaatcattaaaatcactgagctatagctaatacctcagtggagttccatcatagacacagcggactcatacaagtttgtctaaatatacatgatttaaacatggtataaaaagcaagaaaaaataatgcaaaatttctgccatttcgtgtaatgtgggagatggaaatgtatgatgttcatttcagtcttgtattataacttggtgttatacatgatttttacctttaaattctcactccatgtaagttgagacctcactgtccaaagaaaccaattactctatgtgtctttcaagtattttggaagtgataagccacaaatgctaacatggtgagaaaaagctttacttccactggctatcaggagtttctagtccatgcaagacaaaatatgacttgacctttgattggaagttgtgctgtgcatatttatgttagcttttatatctttcttgtagcctatctagaacacttaacattactgtgtccaagttgtctttgtaagtcacaaataatttgtatgcataaaatatttctgtccacttctgcagcgttaaataccataccttgagacctagaaagacttttagattaatgtaatattttatggtagttttataattgtattcttctttacttgatctttttaaattcttttgctttaaatcctttagcaaaaggataaaaactataatagaaataagttttatttcatggctttaacagcacctaagttcctctactagacttgcagagatgtgtacctctgagttctctctagcaaaaaagcatgctcttgtggccttctggggaagaggactctgaggcccactctggtttgacttgtatgtgattgcagacctttgacttgcagcctctgagacccatgtacctgagttcaagaagtggtatgtaacacccatgaaggcagagactttggtaggaaggttttcataggaaagatacaagcaaatcagtcaatataattttgggaatctacaaagctaattgataacacaaaaagcttccaacttgaggcaagggggaaatgttttccagaaggtaaattgttaatagagtccaatgagctatttcagatttatacaaaatctctttttttatgttttcagtaatgtctatgccttataaatacatatatatatgtatacatgtaatgacttttttatgttaacaagtggaagtattatgacataggactaaaaaagaaaaaacaagtaaag

SEQ ID NO: 5593 - DNA, 2300 bp, Homo sapien
gtctattatccactttcctgtggaggtcctgttttccttcccctctctccagagcatggagcaggtgtaggagcttccactgaaccttccacctctgctttgggcactgaagcagatgcctctcttgcctctaccactgaggacattgactagagcagtggaaagaaaggaggaaggaattctttttgagatgagaaggaaggggaatcttttctgcagactgctttctactgagaaagattacattgttccacattacaataagaaactgaggtagttcagctgcattggtgcttaagtaggtttttctcagtcagctaacaacccagccatatttacaacattatctcttcagggaaatatctttctagttccaagttaccttaaaagtgaacatttggaattcattccacccatatgttagttgaccagatacaattaagttacaatgaagcaaaatgctgtagagaacatacaggggctttagagtcagacagactgggcctagaattccagctgcacgatttaagttgtacaatcttatgaactgcctaacctctaaaccttagttacctcatctatagatagaggtaaaatatatctggttagtatgagaattaaatggggtaatttacttaaagtctttggcatggtatcaggtacataaaaagcactcaataaatggtactattattataaacaaatgtcatttacaaattgtgagtgcaatgggaatgcatagactgggggaagagaaaggtgatgactggaatagtcagaacaaatgactatgaaacaagtactaatttattccttgctgaacattagttgaacgttgtgaaagaagagtacatattacaaattaaacaaattaatgtaccaataaatgtgaggacttttttccattctagcagattttttttaatttttatttattattatttttttgagatggaagtctcactctgtcacccagactgtagtgcagtggcacaatctgggctcactgcaacctccgcctcccaggttcaaatgattctgctgcctcagcctcccgagtagctggaattacaggcatgcgccaccacacccagctaataatttttgtattttcagtagaaatggggtttcaccatgttggccaggctgacctcaagtgatcgacccacctcggcctcccaaagtgctgggattacaggcataagccactgcacctggccccattctagcagatttgattaaaatgattatcttttctacccacctcctctccaaaaaactttcagttttaaggaacaaatacattgctgaatattttccaggaaatacaaacaattcagtttgctaaagttctgtgtaggttgaattacttctttcagagtaactacaataggactaaaatctcttaccttttaaaattgatatttctgtaattcgttgtgcttctcagtcacagtatcagaattagggttttgttcatgctttgccatatttaaattatattttgacaatatgtgttttggaagagatgttctcagttatgtcttatattttaataacagtttagctggatacaggttgaatatcccttatcggaaatgcttagaaccagatgtgttttcggcttttggatatttttttcagattttgaaatattatactcaagcattatacttactgttgagcatccccgatccccaaatctgaaatccaaaatgctccaataaacatttcctttgagcttcacgtcaacattttaaaattttcagatttgggatgtttgacctgtattaacctgtttgcttcactttttaaaatgaataatcctccattgtgatagtactggcacaaattgctgggttttctcatatttttaaatatattttattaggtataatagcattttaaaacttgcttatggcagatgttgtctctgacacgtaccctaggcggatgatgtcagcgctcttctgacagcagccatgcccccatctgctctgccctcttgttacaagcctcaagtgctcaatggtgtgagaagcccaggagccactgcagatgctctctcttcaggtccatctagcccatcaagcctttctgcagccagcagtcttgacaacttatctgggagtttttcagaactgtcttcagtagttagttcaagtggaacagagggtgcttccagtttggagaaaaaggagggtgagacgttctacaaaaataactttctaactggtattgtagccccgtatttgtcatttgggatgctaaaaagtcatttttaaccttaaatacaaggt

SEQ ID NO: 5594 - DNA, 2300 bp, Homo sapien
atacatgagactgcagattatactgaatcatgttaaatgtacagaaataaaatattagatttatatcaaactttcgcatttgaaccagtggggaaaaccccacagaaatcagtaagttaacatttcaatgtctttcttatttgactaagtggaaagagagtctttaaaatgtataacctgccattatgtaatttggtttcattttattctacctgttgtgtgagtttagtatatttaatttactttgtgttactctacatactgtttatttttgttacagtttttaattgaagatggactctgaaagtggtataggaccagtgtcttattaatatcattaatatattaagaggagccacacaaaacccatgacaaaatgaatggaaatattctttctaaaaatttagaaaattttatacttttgcatttattatgtaaaattatttgttttacaatatcaaaatttttcgtttaaagaaaaaaatgccatgaaacatttgaactgatgagccacagaacttcagttgaaatttttttcactttttagcatgctaaatatacatctcagtttaaatattctgtttaatggccatttataaattcaagcactaccactggtcagttttgtgtgatagaataaaaatatgttacctgcagtgtaagtatagcacactgtcaaattcttttccttaaggtgcacagtaaatgtacagatagttataggccactgtttttgcaatgtagtacatttctaatctattattcctaacctattataactgtttgcagagagaaaataattgaatttttctaataatctgtaaaattatgctaacttctacaagtaggcttctaaataaaaattttaaaaagagcaaaaaaaaaaaaaaagaaagaaaaaacagctttgcttggtcagcactttgagaggctgaggcaggtggctcatctcaggtcaggagttcgataccagactgggcaacatggtgaaaccccttctccactaaaaattagctgggtgttgtggcaggcacctgtaattccagctactggggaggctgaggcaggtgaatcgcttgaaccgggaaggcagaggttgcagtgagccgagatagcaccactgcgctccagcctgggtgacagagtgagctcccgtctcaaaacaaacaaacaaacaaacaaacaaacaaacccccgcacacacacacaatccccccctccagaaaaagcagctttgcttaaatgtaacattttcaagattcaagaacacattcattctctctctctttttttttttttttgagaggcagtctcgccctgtcccgggttcaagtgattctcctgcctcagcctcctgagtagctgggattacaggcatctgccaccacgcctggctaatttttgtatttttagtagagacgggatttcaccaggccaggctggtctcacattcttaactattataccatttcaattggtaatcttaccgttcaactactataatacaaataatttttttaaacttctaatttttggaggacccttataactgatttctaatacctaaaaataataaaaagcccaaatgtccactcctgggtgaactgctgggcactattgtatgttaataaactaggatattatatttttattagtagtaacaattattaagattgagagtcttaagaaaggctattggaaataataggtaaaaatgtagaactcagaatatgagaaatagaatgtaaatgatataattgtgtaaaaaatgcctagtttagaatactgaagtttgttttgtttcattttatttaacttttaaaacttagatcttttgtttaatttttattttttggatggttaagtacatgaaagaagaaaaacttggttaattttgcctgattattttaaacattggaagcaaaatacaagatttgtatttcatactacaggaccgcttccatcatccatctggagagacagagagagagagggagagagagagagaagcgcggcggtgataagtctcccagtgtgagagaaatcggggaggggcgaagaagggtaggcctcttctgttccattgataccacgttcattcacagggagccggctaaaacagactactcccccgtgcagtcgttccctctaccctaataaggctttggcgcctctcccagaactcggtaagttcaaagtgtagtaaagtgcatgtttccaaggaatcatctgaaatgattttgtagatagtttattgcaggttggagaagggagaaaatgaaggaaggggtagagggggc

SEQ ID NO: 5595 - DNA, 2300 bp, Homo sapien
ccctcttcctggaaggctcccagattgtcacacatttagctacctcttgtcatttagggctcagcttaagctaatcctgtttttccctgatttacccagtaagagtaggtctttaatcataccattaattccatcattctctttacatagcacataaatatattttcaatgtttatctattttctttttcctttccttttaatgtaaattcaaccagagtaggcaccttgtctgttctggtttcttcagaagttccagtctctcatatggtaggtgcttaattttggctaaatgattgctgtacacgatcagtaaaaagtatctgcttgttattgaatggtgggagataaactgatgaggcaagtaggtgactaaagtgaaaatgtaaagatatcttgaacatcaacttgattagattttaatagcatgaacaccgccaagcagagtttctgatacagagaggtgacaaacatttgttgaatgactggacaataaatattattactagcttgaatcttgaggcaaattacttaacctttctgagcttagtttccttgtctacgaagattaaaactaacttttcaaggcttccctacaaattatatggataatgcatgtcatgtgcccagcacacagcaggtacttgttagtttctttctctttacatacatatatactactttatggtttacaaagttcttgtaagctcttctagattcatgacctcattttattcccacaatcttctgcagtacttctcattagcctcattttacagatgaaaaacagactcaaggattgagacatagcctcttcaggtaatgagaagccaatggacatgctttataagcataggagcgacatgataaaaagcagtgaggttttttgaagattaatctgttggcctataaaatgggctgaactgaaaattggagaaatattattttgactactagcataaaaatcaagtttaagggccgggcgcagtggctcacacctgtaatcccagcactttgggaggccgaggcgggcagatcacttgaggccaggagcaggagacaagcctggcctacatggcgaaaccccgtctctactaaaaaatacaaaaaattggcccggcgtggggctcgtgtgcctcccagctactcgggaggttgaggcacatttagaatcgcttgaacccggtaagcgcaggttggcagtgagccgagatcgcgccactgcactccagcctgggcgacagagcgaaactcggtcaaaaaaaaaaaatcaagtgtaagatgataagggcctggcagaagtgtttaaaagcctaatgaacttaaaaatattgaaaagccagataagtcccccaaaggaacaaaaatttaaaaatggtagttttcaaatctggctggctgagaaaatgatggtacaaacaacataaacaattgagaaatcaaacttggcaaaatcgttggtcagaagaccttctctccaatacctaggcagaacttctggcaaataatgacaaacatctgagccatttcttcagtgtcatagcgactttttgctttcactcctcccactggcttcaccacctggacaagagcatgttaaggtccttctgatcttgcttcctagatgcagtacggtgggaagcagaatctgggtagtgtggaattagaaaccaagctttcgaagttccaggacttggactaaatcgcctttttccttctctgtcaaataaggggacccttacttcacctccttccctagttttaagactagacaccctctccacatcagcacaaagcgcttttatttaggcgcgtgccgccaaaccaaaggcgctcgcgccgagctaagctcctgtcggtgagcttacgtcacttccggcgcgctgacgctcagttgtgcgtgccgacgcccgcgtcagcaaagagcggagctgagggtacccggtttgaagtcgtgcgggtcggaggactgccgcctccgctaccgtcttggacccctgcttaccggccgccgcggggacgagctcgggtaggcggcagggcagatgcccgagggcctgcgctggaacgccccacgccgcaccggccgctcccctgtgctccgcggcctgggcctgcgccgctcagctctctggaaactagcgcctcagctgcgcggcgcgtaggtcgcggggagctccgaaccgccggcgcccggccatggcggtctccaggtgggtcttgctcctgacgagcaaactggaaggcgattcagggaaggcatggtctcctcttagagcccccactcctagagaagagcgg

SEQ ID NO: 5596 - DNA, 2300 bp, Homo sapien
gctcttcgaggaccttgtaaaaaaaaaatgctgttttttttttgtttgtttttgtttttatgatgcagtctctgtcgcccaggctggagtgcagtggctcgatcgtagctcactacagcctcaaactcccaggctcaagcaatcctcctgcctcagcctcccaagtagctgggactacaggtgtgaaccaccatgtgtggctaatttttaaattttttgtagacataaggtcttcctatgttgcctaggctggtctctaactccttggctcaagtggtcctccttcctcggcctcccaaagtgtcgggattataggcttgagccatcacacctggccaaaaatgtatattcttgggtcccactcagatctgttaaataagaatctttagtggtgctcaggaaatgtttgcataaatgctgaattaataaaaagcctcggaaaataggatttgcaaatgacagaactttttgttatatgtattcacataaagctaaaaagtgtttagtgtttaaaagctaggcacaaagggggataaataataaacatatacttggtagaaatttatacttgagggtaaatctttaactgcaaactttttattcagcttgttaatgacaagattttttaaaagttaacagctcattaagatcatatagtaacctaataagtttttctactggtttttattcatacaagcacttttagccaaagatttgaatgttggaaatattcgactttatttttcagagttcatgagtcattcacaaacatttattaaataccttctatttgccaggtattgttctaggccctgaggacatgtgtgaataaaatagagaagaattcctgccttcggaggttatagtctggagggaaagaaagatgggaaataaataagtaaaatacagtgtgtgtgtatatatgtgtgtatatatataaaatacagataatgttaagcgttaaggaaaagaagataaaacagggaaggaacatgtgaaatatttttggggtatagagtttgaaattttagataggaaggtctaggagggcttcctagaggtgacttttgagtaacaatctgaaagaaatgagagtgctagtcctgtgaatatctaggaaaagtttcaatagttttaaatagtttaagaaaatgttatgctttccaaatagagggaattacaaggacaaatgcctgcaaggggaaacatgcctaacaagttcagggacttaaggtgacctactaatgtggctagatgtggagataattaagggaagagtaataggaaatgagagggaggctcagatttcttttatcaccttatagaaaaaatggttggccaaataaatttcactattaagatggagagaggggagaagtatttatagaaaataatgctgtatatgctttaaaatgtgctaagtttttcttttctaaatgctgaatgaaagtagtttgacttgtcctctcctttccagtattaggctagcctcaaaatttttggtctttaagtcataatagaacatttcctcaaattttctatatccttttttcattggtcaattgtttatctccatatttttcaagaactggtaagattatactgtattgctcagtatattagttttctctagtatataaaagcctaaaaacgttaatgttatgctggaccagatgcaggttatatgcaggttataaaaaagatgatgagctgattgtagagaggagggaaaaatggcctattaaattcaagatccaatttgaaaaaaagaattcaccaacctatagtgtagttagaatatattttgctcaaaaaattttaagcagttagtcgtttgatacatgggattttaagtaaatcatataagcagaatatggtgtaaaacatttgtttaaatgatggattatcttaaattcattgtgattcacattatcttttattcatttcattcattgtggttcacattacgctttattcattttctaaatggtgacttttattttttagcaatgatagcactgatggggagccagaagaaaagagacggaaaatagcaaatgttgttattaatcagtctgcaaatgattccaaagtcttgattgataatattccagacagctcttccttaattgaagaggtactcttgaaagactctaaagtatccattaaaattgcttataatctttgggccagcagcggtggctcactcctgtaatcccagcactttgggaggtcgaggcgggcgttatcacgaggtcaggagcttgagaccagcctggccaacatggtgaaaccctgtc

SEQ ID NO: 5597 - DNA, 2300 bp, Homo sapien
tgttttgatgttttatgtctcattgaataaagtacttgatgcccttgtctttttcaaatgggattacttaggcttctattgatgttacatttttgtttatgtgattgttttttagtaggtacagtcataatgatgtttcagtcaatgatgggccacatatatgatggtggtcccataagattataatactgtactttgattgtaccttttctgtatttaaatataccaatatttatcattttgttagtagctgcctatggtattcagttcagtaacatgctgtgcaggtttgtagcctagaagcaataggctgtgtcacacacatagttaggcgtggtataggctatactgtttaggtttgtgtaagtacactctataatgttcacagaatgacagaattgcctgatgtatttctcagaatgtatccattgttaagcagtgcatgactataaatattggaatttagctgtcatgtggcaaatttaaattttaaaatgtttaagcacagtaactgtagaatagaaaattaatttattttcatgtactgttttacaggatgtaattaatactttattgcctaaagttttaactagaataattgaaggactccaggatcttgatgatgatgtcagagctgttgctgcagcatcattagtgcctgtagtagaaagccttgtctatcttcagacacaaaaggtaaattaaatatttttacagtttcttactatagagcttgttttcatttgggatatggagtattagaaaatacattgtgtacatttttctccttcatcttcaatttttttttttaacaacagccctctgatgcatgcaatcttgattatatattgtactttggaagagtgaattggatccatttgtctactttcccttcatgtacataatatatagggaacttccttgagaagaatgcagccatttcttcctaattttactcctggtttttagatatattggatttttgtttgttttgattttagtttttggattgtttttttaaatctagtctcccctcccctccctgtctctcctctcctcctctcattattaattattaattagtattaattattaactaataagtgctgtgtaatctatatatacacataacattttctttcttttcttgggtctcactctgtcacccaggccagagtgcagtggatgacatgtagccccactctcctgggctcaagcagtccttcctgcctcagcctcctaagtagctgggactacagacacatgccactgtgccttggctgattttttaaaaggcatggtggcgggcgcctgtagtcccagctactcaggaggctgaggtaggagaatggcgtgaacccgggaggcagagcttgcagtgagccaagatcgcgccactgcactccagcctggacgacagagcgagactccgtctcaaaaaaaaaaaaaaaaaattattttttgtagtgatgggggagtccccctatgttgccgaggctggtctcaaactcctaagctcaagagatcttcccagtcttggccttccagagtgctggggttactggtgtgactcatcacacccacccctctagtctcattttttgaaatgacttttttaaagatctggctgactttccaccttattatcaaaatcagaacacaaagttagaagtacagtaagcagtattttaagagcttaaaaactaaattttttttatgatgattagtaccattttaaatgcagtaaaattacatagaagaacatgtcttgtgtctcgatgctctgttgttttcactgttaagttttttacataaaatagttgtggctcttttattttctgaattctacccattatgagtctggtcaggcagggaagtatcaaagtagagttgaatggcattaaaaagaaggaatagagaattgttaaaggcaaatagtgtgacctccttaactttactcaaaattgacaccgtccaaggtcattggaattgcatgtgttgttgaatcagtagtgacccctgggataccatttggcagggtttgtgagtattttgtgcaaaattgataacttttcttgaaaactgatcttataggtgcccttcattataaatacattgtgggatgctcttctggaattagatgatctaacagcttcaacaaatagtattatgactctcctttcatccttgttaacttaccctcaggtccaacaatgcaggtaattatttctaattagtggaataaagtaaaaagtctttacatacctttcgagataattcagcctaaacataacaatatt

SEQ ID NO: 5598 - DNA, 2300 bp, Homo sapien
ccatctctactaaaaatacaaaaattagccgggcgtgatgggacatgcctgtagtcccaggtacttgggaggctgaggcaggagaatcactggaacccgggaggcagaggttgcagtgagccaagatcgcgccactgcactctagcctaggcgacagagcgagactcagtctcaaaaaaaaaaagaaggaaaaaaaaaagtagagtccatctgtacgctcttaatcttcataattagcaacatgcattcagctgaactgtaaggcacatcaaactgttgaacagatacctggctctcatcagcattaattctggtgttccttgtagcagacatttagtaaggtgctgttgtgatgctgttgtgattataacacctatggtaagccaggaagctacagtggacgatacctaccaaagtatggtgctagaataaaatcaggaacactcaagccactgaataaaaattatgtacctaaatctaaattagtgctaccaaatttggagggagctggtgatgtgtggtgctgttttccagcttcagtaggagaatcttgccaagtactttttggtttgtttcctgttaattttggaaagaattgagtgttcctatatgcctaagagatgatatgagcagagcagaggttctatacctttttttcccttctttttgaaagagttgtaatacattaatttgtatttggattagttttctattgagaatgttttggcagtaatgttttgaagtatttggagatatttttagagtcacttagaatattgaaaactttcctgagtatgggctattatagttacatattaaacagtatttcctaataattctaattgccattaactttttgtttttagttggtccagcatttgccacatctttatatgtgccttcaataccccagtactgcagtgaggcacatggctgctcgttgtgtaggtgtcatgagcaaaatagctaccatggaaacaatgaatatttttttggagaaggttcttccgtggctgggagcaattgatgacagtgtcaaacaagagggtgcaattgaagcacttgcctgtatcctttttcatttgacaaactgttcaggaattatattcatttcacttaaggataattaaaatgaaattgatgtgttctaatatgcacataaataacctgccttgttccaaaaaatacctattctttttacatcttattttgaaatatttttgtattttattacaaatgtgttacaaactgatttgcattttatgataaaaattttcatgtggaaagtttggaaaattgctattgattttaaaacatctttttaataggcaaaatagttttatgtactttatgaactatatgtctagtaagtgatttatttgtttataatcagtgtcttattaatcaggtattctataggtagtccctatgttataaacattttatgtttttaaagtttgttcattacttgggtttacaaatgaccatattatactagataattagaaatatacaggcaagccctttgctaagggtatggcagcagctaacattctttaactcaaagtatctgaaagatatttcacagagctcaaaagatggatgaagatcaaatcagtagaaactctggttcaaaaatactgaagattacaggagaactgcgcttactaggctcactatatcctgctggtgattgtcaagatcctggtgggaaatttggaattaatctttgagtgacactcagttatattcctttacttacaatgtgacttattttattttgacattggaattccagacgcttgtagcaatttctctatgaaaaaaatcttattggtaaagctttctccagccttcctcagaagaaaaacataattttatattcctaatcatgagaaagttacataatattttccaaggagcaacaaaatgggcagatacttttataattgaatcataggcctggagggtcagtcttttccctcataatacagatgagaaaatggtgagccttttaaaaagttaaaatcttggtatcagtttgtttgtgaaaacatctgtcttggaaccatttcaaaatttccttaatcacttactcaggtgtaatggaacaactagatgttggtattgttccatatattgtccttttagttgttcctgtattaggaagaatgagtgatcagacagacagtgtgagattcatggccacgcagtgctttgcaacgctaattagactcatgccacttgaggtaagtcaaagatacttgctttaaagacataatgttttctataacttgatc

SEQ ID NO: 5599 - DNA, 2300 bp, Homo sapien
ctccctaacgtggaaaactgtaaatcaaaatgttaacagtgcttatccttggtgagcttgttttctccatttttttgcattatgtgatttttctccaatgaaaatatattgcattttataatctaaaaattacttttggaagaggtaaagaaaccagcttaaagatgctgtgaatgattttactttaaaaaattacattattagttgggggaaaaattagattatatttagataattgattctgatggatgtggccttctcgacccagagtgtcttttcttttcttttctttttgagacagagtcttgctctatctccaggctggggtgctgtgacacgatctcggctcactgcaacctccacctcccaggtttaagcgattctcctgccttagcctcccgagtagcggggactacaggtgcatgccaccacacccagctaatttttttgtatttttagtagagatggggtttcaccacgttggccaggatggtctttatctcttgacctcttgatccgactgcctcggcctcccaaagtgttgggattacaggcgtgagccacggtgcccagcctggagtttcttataaaatcttttgttgctcactttcatccagagacctgctgaagtcaaagaggtcaaagaattagagagaataccaagaaaggtaaaaagtgttctgcttttcaccaattagtgatactttcaatctgcaaaacactgcctaaggctcttgttttactgcatcataaggaagtttaggttggaagtaatcagcgtacgatagagaataataatttgaaaactaccaagcttcctttcagtttcatctttccaagctgaaaagttctaggagcttatggaaagggtcaaaaaggatccatgtaggtatgtttaacttctggaggacaaaaagggtacccctttacatttgggaaactaagtagttataggaacatgtaaaaactttatttgatatagtggttgtaaactacataattctttaccgtaaatggtagacacaggaaagaaaagaagtcaaataaggatcagctaaatttgggtttgcatgatttccttgataaccctttattattattctagaaatatttagggaatattgctaactttttagatagcacaccctcctctaaatattccttggttaaagtttgaaaagatcctccatatatgcgatttccttaagttctgatgggcagtgattttgaagtcttgatgggcttttaggtagactttccagtgactggctaatcattgttatatttgaataccccagaaaaggatgaaagctggtttagagtaaatcacatatagttttcatagatattaatattttttgataatgaatccaaataaggtcttgattatccaaaaacgatggtgagaacattgagatagctagttgaaatgagaatatactttctccctactgagtgaaagccttgttctggtgacagtttttcctattataggttctgatcaaggtggtggtaggagataacacttgttgccaactataattttcagggactctaaaatgacttaggaactgaaaaaacgtaaggcacgtagaacaattatatatagatacagtacatgtatcttttaacaatggggtagtttttgaaattcctaataattagcttctagtaaatatgaaaacgtttatgaaatctataaaaaatagatggttcttttagattttactcatatggctttttaatagaaaacatgatctaatctaagaaaataattttactatattacaaatgctagcaaaattgtctctgcaaaaccagagagagatgaaacatttttttcctaataaggtttgaaacgataaaaactaaaaattttcattgaaagctctataatgcttcatgataaagttagaacagttttatcagaatccatcaaattctagtggattttcttatttatggatgtatttaagattttctcattcaatacatacatacacaccaatataagtgatgcttcacttgcgagggttttgtttttccctgcctctttttttttttttttttttgagacggagtcttgctctgtcgccctggctggagtacagtggcgcaatctcggctcactgcaacctccacattccgagttcaagtgattctcctgcctcagcctcccaagtagctgggattatgggcatccaccaccacacccagctaatttttgtatttttagtagagatggggtttcaccatgttggccaggctggtctctaactcatgacctcagatgatctgcc

SEQ ID NO: 5600 - DNA, 2300 bp, Homo sapien
taattacaatgtatgaaaatttgagactttgtactcctctatttttaacacttttgctagcatatggtaattcagggtcttcaaaccatagtgtttcgctgctaatactagtgataagagaatggattctaaatttgccaaagtcttgtgaccaagacagcagcaggaggattcaaaattgaaaatctgacaaccccagaattatcttgactgtctacttaaatctctgagggttttttttaaagccccacccccaccctatctcacaggcgctcgctcgctcgcgcgcactctctgaccttaaatccaaccagaagcatttctccactctgcagagaaattcttaggctcctgttgagacctgaagcactgcgatgccaagaaatctcttgtgcggcagaattggagacaagaaaattggggaataagcagaaaaaccataatccttagagtaacaagaagcaagcacttccaaacgtttcagtaggtttttacttctttaaaaacgttttttttaaaattaactgtctcctaacaaaatggagtagctgcagctactgggaggccagagaatgattgtgcagctgagtccttctaacaaatgccaaggattcctccctcgtggttcgctgcagctaaatgaaacaattaccaacgcaagaaggcagtttgctaatcaagagggctaatactggtttttttgttttgtttttttaaaaagtgttcgagctggggaagggagaagaaagggtcgtgtgtgcggtgtctttttaaccttgctgaaggacgcagcagtatttattgacgtatgcaaataagtgggggagggtggtgcttgggaaaaaacaggaaccagaatcagtttctcattgcagggcgaacgctctgagttccggtgaagggaaaagagacgtggcgaaattgctgtcttttctgtcttataagcacatctctcactaatacagaaaaggaaccaagacatctgaaaggttgaagacgctctcacagtatttttagagaccttgctcgacaccttccctattccccacccaacagcctgacctgttcttctaaatgggagattatggatttgcattgcaattggctagtagcggtggcgatggattttcgcaagtgaaacacccgcccgcttcagcgagggacattcatgatcacattgacaataacgcgtctctcttttttcccgtttcagctgcgcaaaccatgcaggatgatttactgatggacaaaagcaaaacccagccccagccccagcagcagcagcggcagcagcagcagccccaacctgagtccagcgtatccgaagccccgtccacgcccctctcctcagagacccccaagccggaggaaaacagcgcagtgccggccctcagcccagccgctgcccccccggcccccaacggcccggacaagatgcagatggaatcaccgctcctgccaggcttgagtttccatcagcctcctcagcagccgccgccgcctcaggagcccgcggcaccgggcgcgtcgctgtcgccgtccttcggcagcacctggtccacgggcaccaccaacgcggtagaggacagcttcttccaggggatcaccccagtcaacgggaccatgctcttccagaacttcccgcaccatgtcaacccagtcttcggaggcactttctccccgcagatcggcctggcgcagacccagcaccaccagcagccgccgccgcctgcgcccgcgccgcagccggcacagccagcgcagccaccacaggcgcagcccccgcagcagcgccgctcacccgccagccccagccaggcgccctacgcgcagaggagcgccgccgcggcgtacggccaccagcccatcatgaccagcaagccgtcctcgtcttcggcggttgcagccgctgctgccgcagccgccgcctcgtcggcctcgtccagctggaacacgcaccaaagcgtgaatgcagcctggagcgcaccgtccaacccctggggcggcctgcaggcgggccgggaccctcgccgggcggtcggtgtgggcgtgggtgtgggtgtcggggtgccttccccgctcaaccccatctcgccgctcaaaaagcccttctccagcaacgtgatcgcgccgcccaagttccctcgcgcggcccctctcacttccaagtcctggatggaggataacgctttccggaccgataatggtaacaatctgttgccatttcaggtaatactctgctgcacctacacactccttccctctgccccgctccttttgccacttctctgacttttaat

SEQ ID NO: 5601 - DNA, 2300 bp, Homo sapien
gaccactgttgtgaaaccttgtctctactaaaaatacaaaaattagctgggcatggtggcatgcgcctgtaatcccagctactcaagaggctgaggtaggagaatcacttgaacctgggaggtggaggttgcagtgagccgagatcacaccactgcactccagcctgggtgacagagcgagactcagtctcaaaaaaaaaaaaaaaaaaaaaagactcttttcttaggtttttgtttgttttaagaaataactagaaacaaagattacagtatgctgcaaatcagtggtttctggtaatacttcagttctgattggtgaagaagggaaatagaaaattaagacaattttaaatgatgacattttcagttacaagttcaatcagcatagtcatcaactgacatttattgctaaccccttgggtgagtagcactgaaccaaatcccacaagaaatatcttctgcctacgtgaacaaaccggttcttgaactattgctttcagaagctatagataatagcagttgattttaatatgttgtgagattccagccttggaatcatgaggttaaaataggaaaaaccataccaaaaaacagtttttaatagaaacttggccaggtgcggtggctcatgcctgtaatcccagtactttgggaggcagaggcgggcggatcacgaggtcaggagatcgagaccatcctggctaacacagtgaaaacccttttctactaaaaatacaaaaaatgagccgggcgtggtggcatgcccctgtagtcccagctacttgggaggctgaggcaggagaatcgcttgaacccaggaggcagaggttgcaatgagctgagatcgcaccactgtactccagcctaggcaacagagagagactccatctcaaaaaaaaagaaaactgtatctactgtttgtcttaaagaaagaagtcattgtcttatgcaatgtaacactaaacatgtacaattgttattattattagtttttttttttgagacagggtcttactctgtcacccaggctggagtgcagtggcctaatctcagctcactgcaacctctacctcccaggttcaagcgattctcctgcctcagcctcccgagtagctgggattacaggctcctgccaccatgctcagctaatttttgtatttttagtagagatggggtttcaccatgtgggccaggctggtctcgaactcctgacctcaggtgatctgccctcctcggcctcccaaagcgctgggattacaggcatgagccaccctgcccggcaacatatacaattgtttttaaataattcaccaaatattattttagtataagagttgaattttatttgagtaatcctttgtatgaataatgcaaggtgaacttttattttgacaagtaaaaataaggaggtgagttggttcagagcttatcaggtacaatcttaaaataagtgatttgttcctgcattgaaaactaaaatacaagaaatctggtggatgtcaaaaatttatgactaaaatctatttttacctgacctctaaggttgatatcacatttaacattaaggtgttttttattctaaactaaaagtgattcttttatgccatctctgctgaaaaatttaaaaaattatttaagtgtttaagtatggtcagattttaagtatctaacattctccagtagttccccctcccttgcctattcctctccaccccagtctctttctagtaggattcctattgctagctacccagtcattaccattctaaccatttaaggtagctctgcttggtttatttattctgaatactacaattcagtttccctttatcctggcttcctatggcaagttgacaaaccagtttatttttttcccttttatttcaacaactcgtgatttagattggttaggaggatataatgtaatcaggacacaaccttttcccctcagaatctgtatttgtgagacttcctcctttcccggctgaacgtgctgaagtcagatcgagtaccttgtgaaggacttcagcccccacagttccctgtgtgcgcatgccctctcatcttacagttgtcaaagtgcttttgccagagcggtcacataatcaacctgaaagaagaaaataaatactgtatacttttaaattttatcgattcttaaaaactggacactcaaaggtaactgctactaagattttgttacttgaaattgggttattgcatgtaaaagaatatctattgtgtgtggtgggggaggggaaggaggtatctatttctcactttgctgtaaataagcaaaa

SEQ ID NO: 5602 - DNA, 2300 bp, Homo sapien
tgagaccctgcctctgccaaaaatacaaaagttagccaggcatggtggtgcgagcctgtaatcccagctactccggaggctgaggcacgataatcacctgaacccggaggaggagactgcagtgagccaagatagtgccactgcactccatcctgagcaacacagcgagactccgtctcaaaaaaataaaatagaccaggcgcggtggctcgcccctgtaatcccagcactttgggaggccgagacgggctgatcgcctgaggtcagaagttcgagaccagcctggtcaacatatagtgaaaccccatctctactaaaaaacacaaaaattagctgggtgtggtggcacacacctgtagtcccagctacttgggaagctgaggctagaaggatcacttgaagtcaggaagtggagcttgcagtgagtcaagacagcgccactgcactccagcctgggcaacagagcaagactccatctctcaaaatcaatgaattaattaaataaatgaattaattaaataaaatattagacactggtcacatgcggtgactcacatctgtaatcccaacactttgggagaccaatgcgggtggctcgcttgagcccaggagttgcaagaccagcctgggcaacatggcgagaccgcgtctctaccaaaaaaaaaaaaaaatatatatatatatatatatatatatgtattatatattataaatgtatatatgtattatatattataaatgtattatatattatataatacatatatattatatataatacaaatatatataaaatattagacaccccgattaaactaaatactcattttctttccctaggaggagtgtgtgtgtatgtgtgtggtgggggggggtgggtgctgtttctcaaaaacatatttcaaaaattggaggccaagtaagcttctggtcacattttttgggtttgttgttttttcccagcaatgaacactctagttcaaatatacttcgcaaattttgaacagataatgaaaagttgattgtaaaattctacatataaaaagagctttaaaaacacattttcattttttaaaaaatcaaacaccttgtagcagatattagacataatcaagggaaaactaccagcgtcctaccaatcacagccctagagaaaacgccacaggtcgtccaaaaaacgcattcgtttgagccgacagctctttcctcccgccaaagctatccctcgaacgtcagaagctgacccaaggagtgactgatgatttctcctttttgattccccacccccgccactcccaatccacctgcttgaaggtgtcaacgcgactagaaacggttaacagtgaccagcagcagagagagaaacaaacatccctgacaacccacagctgagtaagcaagagctgtttattcaccaacgtgttccatttggagactgtcggcgagccctggaaagcccaggcacatttgagaaggttcctggagagggagagaatcatctttccttcccccaactccccagccccaaacacacagagagactcgggtggaagctgtctggtccaggcagtccctatttgcccgccccctcaagaagaacctcacgcaccaaaccaaccgacccctcgcggaggtggtgtaattcccccaaaatgggctctgccgcaggagaggctggctccagcgccgggggcttcggaaggagtttctgccacccccactgccgccactgaccgccccgacgccacggccggggccggggaccctgataagaaatggcccttcagccccctcccctcacctggctcggtcccacctgagggcaagagcggaggcaaaaacaaacaggcagggagggctgaccttgttgctaccgacagtggagcggcgcatcctgctgcttcctggaaagcggcccgaaagacattttttccccctggaggaaggaaacgggagggcgccggccagacggcggcaggcgcggaggcgttggtccgggcgggctgtgcagcctctagtggagacggtccgaagactacatctcccaggctgctctgggccgccctgcgtcgtaaccctggcgcgcacggaggcggcgactcttacctcacaaaggtagctcctccgccggcagcaactcggcgcccgcggtccatggaccggaacctcgggccgacggacgggaacccgggccgcgatcgccgcctccccgcctcaggctcctcctcctcgctctccgccgcctccgccggactcccgcaggccctgcaccgccgccgccaggctagcggagctgcccc

SEQ ID NO: 5603 - DNA, 2300 bp, Homo sapien
gttgcagtgagttgagatcatgccaatgccactgccactgccactgcattccagtctgggcaacagagaccctgtctcaaaaaaagaagaaaaaaagtcactatgtaaaaatgaaaagcaggaggccctcaaaggaaaaaaattaactacaaaataccccacatcagaacagggtctcaacagaatagaactggcagtggcaggtggtttcctctgggcatattttaatttgccacaatttgccaatttacaatgaaaggaaaacctggtaaattatcagaccccctagacaactggggaaactgacaaataagtttgtgcattagttcatacaacaaatacttactgattacctactgagtaccaggctctgttctgggattcaagataaacaatagtaagtttctgcttccaagagcttataaaccacacacatatcacacacatatatatataaagcagtcaatacaattgtcaggatgttgacctgaaacaagggctggatgaatcaccagttatctcaactgaaaaaaatcagtgacataattcctattaactgagatggctcaaaattctaagctccaaaaaaatgtctgtcactctggaaggatgtgtacccttgggtcatttgtgttctgggtgtggcaggcccaaaagcatttaactgggtataaactcaattaagggagggccttcatttaacaccttacagttggaattttactgagtacaaagagttggtaccacctgctgaaatgggtggcaagtggtgtctattgagaattgtaagcaaccacaaacatcatgaattagcttgtacaacttgctatgccaggaagtaagacttggctcgggggaaatgtggatctagagtctccaaaaactcatggtaggacccacggaccagaatttcaacagcagagggcggtgcacccgacttcacaaagagttttaccgactggggccccccaagaatgggcaactggactcctgtacgagctgaaacgtcttcaatgaactcaacgatcgtcaagtacactaaatgttcagcgttggactcatttggctgttttccataacctctactctggtctgaccgttaaatctcccttgcggatactctgaccttacagttcggaggtggggacgggatggggcgggggggacggggggtgcgggttcagggaaagtgggagaatgaaatcagcctatcaggctttccaaaagaatgcttatcattggttctcagacagagacttaaaattataagggggtcattcccctgaaagataacccggttcttgccagtgacatcgctgacaaacacttcacaagttggggagggggaagggggaggggaagagggtaaggaaaactaattttgtggattaacaggagtccctctcaggtcaaaacggggttccaaggaaaccagacgccactccttagctaagtttcacccaaagtctacgacccaggccgctcgctctgtcctcccccaggtctagactccaaactttttgcccctctcacggccccctggccgtggaactcctcccggcacgccgggttctgctcaccaagagcctcgagggcgggcgcgggcagggccagagcgagggtcggcggctcccggtcccccccacagctgcccgtacctgtccagcatctgctgtagggcttggtccggcatcttccgcggagccggcgcacacggccttccccagtggacccgctcaaggccaggcccagggacaatagcactgagaggcggcggagtaggccgcagtccggcggcagccgcgaacccgtcacccagcttcccggggcagctccgctagcctggcggcggcggtgcagggcctgcgggagtccggcggaggcggcggagagcgaggaggaggagcctgaggcggggaggcggcgatcgcggcccgggttcccgtccgtcggcccgaggttccggtccatggaccgcgggcgccgagttgctgccggcggaggagctacctttgtgaggtaagagtcgccgcctccgtgcgcgccagggttacgacgcagggcggcccagagcagcctgggagatgtagtcttcggaccgtctccactagaggctgcacagcccgcccggaccaacgcctccgcgcctgccgccgtctggccggcgccctcccgtttccttcctccagggggaaaaaatgtctttcgggccgctttccaggaagcagcaggatgcgccgctccactgtcggtagcaacaaggtcagccctccctgcctgtttgtttttgcctccgctct

SEQ ID NO: 5604 - DNA, 2300 bp, Homo sapien
gtttcaccatgttggtcaggatggtctcgatctcctgacctcgtgatctgcccacgttggcctcccaaagtgctgggattacaggcgttagccaccacgcccagccttttttttttttttctttttttttgagatggagtctagctctgttgcccaggctggagtgcagtggcgtaatctcagctcactgcaacctccgcctcctgggttcaagccattctcgtgcctcagtctccccagtagctgggattacaggcaaccgccaccacgcccagctaattttttatttatagtgagacaggcttttgccatgttggccaggctggtcttgaactcctgtcctcaggtgatccgcccaccttggcctcccaaagtgctgggattacaggcatgagccaccgtgcccggccgacttttttcttcttacatggctgtcatagaacctctattagacttttaatgtctgtgggattagtaaactcttttttatttctgatattagtaatttgtgttttctctttttcttggctagccagtccagaagtttatcaattttacttattgtttcaaagatttagcttttggtttcagcttttatgttttgattttctctataattttcctctttttaatgtcatccattttttttctaattttttttcttctgttttaggtttatgtaattcttctttctctagtttcctaaggtggaagcttagatttttaattttacatatttcttcttttctaatatattcattcaatactataaattttcctctagcactgcttttgctgcatcccatacattttgataagccatattttcatttttatttagttcaaaatattttttaaaatttatcttgagacttctttgacccatgtgttgtttggaagtatgttgtctaatgaccaaatgtgggtatgctgcaacccacaaattttgatgagtcatattttcattttcatttagttcaaaacattttttaacatttctcttgagaattctttggcctatgtgttatttgggaccatgttgtctaatgaccaaatatttggtggctttccaactgtctttctgttactaatttccagtttaattccattgtgatgtgagtatactttgtaagatttttactctttcaaatttgttagaagtgtgttttatgccccagaccatggtctatcttggcgaatatttcatctgagtttgagaagagtgtatatttgtactcgttggatgaagtagtctatacatatcaacaggtccagctgattgacgatgcccttcagctcagctatgtcctgagtccatcaattattagtagataggtgttgagatatccaactataacagtggatctgtctggtttttcttgcaattctcccctttgatggattccatattttgaggctctgttgttaggtccctacatattaaagactgctatgtctttctggagaattgacccctagtcattatgaaatgcccctcttgctcctggaagttgtggttggccacttcggactcggcctctgaagcctcctcatgcctgcgtgaaggaggtggacggcccctggttttgtgaggttggcttacatgagctgctgttatccacagagcagcagccagggactagtgatgaagtacttagtgtctggtcagagctctgggccttatctgtctccacgtcgactcccgcgatcgtttttgccttcgcttagtttgtcgtcgaatccacctcgatgaaaccgtttgctttttcctgtaaatgcttcccattttagcaacggccgcttgcagtttggccacagaatctaaactcttcccaggcaatttgcatatggttttttcgtagtgcaaaaccctctcctggggcttccacgcctcccgcagctcggcccagctcctcctgagtcccgggatctggggctgagcccccgccgcgaaaacctcccgagcccaggagatgagcggtggacgctcgggcccggagcccctcggcgccccgagctcgcgctccagccgcggccgttaagggttttgatccgttacccaacggctgtcgaaagaggagcacgacgtgaacttccaccgacaatcgtttaaatactgcaggcgaaggacgggttcttattgtgagcacctactgagctctgtttaatatttgggagagggcgagggtaattttttgttgtttggggggttttttgttttttatttttatttttcgtttttttttctgtaccaaaaagtgactctaatttctaattgtgaatcgtgtcctcctccgtct

SEQ ID NO: 5605 - DNA, 2300 bp, Homo sapien
taaaacttccagaaaaaatagaaaaatatcttcaaaaccttgcgataggcaaagatttctcagatagaacatgaaaagcagtaaccactaacgaaaacacattgaccgtgcacagtggttcacacccataatgccagcactttgggaggcatagagggaggattgcttgagctcaggagttcgagaccagcctgggcaacatgatgaaaccccatctctaaaaaagtatgcaaattagcagggtgtggtggtacgtgcctgtagtcccagctactcaggaggctgaggcagaaggatcacttgagcccaggaggtggaggttgcagtgagccatgatcataccactgcactccagcctgggcaacagggtgagaccctgtcttaaagaaggctgggtgcggtggctcatgcctataatcctagcactttgggagaccaaagtgggtggatcacctgaggtcaggagttcaagaccagcctggccaacatggcaaaacctcatctctacggtaattccagctacttgggaggctgaggcaggagaatcgcttgaacctgggggccggaggttgcagtgagccaagatcatgccacttgactccaccctgggcaaaagagcaaaactccatctcaaaaaaaaaagaaaaaccaccaataaaatggacttcatcaatattaaaaaccgctcttaagtgatacatgcatttacttacatcattaaaatacattgaagaaaaatacccagaacacacactaatttttactttacttgccacactggttttaatttacttgcctcatttaggcaagtaaaacagtttaaatatttgtattttcctcagtgtacctatatttccaggggggaaaaatcagcctaaatccggttgaattttatcatataccttctacaaataaaacctcttaccaacatgaggagaaagagctatagatttactaatagaacttgttagacaatctgttttccaggttcaagcaattttcttgcctcagcctcccagtagctgggataacatgcacccgccaccatgcctgactaatttttgttttttgttctttgagatggagtttcgctcttgttgcctaggctggagtgcaatggcacgatcttggctcactgcacctccgcctcccgggttcagacaattctcctgcctcagcctcccgagtagctgggattacaggtgcctgccaccacgcccagctaactttttgtatttttagtagagatggggttttgctatgttggccaagctggtctcgaactcctgacctcaggtgatccacctgcctcggcctcccaaagtgctgggattacaggtgtgagccaccatgcccggcctgtatttttttttagtagagacaagatttcaccatgttggccaggctggtctcaaactcctgacctcaagtgatccacccaccccgtcctctcaaagtgctgggattataggtgtgagcccccatacccggcctcactagacaatctttaagattccttccagttactaattttgtgtggttttgtcacctactactagtcatgagatcttggatacatcatttttttctttcaatgtttattgaatcacttacgtgaaacctcagagttgacagtcctgaaagggggacttgtgaaaagttaactttatataatgtcatgaatactggctgtcatttaatttccttgaaccctgctcatctgcaaagtggggatagtgctttatctgtatgatgtaaaatgatttagcaaagtcaaaaagtgttgtacaaacacaaggtaatgctatattaaagttataccatataataaggatgtgctttttcatttttgtaagaaaaaaccatgatttaaattataattcttgctgctctagagccagtaattgacccagcaacacttcgtaggagtgcatttgctggagcatatgttttacttttgaaattgcatatttctaaatttgatatcttatgcaattaaatacctctttttactctcacatttaaagagaaagcacttttcctctacaggattggtctctgtgactgttaacagttgtaactgtagtaggtcagtgatacatggtgcaaaacagcctgggataatattgccagctgccagaccagactagggtggctcaagggtaagattaccttctttaatacccgctgagacaagtttaacattgcaaccaggtagggaaataaacaggaaactcttaagaatgaaaggaaccttagaggccatttaatccaactcctgttaggtatacacttggccc

SEQ ID NO: 5606 - DNA, 2300 bp, Homo sapien
gttatccgcccggcttggcctcccaaagtgctgggattacaggcatgagccaccacgcccggccatctggaagcatttttatgtaagcatttctaataagtagcctaaagagatctcaggaaaaaaaagggtactaatctccaagtctcgagtatttgttgtgatgtattttctctctatagtaatcttctgattgctaattttgtatttataatttgtattttatgtctcaaagaggtcccccaaattgtatatgtttcaagccctccaagtctgaatctaccccagcccatttatagattccattaatggagcataaatgtattcagaaaggctgcattaacactctcagaggagctgcttcaaggtgattgactactctgcattgggactggtaatttaaaggttcttaaaaccatgcacttgcaaacaccactaggaggcttgccataatttttacctgttttcatccaaaggtttgcctttaggtgaaaccgcactgttaaaaagatcgtgggtacgtcttcgataaagcatcaacttgattaaggaaccctcctactgaattcccatttaaagcaatacttggactaaggacaccgtttttggctgcagtcttgatcgtctgtcaatcagaaacctaaaagtacttaagctggcaagtcaccatccctaatagcattcttccttaaagactcccataaggtattatggaaagttagattcataacaactattaagttgttcgtgggtgcaaagccccataaagccactggggagaaaattctttgtttaaaaagtaaccactgaagccgactgacattagtagtattcctagtacggagtactaacaagagtagtagtttctactctggatttgaagccttgttttgctgcggcgcccgtcccatccgcaccttcctcttaagagagctgctaacttccccaaggatggaaacgtccccctgggtcctggcctctctatcgctgacccctgcgtctgaatttcccccacgccgcactcgagccttgtctccagcgcatctgtgccttcgcggtccacgtccccaccgcgctctagagggagcccgcgggccgcgcgccggccgcggattcattttacgtgaggccgccgcgaccacgaaccttgttccaacacctgcagggtccggcacgctagtcagtgggggtgcctcagaaaacatagccccgtgtgccctcactggatttatgagcggcccctcgccccctcacagtcagacacacgtcgccaccctcacaagtgcggccggtgggatctagctgggaccctccccgcctgggaaagtctgggtgctggctcctaaagcgccccggccaaacccctgtccctccagtccgcctgctcaggcctcggctgtccgcggtcttcaccgtcctcgcctgcgtcctggccccatccggctccaggcaaaacccggagcagctacctctccgcagctcccgggagaccgcgcggcgccgcggctagagcatgcgcagtgcgcagggccggctcgaagcgcaagcaggaagcgtttgcggtgatcccggcgactgcgctggctaatgcggtaccggctagcgtggcttctgcaccccgcactgcccagcaccttccgctcagtcctcggcgcccgcctgccgcctccggagcgcctgtgtgggtaagcggaatggagcgcccgggccctcgggccccgtgggtcacagcggtttggcgctcgggttgcaaagtggtgattcagcacttaaagccgccaccgctgcccctcacgccgcccgtcccgccggcctggggcccgtactgccgcgctgaggccgccccagggcccggaagagcggctcgccaggcgggagccagaggcctggtccagagtcggggacgtcccttgggctggtgaggggccggggccgctacccggggccacggggcgtgtgccactagtgcggggggcgcaggggcggacagagtcacccggcctgcacctgggagccgcgccgcgtcactctcccggagtccgcctgtgagggggccgggaacctgaggcggactcgagccgtggggtaaaggaatccggcgacttcggggggaccgcttctcaccttgccctcagccctgcccttttctccgggcactgagtttccaggaccgtgtggaatgcccgcgctgggaaaaaagtttgcctgcctcccgccttggaagacgagtgtggggtttcctatcgggggacatttaggagccaaaagatacctcgggatcctctacagcagctcccttg

SEQ ID NO: 5607 - DNA, 2300 bp, Homo sapien
aagttactcaacctctctctgccacagcttcctcatctctggtaggtgaggaaatatccattacagagggtggtcatgatgactaatgaaggagccatgtacaatgccagacacagagtagactctcaaaattgttacttttctttccatccacctcctctttattgagatgatagttatgagactatattaatattaatctttcttatccaggacatctactccaaccagagggaaatttatcatgaagctaatgaagtttaaacttcagggctgctcacttgcacaggctccaaactgggagttgtagagggaaagccagttgttgtctggaagcattttttttttttttgagacatagagtctcattttgttgcccaggctggagtgcagtggcgtgatcttggctcactgcaacctccgcctccagggttcaagtgattctcctgcctcagcctcctcagtagctgggattacagacgcatgccaccacgcctggctaatttttgtatttttagtagacacggggtttcaccattttggtcaggctggtctcgaactcctgatctcgttatccgcccggcttggcctcccaaagtgctgggattacaggcatgagccaccacgcccggccatctggaagcatttttatgtaagcatttctaataagtagcctaaagagatctcaggaaaaaaaagggtactaatctccaagtctcgagtatttgttgtgatgtattttctctctatagtaatcttctgattgctaattttgtatttataatttgtattttatgtctcaaagaggtcccccaaattgtatatgtttcaagccctccaagtctgaatctaccccagcccatttatagattccattaatggagcataaatgtattcagaaaggctgcattaacactctcagaggagctgcttcaaggtgattgactactctgcattgggactggtaatttaaaggttcttaaaaccatgcacttgcaaacaccactaggaggcttgccataatttttacctgttttcatccaaaggtttgcctttaggtgaaaccgcactgttaaaaagatcgtgggtacgtcttcgataaagcatcaacttgattaaggaaccctcctactgaattcccatttaaagcaatacttggactaaggacaccgtttttggctgcagtcttgatcgtctgtcaatcagaaacctaaaagtacttaagctggcaagtcaccatccctaatagcattcttccttaaagactcccataaggtattatggaaagttagattcataacaactattaagttgttcgtgggtgcaaagccccataaagccactggggagaaaattctttgtttaaaaagtaaccactgaagccgactgacattagtagtattcctagtacggagtactaacaagagtagtagtttctactctggatttgaagccttgttttgctgcggcgcccgtcccatccgcaccttcctcttaagagagctgctaacttccccaaggatggaaacgtccccctgggtcctggcctctctatcgctgacccctgcgtctgaatttcccccacgccgcactcgagccttgtctccagcgcatctgtgccttcgcggtccacgtccccaccgcgctctagagggagcccgcgggccgcgcgccggccgcggattcattttacgtgaggccgccgcgaccacgaaccttgttccaacacctgcagggtccggcacgctagtcagtgggggtgcctcagaaaacatagccccgtgtgccctcactggatttatgagcggcccctcgccccctcacagtcagacacacgtcgccaccctcacaagtgcggccggtgggatctagctgggaccctccccgcctgggaaagtctgggtgctggctcctaaagcgccccggccaaacccctgtccctccagtccgcctgctcaggcctcggctgtccgcggtcttcaccgtcctcgcctgcgtcctggccccatccggctccaggcaaaacccggagcagctacctctccgcagctcccgggagaccgcgcggcgccgcggctagagcatgcgcagtgcgcagggccggctcgaagcgcaagcaggaagcgtttgcggtgatcccggcgactgcgctggctaatgcggtaccggctagcgtggcttctgcaccccgcactgcccagcaccttccgctcagtcctcggcgcccgcctgccgcctccggagcgcctgtgtgggtaagcggaatggagcgcccgggccctcgggccccgtgggtcaca

SEQ ID NO: 5608 - DNA, 2300 bp, Homo sapien
ccagaagcgcagttccaggaaccgactacaacatagtgtgggatatgatgtttctcttcaaataacccgatcaatcttttattctttaattcatagtaccctcccttttttctctttttctccttttttgcttttgttaaatgcccaggcacgccacaatactaggccttatcaataccagctcacattcctttccttatttgaagggactaactttttagctcattacagacaccccttcccctttcctgtccgctttcttttaagtacccaccttagctaaaaaaaatcaaatgtttagccaaccgggattagtttagattatacgacccgaccccagccaatgggaaaaagatacaggggcaggacttgcgtcaaaaatagactcctgcccctttgttcaggtgtgctctcaaggcgactggccaaaaaggcacccctctgcgcaaaaataaaattgctttgctaaaaatcctttgttcaagtgttcaatttccttaagattttaaaagttattcataacaataggctcctgtttcagtatttcctggtgcggcgtaccacacctacagcggtcgagtcacgccaggcactgccaagacgccgaaaagttctcccgcagcaggccggaggtgaccgacggcgcgcaggccccagcgagcgctgcatgctgggatccgtaggccggggcggcggatgtttgcgcagcttccttgagatgccaccgcccgctgcgccgcgcagaaacggggagcgcagcgcacccgcggcctgcgtcactcggtcagtgcagtcgttctaaaatcgaggcggaccctgctttcttgcctggagtcacttagagatgatgactaaaggataaattcagagtcctccaaatggcgtccagtgtccatttcatcacgatttggaacctgtagtagccttatcgcttaacacttcctaattattattattattattttctttttgagaaagggcattgctctgtcgcctatgctggagtaatccagcgacataatcccggctcactgcagcctctatctcccgtgttcagcgatccttcttcctcagcatcccgagtagatgggaccaaaaggcacgcatcaccacaccaggctattttttcccctctattttttgttgagacccgttgggaggcgcggggaggggggtctccctatgtcgcccagactggtctcaaactcctggaacttaagttatcgtcctacctcggcccgttaaagtgttgggattacaggcctgagccaccgggccccaacattaattattcttcaagcctattctggaccgggcgcggtggctcacgcctgtaatcccagcactttgggaggccgaggcgggtggatcatctgaggtcaggagttcgagaccagcctggccaacatggtgaaaccacatctctactgaaaatacaaatattagccgggcgtggtggcacgcacctgtaatcccagctactcgggggctgaagcagcagaatcgcttgaacctgcgaggcggaggttgcaatgagccgagatcgcgccactgcactccagcctgggtgacaagagcaagactccgtctctcacacacacacacacacacacacacacacaaagactattctggtctctgcctccgggatggcggctcgctttggacctctcttctgtgcttctactgccctctcttacaattctctaataattataatcatggcgagtgcttaccatatattccaatctatttacttccacaagctcattaattctcaccctaaccctctgagatggttactattatttcctctctgcagctgagggaattttgggctagggacgttatgtaagttgagccacgctacgctaaaagttccacactcaattctagcgtctcggctctggactaccaagttccggagcaagcagacagaccacctctttacgttcccgtaggccacgctccgggggcggggctccagtgaggatactgcatcccatggtgccttgcgcgccagcgcagccattggtccggctactctgtctctttttcaaattgaggcgccgagtcgttgcttagtttctggggattcgggcggagacgagattagtgatttggcggctccgactggcgcgggacaaacgccacggccagagtaccgggtagagagcggggacgccgacctgcgtgcgtcggtcctccaggccacgccagcgcccgagagggaccagggagactccggcccctgtcggccgccaagcccctccgcccctcacagcgcccaggtccgcggc

SEQ ID NO: 5609 - DNA, 2300 bp, Homo sapien
ccactgcacctttctctctctgagtaccactatggactcacgaattgttatattcaaagtggtataatccctaatgtatttttaaagcttaaatcaccccaaattttgccgatggaaaccactccaaggtggtccctattttcttttcacggtttctgacacaagatgtctttgagcttaccttgtacttttcttgccctagatctagaatcagccacttcttcaaggacttacttatacgacgaataggtcatacatccatctagtgcaagtctccagatattcacagctatacatgccccctccaatcccacccctttcttcatagtcagccaatgttcgttatccttccagagatagtttatatcatggagtaatataaaaatttatgatttatatgtactgtataatagagcaattatattcttacctacccccaacatgctttaactcgaatgatagtgtagtacacttctgagtttgtctgggcttgtagctcttgtctgtcattagattctgaaagatacctattaacaataccctaaaaagatcaggagcctttaggccaagtctcaaacgtttcagatgagaaaaactcagggatggtgacttgacggaagttgcattaactaacaacgctcacatgctattctccggacttggaatgtccaagcaccctgggcttgctgacacccactcacttttcaaacatcaattcttgggaagcttttcccttccttaatgtcccccagataggtgatgtccccttgttacaggttttagaccattatgtacatctccttcctagcacatacatatattaaaatttgtttcctgtctccatgaggagagggactacatctgtccttttcactgctggcacacagtagttgctcaacaaaaatgtgcgaagtgaaactcgaacaggcggtcaggctcacagtccacgcctcttcctactgtggtcccgctgtgtttggacaaatagttccaaattataaactttaaaacctgagaagtctcaatagaaaaagcagggaagtctttccatttccatgattaatggaggaccttagcagaaacggctcaccgcgaggtgtgacgaccgcaggagggcgtcaatcaagaaaatgcccccttgccccggaggcgagtggagccgcacagagccgaggccatacgggccagcagtacggactgcttcaatagaaaacacgtgcaaaaccagagagccagactgcgcacagctgcgaccctcaagagccagcagaaaagacacggagcggcccccactggattgaagactgcacagcctctgcccggcgctgtaggacccgggcctccccttgattgctgctcgcagcggcttctgccagcatcctcgcggaagtggcttgagtccgaggcctccaaatgaaaccaggtggagcggccaagagtccgcagcacctgaactccagccatccgaatcccgccgggccgcagctaagggccgccgagcagccctaggaacccagggcactgtcccgctctgagctcgggaaacggccggtgtgacagccagcgccactgttaatccagggagcgcacccaccgaggaggcgtcttaggccagcggcctctgctcccgccgagtcccgctgctccccgcctggaaacagctgctgccaccccgggcccaggcctggacggcgcccccgaatttcggcagaggtgcctcggggccgcggacagggccgctggagcccgcactccagaaggcggtcttcctcgcgcctcccccgacggacgcggcccagggcttccctcgagggcgtcctcggccggggtgcctggagtccccaggggcgacagccgcggcggggcaccagggcgccagttccccggagcctggtagcaagcgcgtcccgggggcggggagcttggccggcggggcgggccggggtgggggcgggcggctgctcttggggccccgcgccattggccgcagggcccggcggcaggaaggggccagcgagcgcggccccaccccgcggccggcggagcctatcgccgggagcgcggagcgcggataaatgtagcgccgcggcgcgggccagcagctctgcgaggggccggagcgcggcggagccatgcagtacccgcaccccgggccggcggcgggcgccgtgggggtgccgctgtacgcgcccacgccgctgctgcaacccgcacacccgacgcccttttacatcgaggacatcctgggccgcgggcccgccgcgcccacgcccgcccccacgctgccgtcccccaactcc

SEQ ID NO: 5610 - DNA, 2300 bp, Homo sapien
tatgttgcccaggccagtctcaaactcctggcctcaagcgatccttctgactggccccacaaagtgctgagattacaggcatgagccactgtgcccagccaactattttcctattacttagaaattttattatttaaggaatagtaggaatataatttactgagaaatcacagatccgttgaaagatcaaaccatttttgttatgaaatattatatcctgaatttttaaaagatgatatggaaaatatataatggctctgtagaatcacaatttttaatgccacagatttttcttaaaatgctaactttctagccgggtgtggtggctcatgtgtctaatcccagcaatttgggaggctgaagagggcggatcacctgaggtcaggagttcaagaccagcctggccaacatggagaaaccccatctctactacaaattaaaaaattagctgggtgtggtggtgggtgcctgtaattccagctactccagaacctgaggcaggagaattgcttgaacccaggaggccgaggttgtaataagctgaggtcgtgccactgcactccagtctgggcgacaagaacgaaactgtctcaaaacacaaaacacaaaactaactttttaataacaaactgttttattgtaactctgctgaaaataacaatgctatagttttagaacttaactgaatatcttgaaagatttcctaatgttgaaatactactactgatacaatgaaaacaacttttaactattttattttagatagcatttgcaagacaaactctgtgatatcataattaaatatttattggttgctctttacttacaaaccactctgttcctgtgtccagattatttgttaggcaaatatttatcgaacacctatgttgtgccagccatggtgttagcttctgtaggagcaaaacaacaataagggcccaactctctgcttacctatctgtctccacccttttctcaggcaagcagccccatgctcaccaccctggccatactttcacttccctggccatgtcctctctccacattagcggtccctgttcccaccaacttctttgcataggacttgcctatgagttttttcaccaccctggaatatccaaatggtatccactttccagttcacagttccaatgacccctcctctggatactcttcttctcttctaagcccctctgtttttaaaaaatcatggtaaccatttttcagcgtacagatcagtagtgttaaggatattcacattgtcatgcaacagatctccagaacgtattcatcttgcaaaactgaaactctatatccattaaacaactccccatctcccctgtaccctcaccccggcaaccagcattccactttctgtttctatgaatttgactattttagatacctcgtataagtggaatgatacagtattttctttttgtgactaccttatttcacttagcataatgtcctcaaggtacttccatgttgtagcacgtgacaggatttcctttctttttgaggctgaatcgcattccattgcatgtttataccacattttgctgatgcattcatccattggtgagtgcttgggttgcttttcctggcatttttttatcccttcttcttttctagcactcgtcttttgccttcatgtattaaaactatttttttcctttcttatctgtgtgtttcttcattttttaaaatccatccatccatccatccatccgtccgtccgtccatccgtctgtctgtccgtccgtctgtccatccatccatctgtccatccagcaaatatttattgagtgtctcctatttccaggcacagttctaggcactggagatgtatcagtgaacaaaacagaaaaaaattccctgtgctcattaatctgcattcttatagaagagacagataataaacaagtgaagtgtacagtgtgtccaaagacagaaagtactatgggacagaaacaaagcagagggagtgaggtggggatagagagtcccagctcaaggttaaaatgctggattttatttttagcaaagccatcattgagaaggtgatttttgaaggagtgagccaagtgaatatcaaaggcaaaagcatttcagaaagaggggagagcaggagcataaaccctgaggtggagcatgcctggtaaagtgtgaggaacactgaggtcagtgcaactgaagtggaatgaaacacaggtaaggagcaagagatgacatcagggcagtctagggcagagggagaggcagaacatggagtgcttgtagatcattttaaaagcagg

SEQ ID NO: 5611 - DNA, 2300 bp, Homo sapien
cagatatgaatcagatagacattctgcacacatataatcttataatttggtataagtttaaaaccttgcacataaagaacttttttttttttttggctggagttcagtggcccgatcttggctcactgcaacctctacctcccgggctcaagtgattcttgggcctcagcttcccaagtagctgggactacaggcatatgccaccaagcccagctaatttttgtatttttagtagagacagggtctcgccctgttggccaggctagtctcgaactcctggcctcaagtgatccacccgcctcggattcccaaagtggtgggattacgggtgtgagccactgtgccaagaactttaagatagattgaaaattattattttttgtcaagtctcaaaggacttactcatcttattgggaaatggtgtgagccatattggtgctgcatttgttccatcctgccatggagcaaaactagggctgagggttgggggctattggtggggttgaagtgaagaatgctgcattggtttgccattgctgtataacccatcagtctgtggctgaaaacaacagtcatttagtattgctcttgtgtctgtggttcagttggggcttggctcatcagagtggatttgaataggcagttctgtttcaggctgctgcagctagatgaaaatatatactttcccctgaaggtctgtggaccagtggggatgactctatctcatgtagctctcagggaatgcttttcttaggtgatggcagaggtgcaagaggacaaacagaaaaatgccttagaggctttagaaagtccaggctcagaactcacatgctgttattttagcttatgtatatcactggccagcagaagtcacatggctgagcccaaagtcatgggacgacaaatactgtgcccacagtgaagtactggcaagggtgtggatgcaggcaggggtgacaaactgatgcaatctatgacaaatgccatagattgtagttatagcatgctttgaatactacatttttaagagaacaaacgtcaatttttggtcagagcttttaaaaaagtctgataaaaacaaaaaaaaataaaaagcttcttatggaagaatgtcactactcattcctttaaatattgtatttcttgtattaagcaagaaagctgaggctaaactgaattgaagaagatcgaatgcaagtggtaatgggaaatacatgcccgttagttctttaggcctacttggggctggttgtagggcacattttcctttgctgttttgggcctctagttcatgcactctttcttcctctcggtggcagctagccttcttaaaaccctgacatcttcattctctttcttcctctccatcaaaacctattctgcagaagggatctagcaaactcattcacagtgaggcataaggaactgaaaaggagtaagatctaaatgcctccagaagcatttgtatttgaacaagagataaaagaactaatggctctatctctaatggaggaaattgacacagcaaagtagagaagcaaaggagatagacagggcaccaaggaattagcctagtgacctcaaaatcacatcccatagcacatttcatttttcctgggcaaattacctccttgggtttgtgggcaagcccttgcccacaaatacaaatgcttctggaagcatagttgcggtaataactaggaatgtagctttagttatgtatttagcataaataatattaatatatatgccttgtcaaatcaaatgcatttaataaatttgtatagtgtaatgactgtaattcctacatatagttattgtctttgagaaacgagtgaataaatatagctggcactaggcaggaactttccgaactgtgtcaaggttaatagtaagtaaaatgttataagtggaaacaggacagcaacagctgtgcaacattcttggaagcaaagacttttatagcatgaagtcagacagtgagcttgtttttgttgctcctttgggtgaacagagaatccttctaataattataaggaaaacggtatttttttttttataaattacaacagtttttcactcaatatctgacatctgcagctggaaaattaggggcctgtcgagcgatgttggaagaagaaacagatcaaacctatgagaatgtcctggctgagattcagtctttcgaactgcctgttgaagctactttaaggtagggcaccgttgcattttattgtgtcttctttagcggtgataaggtggtcctttaccctgctttttataattctttataagagtaa

SEQ ID NO: 5612 - DNA, 2300 bp, Homo sapien
attatcatagttcaccgcagcctcgaactcctgggctcaagcaatcctcctgcctcagcctcccaaagctctgggattataggtgtgagccactgtgctcgacctaagaagttcttgagaggggaaaataaccttttgaaaattgaaactgaaacataaaaaaaagaagacaaattttatcccctcccacaaaaagaatgaaaagctaggtctctctgcaggaaatggaagactgtcttagctcaatggatgtgtatagctggaatccattgctctgaagattccagattaataggaaggagggcattagcaatgttttatagggcccttcctaagtttggtaggcagtgggtcccactgatgctcacattctaatccctggaacctgtgcatatgttatttttacatgacaaagggggtattgcatatgtgattaaggttaaggaccctgagatggaagattatcctggattaaatggttgggtccactctaatcatatgggtccttaaaaactgagcatcttttccagcctaagtcagagtcagaggaagatgtgaccacagaagaatggtcagagagatgtaatgctgctagctttgaagatggaggaagggggccacaagccaaggtatgtgggtggcctctagaagctggaaaaggcaaagaaacaaattctcccgcagagtctctagcaaggaacacagacatgctgacaccttgatttttagcccagtgagacctgtgacagacttctaacgtacagaactgtaagataatatgtctgagtcattttaagctactcaatttgtggtgatttgttaaagcaacaatggaaaactcatacaccatgggacagcaatatgaggcagacactgccattgtcatttacagtcatttaactgacatataaaagaactaggttcttgcccaatgtcacacagctgtcaagtgatattaatccaagaattaatgtcttcggacactggtcttcagagctcatgctctaactattgcacaataccacctcccaggatgtttgtggggaggaggctggaggtaggtttcaagtaaaagctcactaagggtgagtgagttacacagctggataaagagcttggttgactcaaagggaagcttttcaaagccctggattaatgtagagcagaaagtagttgttcctcaggctaggtttccattctgttcctgtttagtcttccttcctccctgctttgatcatgacaaactggtttactcagtgtcccacaaacatgtcattaagcacgacttttttctacactgatacctttgtccaagcctccctgcctctctctcccacctccctgctgctaaccccctttcaagagctctcaccccttctcaacccagctactctgacctgggggcacctgagttcacggactttggtatgaattacacatcgccctgggcctttttttttttttttttttttggtatctctgccatcaagtgtcttaacttctcatcatttaattttttatgtcgcttataatttatttccaagttgactggccgctgtggacttcttgcaggcggggacatgaatccacctggagcggtcttcatggtcaactgggatctttattcgttcctaaaataaatcttactatcacatgcaattttgcttttcgtgagtgcatgttttcctttctctgactccccacgacccagagtacatcaggcccttgttaaatgtccccgtggctcttattacagattcagggtgatgatctgagtgtccaccttgctgattactacggtacccccgcgtgtggcacagggtgtggcacacacagaagacaaggagatatgttaaagcccaaaggccaggcacaagacgcccaggagggactagtcgcgagagagggcaggaggccagctgggtacccggccgccgcccgtagccccagctcacagcccccgctcactcctgcaggtgcgggggcgggaaccgggtcgcgcgccttctgcccggcgttccgcgcgcccccgcgccgccggcccgagcgccccgcccccgccccgccccttcgcgctcgcgccacttggagctcgcccccgtcgttcccgcggcgccgcgcctcgctggctcctcagcttccagccaaaatggcggagaacagcgagagtctgggcaccgtccccgagcacgagcggatcttgcaggagatcgagagcaccgacaccgcctgtgtggggcccaccctccggtaaagatctcatcccaccgggacttcggccccccgccccacgccggccg

SEQ ID NO: 5613 - DNA, 2300 bp, Homo sapien
cccaccataacacctaaagccttataatctcaaagataagagtaaaacatatcatattagacaatgttttttaaaattaagttagaataaattctgtaaggataatggactggaaataagagttcaaaagaaaaatgtagactttctaaatgttaaggaataatgtgttcatgtatctctctatatttgtatattttatatttttttagatatggggtttcatggtaaaaaggaatctgaggagaaaagaaaaataaaaaaaaaaagaaagaaaaaaagagatgaggtcttactctgttgccccaactggagtgcagtggtatgatcatacctcactgtagccttgaactcccaaactcaaacgatcctcttgtctcagccgcttgagtagttgggattacaggcacgtaccaccatgccttgctgatttttaaattttttgtagagatggagtctcaccacgttgcccaggctggtctcaaactcctggcctcaagtgatcctcctgcttttgcctcccaagttgcggggattaaagcgtgagctactgtgcccggccccatatttttttaaatgagtgatggctggatatgtttaaatgaggatttagcagttttattttaaattccattttatctttaaatgcattatatcctctacatttatttaaaattatggtgaaaaaaattagttaccatattaaaactgtgtgggggacattatagcttattgaaattattttaattgtttgcgtataaaataattggaaaaagtttcgtataggatacctaggtaaaaatattttctgcattttaagtttactttagacagcactaagaaaagtcgttttttgtagctacttaagtataaagaaaataaaatcagactttttttcagtgaaaatgtggcttttgacatttttttcctgtagtttttttcttttgactttggagccttagatgattagggaaatggttctcaacctttccttctgatgttggatgggttctctttaaacagtgaagaagacagaggggattgaggtatagtaattaatttattttttcagttattcacttacctaatatttattgagtgccttctgcatgccaagcattcttctaagtgatagggatacagtgatgagctagatggaatgtggaccatattctaatagagtgaggtagtaaagatagatctctgttgttggataatgtagctgttagttatatgtagttactaaaataattaaaatttaaatgtaaaagtcagtgtctcattcagattggccacatttcaaatgctctatagccacatgtgactagtgggctaccattttagacagcacagacatagtaaacgttcatcatcacagggagttccattggacaacactgagatagactaaccaagaaattatagcatggtataagtgctatgatagggaagtacaggttgctatgagagaacagaaaataacaagccttcagaagttaaggaaagctttctcaaggaagtgatatctctggcgagtcctgaaggatgagtaaaaaatcatatgggaaaaggaaactgggaaacttatttcagaaatagcctgcacaaaagcctggaagtgaaaagagagcagtatatggatatattgagagtgaaagagtagcaagagatgaggcaggggcttgtataacatgctcatgttacacatagggccttgtataacatgctcagaagtttaggctttgaagctaatctttcactgggcttccctcactgatagccatattttggtttggtcaatcaaaaatctataaagcctaagtaataagtttggtaggtgtcaaattgtttaaacataactttattcttcctaatagtcatgatacaaacaaattactatctttaaactataatggcaaaacttattcttgacattctgtatgaaatgctattaaacatttacattctagttagagaatttaaagtgactcttggggtaaagaagtatctgttttagttgtatgtgtgtgtatgtgtatttttcattactctgctgattttattttagggtgacgaggaaacatttgaaaactattatcgaaaacaaagaaagaaacaagcaagactggtattgcaaccccagtcgaatatggtaagtatgcgatattttgaattggttatgttgtcactttttatccccttaccctgttttaatttcttcaaagcatgtatcactgttcattcaactacaaatatttattgaacacctaccatttccaaacattggtttaggtgctaagggt

SEQ ID NO: 5614 - DNA, 2300 bp, Homo sapien
ttaaaaatcattatctagaccaatgccatggagctatttatattcttgattgcctagccctagtatagtgcctgacagagtaggaacttatacacgtttatagaatttggttctataaacagatcatattaagactacattaacattcttagaatataaatgtgcctttcgttaaattatctcttcttccatagtaactggttccctggcatttgtataaagttagtagtttattgtcttctagtagttactttccctgtaacttgccttttaacctttcatcatttttatttttatttttaaaacagagacagcatttcgctgtgttgcccaggctggcctcaagtgttctgcctgcgtcagcctcccaaagattacaggtgtgagccacctcatttagccctgccttttaacgttttactttatttttaaactctatgtagaatgaaatagaattagtgaaagtaaataccaaaaaagtaatttttgtattttttggtagagctgggtgtggttgattagtggcgcacaccctgtagtcccagctactcaggaggctaaggtgtaagaatcgcttgaggccgggcacggtggctcacgccagtaatcccagcactttgggaggccaaggtgggtggatcaccaggtcaggagattgagaccatcctggctaacacagtggaaccccgtctctactaaaaaaacaaaaaaaaaaaattagctgggcgtggtggccggcgcctgtagtcccagctgctcaggaggctgaggcaggagaatggcgtgaacccgggaggcggagcttgcagtgagccaagattgcgccactgcactccagcctgggtgacagagctagactccgtctcaaaaaaaagaatcgcttgaacccgggaggctgaggctgcagtgagccgaaattgcaccaccgcactccagcctgggcgacagagtgagaccctgtcttaaaaaaaaaaattaaaaaaagtaaagctttcatttatgctacttcctttctacccctactgttgcagctttaattcagatcctcgtcaccttttatttagattattcttcagtttttctaagtgatctctctgtgttcattattaggctttttccagtttatccttcacacagtgaatatcttcctatgacattccctttcctaaaaccttttaatgcctacagagtgaaatctggatgtctgtttgcacacctgtccaatctcatttttcaccatgtccctcagactttatactttgtaatactgcactacttgtggttttacacccccccacacactaacgctcactccttgtgcctttgcgtatatattccagtggtctagaatgcttttctcccataatctctttagaaatttttttcatctgtaaagaccctacaggactactcacttctctgtctaactttccatgagatgttcttcacgtactctgatagtcacttccttctttgtcctgtttctgaaccttgtacttcttgtattgtatgtatagcacaacattatagatgttataatttgtttgtgtatctatctctcctattagatttcttgtgtttattgtcatgaggtagggaattgtcatcacagcccagagcctagcacataataggtgctcaataaatattaatcaaaattatttaattaaaaggaaatcaatgattggatgacagttacgttaggacagcctaggttatgctacagcaacaaaaattccccaaatatcagtggatgaacatgttttattcctcactcacacagaaacccacgataggtttcctagtcagagatacaagctatttgcatttgtgattctaacttttcaacgtgttgtcttccttgtcaccatgggaaggaggtttgcacaattggctcataaaggctttaaactcaaagcaacacatgtcacttccattcacagcccaatggccaaaactagtcatatggccctgcctaactgcaagggggtgtacagaagagcacatggatatttgatgagtagtaactgtttctgcgtcaccaactataaaagatccatttctaatcatgacattatgagaggctaagcaaatgtaacacattgttttgatcttcaagagtttataatctcattgggaaaagagaagacacaagatacacagcttgagaattattcctatcaagaattatgacaggaggctgggcacagtggctcacgcctgtaatctcagcactttaggaggccgaggcaggcagatcatgaggtcaggagatcgagaccatcctggctaacacggtg

SEQ ID NO: 5615 - DNA, 2300 bp, Homo sapien
ctacataatatatcactatccaatactggatgacattccttagaatttatttatggttctgtttttcttcattcatttaagaaactttcattgaatactcattataagtcaggcattgcgctaggtgataagaatgtagaagtgaagttaccgtccctgctctcagggagttcatgatttagtgggaagacccagacagataaacaattacaaggcagcaaagtgagtgctgaagttaggctgtgcacaggaagttgcagtgagaacacagagaaaggacataagccaacctgcagggataatggaagtcttcccaaggaagacgatgattgaaggataaataagagtttacccagatggaaaataagaggaaggatgctgtaggcagagggatcaaagcatcatggaaagagagtggtatatgcatggaagtacaggtagtttggtgtggtatagaaactaaggtgcccctagggaaatgatgagatgaggctggcagatagacaaaggctagattgcaaaggaccttagccttgttttatttgaagatgatggggaactattgaaggatgttaaactgtgaggtggcacaagtcacatctgtgtaaatcctactggaagaagtggatggagaggttgcaccagaagcagggagatcagatagggtgtgtttcagtaatccaagcaagaaatgatgatagtttgtactaaggtagaaacaaattcagactcaggagatattttgggaagtagaaacaacaagattgactgcagttgagttttaaagaaataaagggaaaaatacgaagctgtgaatcaatagcatatcattacgaatgtcctctgtgccagatgattatcagatcactaaattgccttctacccctaaaaaaatttgagaaaaagccctgagtgttataatctagtgaatttcacttccatattgattagattcttatgagagatgtgataaaagatgagagactgaatacttaatcagattctggattaatggagtaaatgccagaaaacctgaattagttatataatcccgggcaagtcactttccttttaatttttctgccctgtaaaatgaaggactcagctgggtgtggtggctcacgcctgtaatcacagcactttgggagaccgaggcagatcactggaggtcagaagtttgagaccagctggccaacatggtgaaaccctctctctactaaaaatacaaaaattagccgggcatggtggcatacgtctgtaatcccagctacttgggaggctgaggcatgagaaacgcttgaacctgggagaaggaggttgtagtgagccaagattgcgccactgcactccaccctggatgacaaagcaagactccatctcttaaaaaaaaaaaaaaaaaaatggactcggcaacttttaaactgagtctttaggggactgttggacgtgtttcaaagaggttgtctctttcagttgcaagattttatgatccatcatctgcatgccctatttactcaagtaagttattgtgatgctcagagcagatggtgtgtgagaaagtgcttagtaaagtataaagtgctatataaatttatagtatcattaattttgacattgagctctttggttaaatgatagtatcttcaacaggaacctagggagaagaaaaattattttaagattatttttaatgtagaaaaattctgagcattaagtagataataactatatgtctaattgaaattgagcttatttttgtgcctgataaaatgagtctccctgcatcatagaaagtctttatttatgagtatatgtgtatctatccatggtgatggtagaagctatggtaacatttacagccttggttgagaaccactagggatttatggtttttttttgtgaccaaaaaaaaaaaaaggccaataaaatgctggatggtcctaagtatttttttttaagacaagatcttgctttgtcacccaggctggagtgcagtggtacgatcatggctcagtgcagcctcaacctcctgggcttaagtgatcctcctgccctagcctccccagtaggtggaactactacaggtgcatgccaccatgcctggctaattttaatttttttttgtagagatggggccttgctatgttgcccaggctggtcttaaactcctggcttcaagcaatcctccagccttggcttcccaaaatactaggatttataggcatgagccaccatgcccagccaaaaaaagtatttttttaaagttagaaaacacctttaatttaaacaccttttatgat

SEQ ID NO: 5616 - DNA, 2300 bp, Homo sapien
gttttttgatcagtatatggctttggaattcaatcatgtctgatatggtagtatttcactaccattttctgacttttagcttttattttcacctcaatgtgatttaagcagaccaaaatttctaattctgctaattctgaaggggaaatagacaaatcttaaaagctgcctgaaatcaaacttgatttaactcagtaagaatgtgaattatttgttctacttgggtggtttaatttaatcgttctgaatatgaacaaaaggttttggattttctaaagatgcagtgttgtttctgttcatcagggttaatatttctaactatattgcttgtaggtgaccccattctggatttgtttggtttggtttggttccagttaaaagagaggacaggaactaaatggggctaaccacttcaggtgcagcttgtgcgagggtagatggttcctgcacacagaagttaccacaggggtcaggttactttcttcaaatagcagatttcagtactttatcctcattgtggaaacaagccaaaccaaatgaactctggaaaacctaaaacaaatgtacattttcctttgtgtatgtttccgtggtccaaatggcaatataaatccagtctttattctccctttgttgtatttatgctgaatcttccctttgccttttcaggatttaggcctgtaagaaactatgcctgattctgtaaaataagtgtaaagaattatatgtacatctctggattttgtgatgaaatattaaaaatattgagcaagttgttgaaaatgcattactattttgtctattcagagcttactgatttaaaacaagtgcttcctggagaaaaggcatattatttcctagttactggaatgggagtggcaccaaaacagtatatatacatacacacacacacacacacacatatatatacatatgcgcacttgttctctcgatcatctcttaatccaaagtatttaatgtttttaaaaatattacatgaaaagcatggtagttcttcaggcacggtgaaatctggaggagaggagcggtgaacagctagctctctttgaagactggaatggggctgcccttcgcgccttacccagccttccagcgtacttggggtgtcttccctgctttggctgagacgtcccgggattcagagagatactgcctttgcactgcctggaggagaccactgtgggacctctttactcttaccaataatataaacaccctgcacccctccacacacaccccaggttgcactgtagggacaagaacgagtgagtcctgaggcatttggaacccttgaatgggacgcacaaagcccaaaacgcaacaatgtagattgacaagagtcgtcgggcaaactcgggggagggagggaaggatgtgcagggaaggatgaattcggtccttgagaccggaaaggtgctcgtgggtatccgcttctggaggcttaggacgtctttatgaagcctagggcagtagtggaactgccatctttggaaggatacctgacgtggtagatcagagagccgggagaggtggggagctgtcggagaatctcggctgcgctatccctcctgggcttttgcgatgccaacgcaggcgtcgacgactgcagtttccctgaaatagtcggagcaaaggagagaaaagcccagttctttcaccttggagtggcgagagaaaggcacctagaagctcgagggcggggacggcagagggagccagcggccgggggtgggccaggagcactgcggggcgcaagcccgggtcagttctgcgcgttgggttcgcccactttctgagcgcctgcgaagagcggggaagctctggcgcgaacccgcaggccccgcccgaggacgctcgcggggcgagcccccagcccagctcgagccgccccggcgcctgccactccctactcagagcccctccgtgagcgcgccgctgcccaccgcctccaatcaccactctgcgtggagcgctttaaatatgcaaagacacgtcacgttgtgtgaaccgggatcggtccgtagggggggagccaatatctatataaacgtgtccagcgtgggccaagaagggttaaacgactggaggagggacaggtggggcgggggtctgcagaccaggttggcaacactggtgagttgctcttctttcgccctccttcccttcttctatccaaagggtgctgagcccgggaggaggtgggaggtgccccgcggagccgggagtgagcgttcccgaggcagcaggcaccttcgagagggactggcatttgggcccag

SEQ ID NO: 5617 - DNA, 2300 bp, Homo sapien
tgtgaaccgggatcggtccgtagggggggagccaatatctatataaacgtgtccagcgtgggccaagaagggttaaacgactggaggagggacaggtggggcgggggtctgcagaccaggttggcaacactggtgagttgctcttctttcgccctccttcccttcttctatccaaagggtgctgagcccgggaggaggtgggaggtgccccgcggagccgggagtgagcgttcccgaggcagcaggcaccttcgagagggactggcatttgggcccaggagccaggaaaaagtcctgagcgtgccggcctcgaggaaggcacgttccctaagggcgcacggtcactgcagtctttcaccgtccgtctgtttttagaacagagttctggcctgagcttataaatctcgggctttgcccccaaaccccaggccttttgcggacggaacaggtgagcactgcgcactgctcgcgccccggttcttgcgtcccctgctctccctgcgctctgagcggcctggcccccgcgggctcatcatgttcccttgggggctgagctgcctgtcagtgctgggggcggcgggcactgctctcctgtgcgcgggcctgctgctcagcctggcccagcacctctggaccctccgctggatgctgagccgggaccgggcctccaccctgcctctgcccaagggctccatggggtggcccttcttcggcgaaacgctgcactggttagttcaggtgagcagtccttcgaccccgagcgctaatacggtcccttcttcccccggctcccactggaccctcctcagtctcaatgcccatgggatttgtagccagtccctgcccatcgcccacgaccccgggaagcgcgcacaactctcgcctttacctagatactccgttccctcgaagggacctcaagtcactggaattccccccagagcaactcccagacacaacgcagggggtaaacataaggggttttaggaaggggtctgaggagcacgtcctgcaagggtagaaaaggagcctggagcttggcccagctgtgagcccttgggccctcacttcttcactctgagtctgtttcctcatctcaccaataggaacaggagcatgtacattcccgtagagtagataccaggcccactggggatcttgttttgtaaacgcgccagccagggacaggaagttgtgatcaaaaggcagctggaaggtctgggtcagatcccagcccaggcccagaagttccagctctccaccctccgcctcgcccgcagggctcgcgcttccacagttctcgccgagagcgctatgggacagtgttcaagacgcacctgctgggcaggccagtgatccgcgtgagcggcgcggagaacgtgcgcaccatcctgctgggcgagcaccgcctggtgcgcagccagtggccgcagagtgcgcacatcctgctgggctcgcacacactgctaggtgcggtcggcgagccgcaccggcggcggcgcaaggtgagtggaaacgggaatggaccgtagatacgtcggatccgcggtccccggcatctgccatgggccaggccggggccccggtgttggatacactgtgaacccgaccaaggtccctggtaactagcgggtggccttgggcgggtccgttaccttcagcttcggtttataaagttaggactgcgctaaaagattctttcatctcccatcttccgtggctgtgatagcagaagcgctggagactcagacctagaaaggggccagggaagacttcttagaggagatggcagctggagcctggatggttgggagggactgtgtgcatcagagcagaactgggggaaatggcgaaagcaaaagccaggaagtttaggtctgggccgcttggaagagggagaaaggaccggaactggccttctggctactccggaatcgccaagcagatgaggccagaccgccgccagcgctgatcacgcgcgctcccacaggtcctggcgcgcgtgttcagccgcgccgcgctggagcgctacgtgccgcgcctgcagggggcgctgcggcatgaggtgcgctcctggtgcgcggcgggcgggccggtctcagtctacgacgcctccaaagcgctcaccttccgcatggccgcgcgcatcctgctggggttgcggctggacgaggcgcagtgcgccacgctggcccggaccttcgagcagctcgtggagaacctcttctcactgcctctggacgttcccttcagtggcctacgcaaggtacggccgccccggctccagaccttcctccgag

SEQ ID NO: 5618 - DNA, 2300 bp, Homo sapien
ggaacgcacgttcagaaatgagaccgggggctgaaaggagaaaagcggaggtggactcctttgctgtgactccagtctagtccctgtaccctcaccccaccccaccagcaaaaaaaacaaaaaaacaaaaaaacaaaaaacccgactccccatccccgcctcttagcaatagggaggctgttttgtaaacatcttggaaacgagttgtttttcagtgaacccacccccctccccgcccaccaccacccacgaaagcttggcgagattcctagatcaaagttcctattggcctggtaatttattgaccccccaccccccgccctgcccccctacaagatgttctttaatgatcgttcactctcacatttaatcctttcctgccggacgcccccgccggcctcgatgtacagatagattaaaacgtttttttccctgcggcaatttccagcgtgcaggccccgctcatcttgtgacccggcttgagctgaacttggcgaggtggccccgcagagttcactcggatgtcacggtccggcctgcaggggtcacaggcgggtcaggcccgaggattgggaatgggccccaggtcacgtccccattcgtcggctttgcacaccggccggaggcgctgtccagaaaggggcggacccgggatttctgagaattacctccagcgcgattggcctggcttcctgcagtggccagaggttggttcgccgtgtttacagccaccaaatcgtttgccggagactgaaaccctgcccagagcctctgaaacactgggcaggttatggggaaacgctgaccccccgaaacactccctgtggcggcgactctggcttggagagtcgctaggattgtgcgggtccctccgacctctgcagatatttcctgatacctccgggtttggggactaccgcgagaagggcaacgcatttaaactctcaggagcagagttttccacctccaagggacgccttccaaggcgtgcggcgtgcttctgccagagacagtgttcagttttaaacaaatgcaggtcattctgtttcattttcggcgccgcaggtgcgttcagcgcccaaacccaggtagcgtgtgaccctgactggtcccgagccgggaagctccggcaggtggagagcagagagagcaggtgcgcgtcccgcagcgtctgagctccgggcattggcagctcagtagcagctgattgtagatgggcaaagtacagaagacttcccagtacggatcccttcacccctcccattaggggtcggtagagccctgagtttagggccgagcaccccctcacctggatgaggacagtggctttactctgggtgggacttgggagagaggaggaggactccagtgcccggtgtaccggacacccaggtaacgcagtctaccgtgcctggagctgggaagagtagttgcaaccggagcccccttttgggaactcactaccctgaggcttagacaggtcgggaatgatcgcctcccggttaaggaggaggaaacaggcacagtgatgtgtggtgacttgcccaaggtcacacgcagtacagatggagccgggcctcggagccaggactcctgggctccccttcctcttataccgtctctttatcctgccagggctaaggacccccttccctgctgtccagctggggcgccaagcagcagggccctccgaataggcgagctgtgcttggatctcagagacgggcaccgactgccgagccccagacgaagtgccccagggtcggggatcaggcttgtgcagggtagcacctggggacctgagggacctggaggccttcttgtatcctgaagtaggaccttctaagacttcatgagtcctggcccccttgcaggggttggggagctggggatcccagatctgcctattgcgcccgatgccccgaggctctctcttggactctggccctgagttcttctgcgcgatccttcggagacgtctggaggcctgctttatgcatctctcttggacctcagtttccccacacgtgggaggaggcagctggacgattcctgaaaggactttcccttgcttcctcatcacgtggaagagagcccacccggcacctggaaatggaaagccagtgaaggctgctttgggccggggcagcgggtgggaccgggcgggagggattccaaagagaccgccgggaaggctagagcttggaattccggctcctcggagtcctggccctcccccaccgccgcctcggagctcagcacaccttggatgggggaggcgggcagctcctagccccgca

SEQ ID NO: 5619 - DNA, 2300 bp, Homo sapien
ttaaaacgtttttttccctgcggcaatttccagcgtgcaggccccgctcatcttgtgacccggcttgagctgaacttggcgaggtggccccgcagagttcactcggatgtcacggtccggcctgcaggggtcacaggcgggtcaggcccgaggattgggaatgggccccaggtcacgtccccattcgtcggctttgcacaccggccggaggcgctgtccagaaaggggcggacccgggatttctgagaattacctccagcgcgattggcctggcttcctgcagtggccagaggttggttcgccgtgtttacagccaccaaatcgtttgccggagactgaaaccctgcccagagcctctgaaacactgggcaggttatggggaaacgctgaccccccgaaacactccctgtggcggcgactctggcttggagagtcgctaggattgtgcgggtccctccgacctctgcagatatttcctgatacctccgggtttggggactaccgcgagaagggcaacgcatttaaactctcaggagcagagttttccacctccaagggacgccttccaaggcgtgcggcgtgcttctgccagagacagtgttcagttttaaacaaatgcaggtcattctgtttcattttcggcgccgcaggtgcgttcagcgcccaaacccaggtagcgtgtgaccctgactggtcccgagccgggaagctccggcaggtggagagcagagagagcaggtgcgcgtcccgcagcgtctgagctccgggcattggcagctcagtagcagctgattgtagatgggcaaagtacagaagacttcccagtacggatcccttcacccctcccattaggggtcggtagagccctgagtttagggccgagcaccccctcacctggatgaggacagtggctttactctgggtgggacttgggagagaggaggaggactccagtgcccggtgtaccggacacccaggtaacgcagtctaccgtgcctggagctgggaagagtagttgcaaccggagcccccttttgggaactcactaccctgaggcttagacaggtcgggaatgatcgcctcccggttaaggaggaggaaacaggcacagtgatgtgtggtgacttgcccaaggtcacacgcagtacagatggagccgggcctcggagccaggactcctgggctccccttcctcttataccgtctctttatcctgccagggctaaggacccccttccctgctgtccagctggggcgccaagcagcagggccctccgaataggcgagctgtgcttggatctcagagacgggcaccgactgccgagccccagacgaagtgccccagggtcggggatcaggcttgtgcagggtagcacctggggacctgagggacctggaggccttcttgtatcctgaagtaggaccttctaagacttcatgagtcctggcccccttgcaggggttggggagctggggatcccagatctgcctattgcgcccgatgccccgaggctctctcttggactctggccctgagttcttctgcgcgatccttcggagacgtctggaggcctgctttatgcatctctcttggacctcagtttccccacacgtgggaggaggcagctggacgattcctgaaaggactttcccttgcttcctcatcacgtggaagagagcccacccggcacctggaaatggaaagccagtgaaggctgctttgggccggggcagcgggtgggaccgggcgggagggattccaaagagaccgccgggaaggctagagcttggaattccggctcctcggagtcctggccctcccccaccgccgcctcggagctcagcacaccttggatgggggaggcgggcagctcctagccccgcaccccaggaggcgcgctcggagggaagccgccaccgcgccgcctctgcctcggcgcggaacaaacggttaaagattttgggcagcgcctcgcggggggaggagccaggggcccaatccgcaattaaagatgaactttgggtgaactaattgtctgaccaaggtaacgtgggcagcaacctgggccgcctataaagcggcagcgccgtggggtttgaagcgctggcggcggcggcaggtggcgcgggaggtcgcggcgcgccatggggctcccggcgctgctggccagtgcgctctgcaccttcgtgctgccgctgctgctcttcctggctgcgatcaagctctgggacctgtactgcgtgagcggccgcgaccgcagttgtgccctcccattgccccccgggactatgggcttccc

SEQ ID NO: 5620 - DNA, 2300 bp, Homo sapien
tcaccccagactgattgcatctcctaggataggttgggagccctggtctaactgaaccatgatgcctcctgcctttcgtttcacgttttataattttcaaagctctttctcctaaagatcccatatgatttccagaacaacttttggaggtacatggaggcaggtagatgaaggcagcatgtgaatgctttgtccattgtgttattattgcattcagtggatgaagaaattgatgctcagagatgttaaacaacttgcccaagccagtacagcttgaaacataagggtatggcttataacataaaggaaggaacttgaattaaaaccagtttttccaatttttagctagtgagtattgtattacaaggcattactggctaaaagggctaagaaaatgagatagtagaaaacacatattggaggttttctttaaatttatatgtatatgtaaatatgaagtcaatagaataaaaatgtaaaaaccaacaaattaatagactgtgtgtaaaagacataagaacattatctagtatgattgtgggcattaaagccaaacacatttcatcggcccagaatggccatttcacctctagcttctgagtaggagagtcgtgaatgctttgtccattgtgcatgtaaacaaaagtcatataatctcacttttaacagggtcagaagaacctatttcttcttaactattacaaatgcattttcctgcatcgattggaaatccaggacatcactaaagatttttccattttggcatgtctttaggaggaagaaatcgtggactggtggagtaaattttatgcttcctcaggggaacatgaaaaatgcggacagtatattcagaaaggctattccaagctcaaggtacctggatctatgctgctatgggtggagaatcaacatcctttgaaactggccacaggcagagctaagaggatgactaaaaggtcccttgggtgggtgctaatgagcagggcccaggaaaacctctgtcttcccggagagccctcttgcatgagtttcggctttgccaagattccagggacttgaggacagctattgagttatggttacgtgactgccacattggggcttggaggcatctggcagatggttgggaatgggctggcaccacactaattaggccacgatgatccagtttgactcagggaaacccagaagtcatagtgctctttgcagaatgacacaagatgtcaacatgctttgttgtgtactttgaacagggattggtttcacaagctgaaaagttgaatctgtcacatgtatgcagcataaaatcacagccgtgagaacatgtatacagcaggaagacaagcgactgagctaggcacggctgactagctctgagctttctgttcatgttttgaattttctaattcttcattcaattttcagcctgtagtgtcctcaagcagaagcagtgctaaagttttcagaacagtgtatatgagaaaaaaaaactttagaatgagaaatatctggtcattgaaataattttccccatcaaagcaaaaaaaaaaaaaacccacaccttttcatgttattgtcataacttctcagtgtagcttaagaaatactagcatataaaggaccattcattcagaaaaatgatccaatgaggctgaaggatcagcctcacactccatcctccctcactccctcttcccttcctgcctgccttcttttcctcctgcctgcctgtcttcctacctttctttccttccttccttcctttccttcccttccttcctttcttctctttccttcctttcttctctttccttcctttctttccttcttccttccttcttttcttcctgccttccctcccttcttcctccctcctacctgcctcccttccttcttccttttctcctgccttcttccttccttctcctccttcatcctcttcccttcttgctttttaaattgagaaatattttacatacgataaagtgatccattcaacaagttgtgattattgtatataccctatgtgaaccaccacccaaaacaagacagaacattcccattcccacagaaaacttccccgtgtccctttccagtcaattttccactatcctcatccctcctaggagcaactgattggatttctctcaccacaaactgattttgcctgattttacacttgctctaaatggacttgtatgatttatgttttgtgtgtctggccttttatccccacgttgtagttttgagactcatcatgtggttgtgtgtattcatagtttttcccttgtcattgctga

SEQ ID NO: 5621 - DNA, 2300 bp, Homo sapien
agtatcgattctctgtgatcacccatgcgcgttgaaatatgaaagtatgtgcctcacacacacacacacaaacacagagtttatttccaaaacctgacaaatagaaaaaccctgccttatattcagcttgtcagtgactttttccccttaaattctcccactgtagtgatgatttcttaaagcttcaaaataactccagtggcacagaaatatctgtgagcaatacttacttatttctccagtaaactttccatctattcagctatctattacaagctgttggtcaaccccatgaaggcagaatattaacccccagtcatgcatggaccagatataccccctacaactgtgcatggaccagaaccttctggataaggactggctgtctggggaaggggcagctgtgggggaaggtatatggggtgatagggccatgaccttggcagcccataactgtgccccacctccaggtgcccctgggatggcaccttctttggtccattgaggctaccctctggttgttaaagatgtgagagcatcagatccagttcacagctctccatcacagaccccataatacctggggtgagaagaggccacccagtctttccatttttaaagcagttaatttcttaactttaaaaaaaaaatctttcttttttactctattatataaataggtgacataaagacagtttcttaccttgaagtgttggaagacctagaaccttcctttccccaccccagtcattttcctgaccttgatgtctccaatacagtgctcttgaactctagggtcacgtgctttaacctcttattttacattacagaggaggaaactgaggcctaaagaggggaaatgatttatccagtgtcatagtgttaggccacaccttctataccacagtgactatgtcctaactagtgacagctgcagtgtagggcttggtgcattcttacttggtacacctcgtctttaatcctgcggggtgaacattttcacctctcttatgcccaccttggggaaaagcaagaggtaacagatttacacaaggggatgtcgctagcaagtgagtggccagagtttgcacataggtccttacaaccccaatgcccatgctcccctccctatcatgcgacagacggcgagccaccgggatgctgccagccagggtcccaaagtggttgtccctgggccactccacctatccttgtctactccccacacctccctcaccttccaagttctagtctggaatctagccttggtcagcagagatgagaaaaaccactcaggtgaccccagtttctattcctgtgtcaagccagagatagaaattcacctgaaccacataccaaatgggcccctaggtcagctcatgattccccaatcaggcattgtcaccaaagccaccaaattccatgagagggagccagggggagttgaggagaaagtagcaatccatttttacactgaatttccagggcaaagagactctcagccacagttatttcccttagaagttcagttttgtcttgaccatttctaaagtctgctcagaacttggctagtagatgaccaaagccctgggctagttagccttgtgcatgtcccctcccaggaagcagagcacagggaagagtatagggcagtgactgagagtaaagagcatgggtcagtgattccacacttacaggacacagcatgggtcaggtactattctaagtactcttcacatagagtaattcaacaatgttactattactcatgaaataatgggggcatggaagggttagccaggtagttcatggtggcagtgccaggatttgacccaggcagtctggctgacagctcacgctcttaagcacggagctccttgcctggcacatgagtaactgaactattgcgagtcctctgggctgtgtggcagagagaatctggactggtccatctggggaatttttctcaaagctgccctcgtctggtcttgagaaatgaaacctacctttgtgacccccagttcttgcccaaggaggaattgtacatgcccccactggtgatcaaggtcatcgaccacaggcagtttgggcggaagcctgtcgtcggccagtgcaccatcgagcgcctggaccgctttcgctgtgacccttatgcagggaaagaggacatcgtcccacagctcaaaggtaacatgcaaggctgtgcataagtctgggggcttttcttttttttttttttttttttgagacggagtctcgctctgtcgcccaggccggactgcggactgcagtggcgcaat

SEQ ID NO: 5622 - DNA, 2300 bp, Homo sapien
ggccccagtgtgtgttgttcccctccctgtgtccaagtgttctcattgttcagctcccacctgtaagtgagaacatgcggtgtttggttttctgttcctctgttaggttgctgaggataatggcttccagctccatccatgtccctgcaaaggacatgatctcgttcctttttatggctgcatagtattccatggtgtagatataccacattttcttcatccagtctatcattgatggacatttgggctgattccatgtctttgctattgtgaagagtgctgcaatgaaaatatgcatgcatgtatctttataatagaatggtttatattcctctgggtatatacccagtaatgggattgctgggtcaaatggcatttctggttctaggtctttgaagaatcgccacactgtcttccacaatggtggaactaatttacactcccaccaacagtgtaaaagctttcctatttctccacagcctcaccatcatctgttgtttcttgaccttttaataatctctattctgactagtgtgagatggtatctcattgtggttttgatttgcatttctctagtgatccgtgatgttgagctttttttcatgttttttggccacataaatgtcttcttttgaagatttatctgttcatgtcctttgcccactttttaatgtggttgttttttccttgtaaatttgcttaaattgcttgtagattctggatattagacctttgtcagatggatagattgcaaaaattttcttccattctgtaggttatctgttcactctgatgatagtttcttttgctgtgtagaagctctttagtttaatgaatgtctctctattgtttaattatccccgtctgacagggtgagaagtttctgaaggtgcttgaacgctcttcttccacacgagggcaccaagttgaagcgggaagaacactgagccatcagttagaaggctcaggatatggtccagttctaacgagtatttctgaggctttgatcatgtttcctaacctgccttactcttggctatgtgaaatttttcactgctactatttatgttactagagggtcaggtacaagattatgcttaacctgcattttacatttatttaaagtgaaaaaatagacccaacaataattacccacatggagctctcacttctcaggtcttgaatattattccacattgttttacgtttattaaatccagtcatatttttaagattttaaatcaaacttctgccatgaaaatgtcagctgcatgaaagcaaagaccctatctcttcttcactgtgtcctcagcccctaacacgatccctgtcacacagtgggcactcatatttgtcgaatgaagagaatataacattgaaaactgataccactggtaaatcaatagttcttaagctaaaaagtaccacacgaatttgttattagttattacagaaataacatattctgatcacttaattatcagttatggcagctattagctcaggcaagacatttaaacctgggagggggcatttaatttttttcctacatatgtaaaatggagatactaatgttttacaaactatatcacaatagcaacatttttatgaaataatgaagtgaggaaacagaaagcaatttgagaaagaatccacttgcttcacccacccccaaatctgaatgaggtgcacctcctgagggtatgtccacgactgtgctgtcattgcctggttatctctctgcactcctgcagtccatcagctctgcaaggcagaggtcctgtctgtttttttcttttctgtattcctgactctagctcagtacttggcacagagtagattttgaatactgtgtatctgttgattgatcatataacctgttttatcaaaataaggaatatcatcatcatcatcgtcatcattaacatgtttacttctgttttaggccatggaggaattgcaagaccaagagggctgggaatatgcttctctaattggctggaaatttcactggaaacaacgtagttcagataccttccgccgcagacgctggaggagaaaaatggctccttcagaaacacatggtgcagctgccatctttaaacttgaaggtgcccttgtaagtactaggttgccagagcgcagatcatattggtgtagagaaaatatatgagtgttggatacagcactgccaactccatagaggtccctgtaaccctggtactataagatggcaaatattaacaggttgagggaaagccacacatcctgggtgctcaatacctcgtgtagaacgaata

SEQ ID NO: 5623 - DNA, 2300 bp, Homo sapien
cgaggtggatggatcacctgaggtcaggagtttgagaccagcctggccaacacggtgaaaccctgtctctactaaaaatacaaaattagccgggtgtggtagtgcacgcctgtaatcccagctacctgggaggctgaggcaggagaattgcttgaacccgggaggtggaggtggcagtgagccgatcaccccacttcaatccagcctgggcaacaagagtgaaactccatctaaaaaaagaaaaaaaaatcaggagagtggttacctctgggagaaggaggtggatatgatatatggggtattccaggggcttctggaggactggcaatgttctgtcttgacctggatgcttgttaaactgtcacgtttatgtagtatgcatttttctgtaaatatatttcacagtaaaaatggcaaatagaaagcagccagataaaataaaagtaataatctctatattccactaaaactgccaacatgtccactaaatacaataatgaacacagcactgggtaattggttctttgctttaagccttggagaaactcgtggagacagaagaattcttgtaggttaagtcatgcttattcaatgtacttgaaatgtttatttacaggtgggtctgcttgatgtgtgttctaaagcaaaaagaagcccaatgtttcttcatcccaagttttagccttttcttctgaaatataacgagatcctgatttaaagtcagcctgcactaacagaaacgctgtgagaccacaaataagcatgaacttcttacatgtgcaaattactgtgtgctttgtgccagctcctatgctatgacctttatcttataacagcctttatccccagttcatagatgaggaaactgaggaagagaggggttaagaaacttgctcgccagcacggtggctcaagccagtaaagctcaagccagtaaagctcaagccacggaggccgaggcgggcggatcacaaggtcaagagatcgagaccatccttgccagcatggtgaaaccccgtctctactaaaaatacaaaaaaaaaaaaaattagctgcgtgtggtggcgcacgcctgtagtcccagctactcgggagactgaggcaggagaatcgcttgaacccgggaggcagaggttgcagtgagccaagatcgctacactgcactccagcctggtgacagagcgagactccgtcaaaaaaaaaaaagaaaagaaaagaaaagaaaagaaacttgctaagatgacgtagctcagggtggtgaggcagagtctcacactcagatctggctgactaaccccaggccgcctcttgtgatctcagccaagctgcactgtcttcatgcaccctctgggacagaaagacaccatgggcagctgtaggtccagaaacagtggggagtcacttctccattttcactgaaggcaattggcagcatttgaagagccgggaaaacttaggcgcccagctctcacctctgaaggggttttgaagaaattctatgttcagtcctttatatatatatatatatatatatatatatatatatatatatatatatatatatatatataattatttatacatatatgtaattatttatatatcccatgcctggatcgcgtttacttgaaataaacgctgtcattcgtttgccgtccagtaagaggcaccctttagctgctttaaaaaagctgaacatagggttactgagtgggtgtgttcaatggcgtgagaagtaacagcgaaaagtcaaaagcaaataatgactaaagttttaaaactccttgaaactcagaaaagaatgaaagcagtgacggaaaaatcaattaattcagtttcacgaaccattgctaaaaggcagcaacattttagtggtttcctgacctacccgtatttcttagctccaaattcatgttggtttcatttgtcgcacggaattatttttagtttagggtttgtccttttcacttccacatttcccgaattcataagtctgtgcctgcggcactgcgtagacgcggggagttcggtatcagtttacacgttgccttcagtaaaatccgccagaggtccacccattttgccttttccccttccttgccctgggagaaatcctcccttcactgggagagaacttctctcccagggcggtgcgacccggagctccagcgccctagtctccacttcgtttgctgaaacttgctttctaccagctaagaaccatgctgcgagtgattgtggaatctgccagcaatatccctaaaacgaaatttggcaagccggatcctattgtttctgtc

SEQ ID NO: 5624 - DNA, 2300 bp, Homo sapien
ctggcagctcctatctgtaaagagcaaacattaattttcagggctagcaatggcaattagggaatttaacaagccccccaggccaatgagcctcttgtttgctcctcttcctcaaggtccccactcacagggcgacctttagccagaaaagaaggtcctggagggcaggtgtggaattggagtgtctggcacagcaggcctgggtgctggctacccaggtgccagtccgccaggtgccacctctctccagggtccctcctccctctcccccattttttgctccccatttggcttgaaggtgaacagggaaatgtttttctctatatctctttaagaatctttgtaaatctctgtggaaattaattttgcccctcaactctgggcaatgaataatgttcacacgatgatttatcttttgccctgatttttcccaccctaatcccacttgatactttagtttaccttcccttcagaaatgggagctccttggaagcaggtaccaaacgttatcttgcattctgttttggttttgtttctctgattctttaaaattccccacatggttttctcatccattctattcagtaacatttgagtgttgccttttgtttaacaatggctaacatcaattgaacatttactaaatgttaagcactttacatgaatttctttcatgtaaaaaaattttaaagttttaaaattagagacagggattgggtggggtgagagtggatctctctgtgttgcccaggctggtctccaactcctgacctcaagcaatcctcgctccccgtcctcacgtagtggtgggattacaggaattagccattccacctggccggatttcctcatttaatccttataaccgagctgtgaagtaaatattattatttgcatcattttacacatcgggaaaccgaggctcaaataggttaaataaatttatccaaggagacacatctagtcagggcagtaaggaattaaatctagaaagtcctaatctagagtttataacctttgtacaatattgtgtacctaggatgttttgctactgtgtatctactgttttaaatctccagcgagtttatgctgggtctaggagagaaagggaggccctgctaaacatttcatgtgcttcttctctcagcagtaacgttctcaaagcggctaatcaagagctagaatcgatcaatagatagatatcaggctggagggtagcagtctggtctgaaagccggtccgctagcattcataatctcagcgttcaacctgggcgtgcctctcatctctcccgttaacactccctgctgtgctgctgatttttggcagtaatcccagcactttaggaggccgaggtggaaggatcacttgaaggcaggagttcgtgatcagagtgggaaacaaagtgagaccacccccccccccccccactccgctgtctgtataaaattttttaataaaaaattagccgggcgtggtggcgtgcgcctgtagtctcagctactcggcaggctgaggcaagacgatcgcttgaacccgggagactgaggttgcagtgagctatgattgcaccactccactccagcctgggcgacagagtgagacccgaggggatgacaagggggctgtgctcctttgtgaaatcccgttgtcccagggcaggaggggccgcacttcacacagggagaatctatgctcaagagcgcagaactagttcgtctcggtccatcgtcactggttttatcccattaaaaatagtaatttgctttctcctaaaagcgtataaacacaaaaccagcccctgactgcgagacaccaagcttgtttaggtctaagcccgcagagaacccccgatcccagaattagctggcgggcccgggaggaagtgttcccgccctctgtcccgccccgcggccccagccacttctcggcccgccctcaggtttactctccgcccttcaaaggcggcagccaatcggggagccgcgtccccgccgcgcgcgcgctgctcctccttcttgcgggccgcgccctgccggcagtgacgtgccccgccctgcagccgcgggattcaaactcccggaagcggcatccacacctgatggtgtgactcggccgacgcgagcgccgcgcttcgcttcagctgctagctggcccaagggaggcgaccgcggagggtggcgaggggcggccaggacccgcagccccggggccgggccggtccggaccgccagggagggcaggtcagtgggcagatcgcgtccgcgggattcaatctctgcccgctctgataacagtcc

SEQ ID NO: 5625 - DNA, 2300 bp, Homo sapien
ggaggcggaggttgcagtgatctgagatagtgccactgcactccagcctgggcgacagagcgagactctgccgcccctaacgccccgcccccgccaaaaaaaaaaagaaagaaacagaaacagaaaaaagaaaatacagggaaaggaggttggtgggactaggtggtgggggagatccaaaccgtctgggccagaggctagaaactagtagtcattcattcactgccagagtttctgtgcaaaggttaggaagcagatgtttgggggttctttcacgttctgcagatctatatttccatcattttgtgtctcaatgacttggtagtagttttctgtcctacgacccacgatatcaagtcaacagtgtgttatcaacagaaacacataggaaagaacttcctgtggcagcaggtgactgagagacgccataaccttgcatttctttaactgatggatgagctactgcaatctttcaccttataatggcaaaaatccaggactaaccttttgatagatgatttcttctactcaatctccacagttctaatatgtttagacgttctgatttcacacaggacaatcttaaaagtcacttcactaccattctaaggaggtctctcctgtttttactgatatcatttatccctgtacttctcttgtgtaatatttattacagtttgaggattcatgaacccttgtttgtttccttgttattgcctgcctttactacactgaaagccccataacattagggaacatgtcttttttttttttttaaaccagtttacacccagcatgtattaggatacctggtaaatagtaggctttatagtaatttttgaatgcactaatgggctcatactcctttatatcctttaatcacactgccattattttatcttgggatacatgaagtagaaaaatgttttttaacctccttaattagagttacttttatatactatttatatgcatcgtatgcttcactagatttttgcctgctaaagtttatattatatacttgtttctaaactgtcatccagtactgttagcagatactgagtttctccttacttaatttggccccttattcttaattcctttcatgcctgactcccctgaatgttatacctcttttccagtaaatgtcttattttaggttctcttcactttttcccactgtgctctctcaaatgattattaagatggatctgaactaggctaccttctaaaacagaggacctatgttaagtaatgacatttcgtgcctatatactcagaattacattatttaccaacagctttttattttgggccaagatatgtccttgattgtgacctacttctttcaggctttatttaatggttggagaccccttcattgttttttaaaccaaacttttccacaaaagaattacacatataattacacatatagaacactacacaaaacataaatgtacaagttgactttttttttttttttttttttgagacggagtcttgctgtgtcacccaggctggagtacattggtgcgatcttggctcacagcaacctccacctcccgggctcaagcgattctcctgcctcagcctccccagcatctgggattacaggcacctgccaccacgcctggctaagttttgtagttttagtagagatggagtttcaccatgttggccagactggtctcgaactcctgacctcatgatccacccatcttgacctcccaaagtgctggggctacaggcgtgagccaccgtacccagcccaagttgacatattttagaaggtgaatactcccatttatctaccactgagattaaaaaaaaaagttacaataccccagaagcctccatccatctttctccataccctgctggtttggatatatcatttctatttagagcagataggttattagacctgtttcaaacttgagatttaaatttttaaactcagaattatacagttgatttttatttttacagaccatttcagagatgtcttccagaagtaccaaagatttaattaaaagtaagtggggatcgaagcctagtaactccaaatccgaaactacattagaaaaattaaagggagaaattgcacacttaaagacatcagtggatgaaatcacaagtgggaaaggaaagctgactgataaagagagacacagacttttggaggtaaatggtcttctgatcctttaaattgtaagctctccaagaaagcgatgcatgaagatttcctgatgctaccttcttactcttgccgtgttccctgtcttgtccagttgatt

SEQ ID NO: 5626 - DNA, 2300 bp, Homo sapien
tgtttggtttttctttttgcctaggggtgccatgaaggtgcagtgaatggagaaagtttatgagcctctgcactcaacattttgccattggtagaacccaggaggttaatgttggagaaggccttttagtgcaaagagcccaccctggttgtacattctagggaaacctctctgtgtctatctcatcacatcagcctgtgatgtaatcaatctctctccgtctctgtctgtgcttttccctcttactttctctctctctctctctctctctctctcacacacacacacacatacatatacctatagtttcctttccctcacacaaacactaatatcccctgaccctaatcagacagttgccaaaaccccatttgtctgagttccctttatttcaattttttgccctttttcaactgtttcaggaagcaaaccagttctgtttttcaacttgaacctagtcaatgttcaagctgagcatctacttctcaggttagaagtcacatcatcagctcagacctgtttgataccgtgaaaagcagacacacaaatggaccccctccccagacagtacttcagactctggcgcaaccagcctgaagtactcaggtttctttctttctttctttctttttaagatggtgtctcgctgtgtggcccaggatggagcgcagtggcctgatctcggctcaccgcaacctccacctcccggtttcaagcaattctcctgcctcagccttccaagtagctgggattacaggtacctgccaccatgcccagctaatttttgtatttttagtagagacggggtttcaccacgttggccatggctggtctggagctcccgacctcaagtgatccacccgccttggcctcccaaagtgctgagattacaagcatgagccactgtgcccagtcagtgcttagatttcttaagacccaaccttaagaaagacaattagaagacagagtgggcaactgggagaggcctggtaatatggcagagggaagagggggtgaaggtgtgggtggcaggagggtggctggttggggaagtggccactggatcttaggccacaggcatacttttccatctccagcttcctcatttacagaaaacgagactgcagtggtgtgatggaaatgtgtgggacggggacaggtgactggctttcattactaaccagaggacagcttagacaagtcactctggctgggcctcagtttccttatctctaacgggactggattgcccagtgctcctcaaactgtggcacctggggcacattcatagcttgtgtgtgaatctgccagccttgaaatatctgtcttccttggatggcaagtttattaaaaattttggaaggactcactctttttataagaaagcatttatgtcattgttcagaatgcaaaatgtatatgcattttagttacaataactaatatttgataacatttaacgagtaattactgtgtgccaagtgtgcaaaactctaggtgagcctcacaataacctaatggggtattattattcccattttatagattaaaaatctggggtagagggagtagataatccacctaaagacctgttattaagtagtgataaaagatctccactccctctctcccccacaaaaaatatggactcattacaagttgttttaggatctacctccagacccatggagtttctttagtaaagcctgaacgacacaggccaaaataatctccaaaggccagctctgacccttttaaatcaattttagctaaatccgttcacaaaaggcttcgcacatccagtgtccctgaaaaataaaggaggttgggcaggccctgcgggggctcgaggaattcgctaagtgagttttctggcttctggatacactttcaaagggccagagggcacgaggcttccgccttggccgccacctccccggccagctgcggtgttcgcggccagtgttgccgggcacttcctggttcccgcgcgccccgggtgcagctccctgcacccagtgctggcgctcctcagaagggagggggccagaggcgagatgtcgcaaccgcctccctccctctttccccgccttggcactcagtcgcctcccagatgagcactctctcagaccgctgcgggccgccaggcgccgggaatgtcccctgaatgcgcgcgggcagcgggcgacgcgcccttgcgcagcctggagcaagccaaccgcacccgctttcccttcttctccgacgtcaagggcgaccaccggctggtgctggccgcggtggagacaaccgtgctggtg

SEQ ID NO: 5627 - DNA, 2300 bp, Homo sapien
aaagttaatgtatgaggattttttccaaagtactgaagttaagaacatcagttgacctgaattaacttatttgtaatcatgaagaaatcctagaaagaatgccaaagtaaactgttttcctctgctggtatctggagcactaaggtccatgatttatcattaaaagaggaggggcagaggaatggttacaccaactttcttttttcttttttcacctcaaatttttactctgaaacaacctttaaacacccaacaaataaatgaaaacttgttgctgcatcaaaaccatcatcgaaatgaactgaaatacccttcattattcaacctacagtgtgtgcaagggccaccagaatgtgttctaggagaaatggctgcaaggccagggggtattaggagaacgtttctggcaggaataactgtccaaaggcaactgggctaagctaggagctctctatcactaaagaacctggagcaaaaactggaagacctctcctctggaatgccgaagaggggatccaagtattgggcaggagatagagaggtgccctaaaatcctttcccacccagggtgcatagatatataccccatagggtcctgcaggagacgatctgaagcagaacttatttgagctgtttgggattacacagtcttctataaaactggcccaatcagaagatttcctagtcagcttgttgtccagaaacaggctttcctagctctgcggcggttaggagttaaatgcatcaccgttggctccccagacactgctgggactcaaatgggtgcaagagtgaaggggaaggtgggaaaaagatggagaagcaggggggaaggaagccacagatgtcatcttttcaggatgctcagaattagccctaatgccctatagataaaggattggtctgagaaccaatcaactccttatttctgtttggcagccaccttcctcttccccgatctcctcttatttcaggtcgggctgcagcaaaatggcccaaattgatctcgaatctttccaatttaggccatggagacacaatcgatattgtatggaaagaatctcaagaagagatacttctttgccacatcatgaattctcattccgtcattctcatcctttgattggctgctttgatcaaacgagtggaactctaacttcgaacagaaagagaaaaacagggtcagtaaattgtgccatcacacaggaaaatacctaaactagtcacactgttttgattcaattggctactgaagttatagaatgttgtttactcttctctcctttgtctactccccagccaacaaaacaaccgaccttagctgttttgaaaataaatgaaaattccaacatgggtttgaaataaaattgcatcataaacaatcggtaggtgtttttcaaagtggtttcagggaagtgccacggagtaagcaggcgaccaccgaggctgctaaaatatttcctgtcctgaccagggttgcgtttctggagaatatttaacagggagggttttaacgcttttaaagatgttgaaactaaagaacaaatattgaccagagggcaccacaacgctcctgaaagagagtaaaatacatcctttataaaatgaaaaactacttggatgaattattccaaaattcctgcacaagtggacctcagaaggcagacggaggcgccaatttggcatggccagggcctgggcactcacgcaccagggagcctcgcgggtccgctctcgctctgtgaggccacggtcttcccgccaggttgactcgagcctcctgccagagccactggccccggaggccaccctagaccgcagctggcggccgctggcacgagtgcagggtaactgagccagggccgctggcgcatttggcctggccgaggccaccccgcgcggccgctccactgtgcccgaggctgtcctggaggtgaggccggcccacagggaccctgcccgtgcccgggctccggtgagtcagggcgcgttatgcaagtgcccccggcgcctccccttcggtctttcaccccgcgcggttacgaaagcgcgaccccctccccccggcgctataaagcagcggggcggccgcggcgcgctcgcctccctcgctccacgcgcgcccggactcggcggccaggcttgcgcgcggttcccctcccggtggtgagtcgcggccggggcctcggggccggcggcgggatgggccggggtggggtggggtggggtgaggtgggatacggcggcgggggtcggctgccgggcactgacggaggcgcgtctcccgcagggcggattcc

SEQ ID NO: 5628 - DNA, 2300 bp, Homo sapien
actctgtctcaaaaaaaaaaaaaaaaagattatgaaagttgaacatatatgggcattttgttttttctttttctattaagtataagtctgtatatgaaatgcaaatatgtgtttttccctctctgtttcaagagggaaggatgaaaccaggaaatcgtgagcacaccacatacttacaggagaagtaggaactgtaccatgagtcacacaaaataactaggtaaaaaagagtgtccaaaattgttagataaggaagatggtcccataggaggggtgactcagttgactcaactctctcctgggaaatacacttctgcattatcctatttataataacagggtgttatgaagtaaatagtcacccaaagaggaacctcctgagagtagagttgagtgtgacataggacagtccaagaaaatatgtgcacctgacaaggtgctttgaggtagcaggtgaagctcaatcacaagaagtggcataactcaacaaatgactctttctgtacccctgggaaaaccatgtttcccaccaagaatctctcaattcatgacagggaatgtgcaacctcaacggatctctctttcttttgtgactattaagattactatctctcaggctgacacaggtggatcacctgaggttgggagttcaagactagcctggccaacatggtgaaaccccatctctaccaaaaatacaaaaattagctgggcgtggtggcacccacctgtagtcccagctactcgggaggctgaggcaggagaatcacttgaacctaggagacggaggttgcagtgagctgagatcgcaccactgcactccagcctggcaatagagcgagactcagtctcaaaaaaaaaaaaaaaaaaaaagaaaaagattactatctagagaggtaaatcttagagaactcaatgaaactcatagggtttctatttttgaagcaaacttaaatgtgggtgtaacaataatttttagagtcactgtaacatgtgtgtgttttccacttaagagaatttgtcatattaggtttgtagctttattgaagtgtttaaaacaccttgactaagtttgaaaccaacatttaagtatcgaaggcaattggttcatgaattaatagtttgaattattagttgcataatagtgtttaaatatttgaggaaatgtgtttaatagatgtaaaagcttagtaaagtgaacattaaacaaaactaagtagtggtaagtgttctttctatgccagtagcccctgagacgttaaggatcctagcaacagacaagatatctatcatctagtagatttagtagactgtatgttgtagcaaaatcgcatgacctctggctattactattgaaaacaaaatcctaactaagatacttagcagaaaaacccagccagcaactatgtaggttaccttttgtaattacagtctctcgacaagggttattattcaattcatgacttgattaggtttggatcattggcaaatattttgctatgttcacctctttagtaataagcttgaggtttactcctttaaaacacttctgaggtcaagctttctgaagtgacagggattgagaggtgaaggttctagagaaagaggaggccaagcaaccttggtgatcaaaagacttttaagaaaaggaaagattaatattcacctttatgttgcagtgatgcaaactgttccatatctcccagatgttcattacagttgctatataaacaaaaaaaatccaagcacttccgaggtctaaatagttttacttcctatagctatcatacaagaacgattcaaagtgccaattgttgccaatgtcgtgtcattcatggatatgtcagtgattcttccttgctgtggacagcagccgacattcagttatttttctggaatagacacctcagcttgctacttgctgggctgatctaagatactctgaagattcgctagggacttatgagctactaatgctcagggatttagtgtcctgaagaactctttaatcctgtgcttcctgaatcccaccctaagccagggccttctgtcacatcccaagagttacaggcagtttgaaagctctgctttctgcttgacctttggaagtcctatgagggaccatttacggtttcctcagtaatttccaccaggatgaatttccttctcatcactctgcctcaggtagtgctctgaaggtcgtcctttctgaacaaacgcagcaaagcaagccacaccatgggtgagatcaaccaagttgccgtggagaaatacctggaggagaaccctcagtttgccaa

SEQ ID NO: 5629 - DNA, 2300 bp, Homo sapien
agaattattacttggtattatcaccaccatcatcacccaacttccctcatcctgaccacatacttaatatagtattttgttgctttgagttacatagcattggtgcacatttaaattttcatatccattgaaataacatattttataaattaggaacaacaggttcatgcatgtactagacacttggtatatgatagaatatattgttgtagttattccacacattgtctgtcttactagtcaaccttcaaggataaggagttgctgttacatacctgtaaccctgatgtctagggcagtgtcctgcccagagtaggcactgaataaatgtttgtgttttttattgttgttgagctataattgttaacttgagatttcctaagcaggtgggttttctatcctgtattatttctagttcagatcatgcaatctatgcctaatatatattttctatttactctttttcagtaactgctgtctcaaagtaaaaaatggaaatctttgcctgaatggactggtagcaacagatctgaaattcttagaaatgttggaaccagaagctacttcccacacaatccatgaagtgggggagagagagacagagagagagagagaaaagagagaaagagagagagagaaactgggtcttatagagagacagacacaagtactacccagttctcgaccctcaccaggtttgtggctttaggttctgtgcctctcttccttatgtgtaaaatgaggctaataacacagcagcacagggttgttggaagagtaaaatgaagcaacaaacaagaagatgctagggatggtagaaaaatgctaataaatgtcaaatatggatagaaaggaaattggatatgaggtataggtctgtttagttttattaacaataaaataattatatatttaatatatttaccaaaaaagaaactgcttgacaaaataattccatatactataacgtcaaattgtaaggcttcctattgctttcactttttttagtaaaagtttttattgaagtataatctgattgcattttggaataagttaatttacaataatttaatttatcttatagccttttaagatcacattcagtgcaatggataaagcagaatgtatctataatttattgtcagggttagagacttgaactgataaggatatcgttatctactgtttagggcaaaagatgtaaaatgactgtgcattaagtgccaaggttttctctaaaaagggcccactgtaaacgccagaagcgtgccagttcaattcaacaaatatttaattagcacttgtgatttccaaggcaccgttttgggtactgaggaggaagcaaaaaatgaatagctgctaatgccagcgagagacaagacatgaaccaaacaactagagtggaaagagtggggcgtcgtgatgtagaaaacgcaaagcacaggaagaacctagtggcgcttaaaataatccaacttttcctgccttttttcttcttctttttaagattctattttggatcccttttcgcatgtgccaggtcgcttgtcggcagagaatcctcaaccctgagaaatctctcctcctattctttctttcctcacaaattcgatgagctcttctgccatcagcactgcttttggaatggtatctattgtgtgggtggcgaaacgatggagagatatttttgttctaattatgagaactgttttactgggggaaggagggagaggctgatctgaagcgctgatgagctgctctgagaggatcctccgaggaggcgttactaaggttactagagagaggacggcaggtgataggcacggtaaaacaaaatatattttcaaatgagaggcgtgggctaagcagcaagcagtgccagcggtactagatgccggattccctagaggggaaaggaaggaggcccagggaaaaactgggagccgcgacttggcgaaagctggaagcctcttcgtccctttccgggccgtttctcccgctgcccttgtttcccggagctgttctggctgtagcacaaggtcggcgcactcgggggacggtgccatttagatgtaacacgtggccgtgtcggaccggaagtggtgcccagtcgggacccgtagggagaggcgggttgcgggcggcggcggcggcggcggcggcggtggtggttgtggcgaggctgtgcggcagggcgcacgggacctgtgctgcagcggctctctcaggccgtgggtcgtcgctgcagctgccgggaaagaaggaaacgacgactccgggggcgaacttggcacacaggg

SEQ ID NO: 5630 - DNA, 2300 bp, Homo sapien
tcttctcgatgtcttcattttgtagttacagaacacatcatttacaagtcagttgatttagagggtgactttgaataaaaacaatcctccataaaacttttaccacataattattttacggagcaagtttccactaggcacttgaagcagggttcaatttacaaaaacccgacttgcagccaacttttaagtgacacttttactgtttaaagtgaggcttgcgcagaggtcacagtttctaaaaacactgccctccattccctcctccacagagtccttgacagtgaagcattcgtagaatacactttaaaatcatgacttcttgtcaacgaagagtttttctttttcccttccgtaaaaaacaacacacagtatttacaaccccacaaaaactgacttagtgataataacctactggtccttttgaaacacaaaccagttaatatcactcccctgcctgattctacagaggtgtcccattgctctgcagatcatgagccagactttatgtatgccgttccctctacctggagtgttctcacgaaccctctctgtaactcctccttacctctgaactcagctcaatcactgctacttcagggaattggcccctgacttccttgactaggttagatctctttattagaactgcaaggtgcaactgtaagtttatttggctgggcatgaccatgaatggactgtacactctgctgttgctggcatagccatccaggttgcccactacatgcacaatgctacacaggccctgggttccctagcggggtctctaacctcgtggaccttgcaatcttctggggtaaacagacagttatcaaatgtgagaatgcacgtgaatggcactgtcccccgcaaagagtttacagagaactgaacaagggattgaagttagcatggggccagctacatgagcgaaagggtagaatggcaatgctttcagctctgatgcagaatgaggttatgtcaaaatcgcctttgctcaagcagtccttttaatactttcagtctaagaagctagaggagaaaggaacgtggactgatatcccaggctgttcgtgccagcttgaaggatggccgccttcgccatagtgagataaccgggggtctgttttcctcatcttcctccatcccaagggtcttcctactctcttggactaaactatcccaccccaaggccaggggctcttgattgcttctttaaatgaattttcttttccaagggcccatccgctcacatcaagtacacgagtaacatagcctatcattttcatttaattccagaatgtctttactatcatccccgttttacagacaggagaatagattcagcaagttcacagcagacctgcgttctcaaagccaggtgtctggttctcagtccagcatttcccccaccatgtcacagcctcggggctgagccaggcctttttcaaagccccaggaagctagagctggccgcctcctgctggcagggagttccttccaggcttctggtgctactgccaaagaagggagggtgggagaagagagggaggtggattatacacagagagggtcccgcacttctgtttcccttccttgtcatggaaggagagaatgaattacgtgggggacccagggggataggaaaatcaatcattcatgacagttaataagtgtcagaaaagtatgtactcacattcatcccctgaaagtcacattcttcatctgttctgatttgtctttcactgatggcattagccaggtaggctcagcaagaaacatcaaaaggttttagcccaatattgtggagagagtttcatttagcttcattttttccagccggggctggctccaaagctagtttttcttactaggttgtttgctacatgaaaagcagactcccagaggtttctgagattgccgacatcctatgcaagatgactgctcccacccacccgcccacccactcactaataagacataatgccgtcctatttttggtaacaattaaagggcctcccggtgaaagcagaaagctgtttattttctgtgacatcacttcactttgccttcgaaggctggtctgtgctcagtgttttcgtggtgatgcaagtcggctctctcctccagcagttggatccctcccatctcacagtacctcacaggtctcttcccccgagcagtgcattgctggagcgaggagaagctcacgaatcagctgcaggtctctgttttgaaaaagcagagatacagaggcagaggaaaagggtggactcctatgtgacctgttcttagagcaa

SEQ ID NO: 5631 - DNA, 2300 bp, Homo sapien
gatccttccataggataagaatttgctgtctctgagaaagtgataaattgtgtttctggtcctcacttgttaaatgaataaatagctcttttaaaaagcatccttttgatatgctaaggcacctcccttcccctaggaagttacatagatctagttacatagatcagtccttaaaattccaggagtagtgtcagtagacactagatggacattagctgtggcacagaaagcctggagtgattaacctaatcaattaccacatctccactttgtttttgttgggtggacccagtcacggcaagcacagatgctggacaatgttatagaaatagttaccggctgctgcagggtaatgtgatttcacgtatttagaatcacagagggaagccaagggactggtttttaaatagcccaaccgagtgtgtgccatgcccgtgccccatgctccgagttcctatggaacattccagcctttatttctaaaagcagttcaggtttcagaaataacaaaaggcgagtaattctctcccagtgtgttctcggttaactcagattggctaacctcaacatggtagacttgtgccagagctgaacttatgcaaaattgtcaggggccaaagtttgtccctaatctccaggaccctgtgcctgaagactctgctctccatccttcttgcccaatattctctgcttccgcctatcctcaggaaaaggtctaataaactcatgtgcggtgtgtaggaaatatatgagaaggctctgaatatgaactatgaaacgatcataacaattgtgggaatgcatggatcccacagagaaagatctcttctgtgagacagggctgtccagtgccctgaaaaccccatatgggctgccaatccccctttggaacatgaagaccaatggcattggaccaccagattaggcctagatcacacaagccattgaggtttgcaatgaattccaacagcatttgtgattgtgaattgccacactcacccatcatacactgtgaagagataaatttcagaatcaattcggcttgattgacgtaggaagacagttcgttggtttcttgctttattgttgggaagggttaaagcaaatgtcctatttccatcatccaccctaaaaatctgataatgtcagtatgcccccagatgctttttcagagcttctgaaaaagctatgatgagaagtacttgttgaaatgtcagtctggggtactgaggaaaatagacatggtatctgaagttacatgcagtgtttgggaaaagatcctggtaggccatggctggcagtttgtgttggagaacaagaaaaacaaaaacccacattccgtagagaagagagagaaagaataaaattattcaataaaaattcattagattagttgtaatatacattttttaaaaatctcatttatgggtttaaacataacaataaaaacctttcccaagcaaatgcaatttcattcatgttttacatagggccagtttcgaaacataaccaatgacaacgattatgcgttctagcttgcttttagtgatagaaagtggtacttttagtgaatgcagtttagggaaatgtgttttcacacattacagccctgttccttctcaactacagactgaagtccccaatgatatgggctcatgatggaagtgaaattcaaatttaagaggacaaaatgtggccacttcgccacccacttataacatattttaattataaacccctgtaattcccgagagtgttctattttcagggagtgatttccagggtagttttagtatcatgctcaaataaaacaacacaaaacaaaaacactgcacgtaagaatccgacatgaccagaaaaaatttcttagtattccaattggatgtggtcttgtttgaaagacagaattgatctttcagggtcaaaggaggggaatagcgttattttaaaaattaatccacaatcaacacataaatacctgatccataagaaattaaaaactaaaaacaaatggaaaagcaaaaggcatgaacaaaagaaggaataagtccatccttactaaggctttatcatttagtccttcaaaatatgatctgtccaggaaaaaatatccatggcctcctttacctttaaagcaattgctacctttttctattcctccttatattagaagcctacaatttagcagtcttcaatgaccactcaagccaaacctatcagccaagggtgtttttggaggaattattagctggttataggtgagcacgttttggtttgtatccagctgatgcccccatgat

SEQ ID NO: 5632 - DNA, 2300 bp, Homo sapien
ccatgttggccaggctggtctcgaactcctgacctcaagtgatctgccctcctcggcctcccaaagtgctgggattacaggccagcttggtccgcacttttctcattggttgccttttatgtcagcatggctgtcagctaaatgggagaatgaatataactgataccatttatatatgaaggtcagcagtggaggggaaggaagttaaagggaataaacagcaggtatgaaatcatctcaccacctttaataactggtgtagtacccattttcttctcttcttcttctcccttttcgaggatggtgttgaaagtgttgaaagtggagcagtcagggtacttccttctcaaatcatcacacttctttcttctttaccacacttcctagccataatcttcaccatttaagaggaggggactcttcaaaccctttccatatcgaaatcttagaatgcaattgtgaaactgcacttgacttcccagatatttgaggaagcttcctggttcttgctttataatcatgatctaccacccttaccatccttccctgaaatttccctatctaaaacaacgacaacaaaacctgttacagatatttttgtaagtagccttaaattcttttaaaagtattattattttttttatagagacaaggtctatgttgcccaggctggtctcaaactcctaagctcaagcaatcctcccacctcagcctcccgaagtgctaggatggtaggctgagccaccgtgcccagccttaaattctcttttaagacaaggcaaaagtatgtgttaatcaagttagaattcaggtgaccatttgtctcagtttgcctaggacagtcccagtttatgcctattcccttgtgtaacttttaaaagagctcctccttttactcttaaaaaaaaaaaggtccagtttggaggataaattatatgctgaccctagtttaaaacacactttgattttctaacatagtgttttccaggtgatattatgcttttgcccacatcattgcattttatttacataactactctgcgaagcaggaagggaaatacttgatcgctattaaataaaggaggtaatcaaggcttcgaggggtacagtggtgactgaggtcacacactcagggccagaacctaggattcctgacttcaagtctaaaactgtttcagctgtggatcactatgtgcaaatgtctgagtaaaggcaaacttcactctcctttggtgatctgcttggcactggacttagaagtttagatacgttcatccttgcacagagactgttcttccacatataaagcaagcaaagagatggaagaagaattattagctaaacaaaaagaggctgttagtgaatcctgggccaaagaatatattttaccaggtctaattacatcagattacttgaatcttacatctggccaaattaggatatttccatttaagaaaagaaaaccaaagatcaataatgcatgcctactcttgcaaagaatgcaaagaacatataaatgggttctggtcagtcttatagatatattttcctataattacacactaattctttcttaaaaatatttcccaaaacagcaaaattctaccctccttggtaagcagcaaagggacaacacgggaaacaaaacaaaacaaaacaaaacaaaacaaaacataaaaaccctagaccatttaaagacaagcatggtgctttgtaaaatcttcggggtatcacagaggtgctgaatgcgtggttacatcaatgaaaaaacgcccactctttgagcctcctgaaaaggaggccacaggacccccgggcgccagggcttgggaacccagcgcccctccttgtctgtgccatgacagacaggttcagtgtgacttgccaaggatggctccaagcagctgggccatgtagcctgaacgcagcagagggttggacgccttagagccagctgtgggcaccacagcccgaccagggaggcagcgggtctccccaggttaagaggccagcggaggacgcgcgcggtctccttgggggagggtgcgggtgggccgggcgcgcatgcgcatgggcgccatcgcccgccggaagagcggcagcccaggcgctgctgctggcgccagacggcaccggccgctggtagagcgcgtgccgcgagatgcggcctcaggacagcaccggggtcgcggagctccaggagcccgggctgccgctaacggacgatgcacccccgggcgccactgaggagccggcggccgccgaggcagctggggcgccagaccgcggtaggtgctggc

SEQ ID NO: 5633 - DNA, 2300 bp, Homo sapien
acaaatgcctctttcagttatgctagtcatgctcatctccattgacaggattgaaatgatttagtaagaaactgaggtttgtctgagtggagccagtcctcaccctcgttaacaaatcatcaaatgcagcgaggccttctaatgtctgtcccttcccagttggaaagcatgagccttaagtgtttataggcaagaaaatacatgtgtatgtgttttaaggggaaaggtcactagggccaagggggtgcaattacatttttaaagagttaaaatatttaatgttaagttaaaatattcctggggaaaaattagcaagtttatgttggagaagatacttgaaacagagcagggagatgttttctgtccttgatcttctcggtctgttctgtttgagggtggagtttctatgtaggggttgagtttcttttaagaaaaactgttttatttggaactgaattctgaaatttcagaggccagaccctaaggctgaccacagccaaggcatgtattttgtggtgcttcacttggaagtcttctaaagcttccttctcgtgggctgcgtgtgtgcagtttatttctgcagtatacaagcacatggatacagaacagaatgaggattctggcatcttaagggaaggactactgctagttccaaagcagtatcttcagctgtgcacctagaacaggaagaggtagagaagggtgcctttgaccacaaggccaggctgtagaatgccccagaaagcctgtgcatcagcatactttggtcccagtttgcaaagtcatctcactaacctgaggatgtgtaaatgtgttacctggtgtttacatttatcagagaagggcattttaaaaaacattacacaatactgttttatagctatcacattataaagtcctagattggaatgataatacgagttttcctacaagttgctcatatccactcacccttcagttccactgtgctcttaatcaatgagggccacttgtgtttccttcttaccctcaaccctgtttttgtgttaatttcaaaaaagaatatatcccgcagtgtgtgacctttgttttagggcattctctgcccaccctgctgcttttgctctctgaatgacagaggagtaagactgaaagcaggttctactcctgtgtaggaaactaagacatagtaagtggctaaacaagtttaaagctcacacagattgtcattaatgactgaatacttgatgccctggagaaagcactggtttcctcgttcagatcgagccaagagtagggattagatggcagttctgtacaaagcacttgggatccaaagggctagataacccacaccctccccttgaggagtttgtgctctgaatgggaagataagtcgtgaaagcatgaaaagttaaatatagatttgattaacagttcaaaataacaaaatggagaaccttcccagattatgctgttgccgatagtgttagactcttgagtctttccctgaagttctctcatctttcattcactgaatatttatccagtgtcttccatgtgccaggcatgtacaagacagcaagatcccagccctggaagagctcacagacttgtgggaggaagtcaaataatcaacagataactgtataacccaattataacccattttccagaaaagaacactttcttcataaagccaatttcgccagtgaggtgtggcgtaagatatcacttggaaggattttttacttgccatcttgacaagtgtttcttaaagatttctctcaccatcttggcaagcgttctacttcttgacttgtaagtgaggatgattcttcagtgagccataggaaatccatttgatagggcgaaacggcattttaaaaatgcaggtttaaattgttatcctcatctatggttcttcataattgatggggaaaatggtacaggcccagagaaatgatatgcttaggaggtaataaagcctgttgacctttgacactgttccatttttctcagtttctaagtgaaaatgataacacatacacttggaagcaaggactaaccagaatttaatctttttcagaagccaagaagaaagcaccctgtcctggacttggcttgttttacacattattgtctgccttccttttctcagtgggctctttatttgttaaaaaagtgcaagacgtccatgctgtagagattagtgcgtttcgatgtgtgttccaaatgctagttgttatcccttgcttaatatacagaaagtaagtattttttaactgcaaagtagaagatattaataaatgtgtgtatat

SEQ ID NO: 5634 - DNA, 2300 bp, Homo sapien
tgtaaaaaaggcaccttgtgtgcaactgttggcgaggttggggagtgaattaaaatctccagaaagtctgggcagtgctgttcagaggagcaatgaacactctggaagtactgttagctcagacattccaatgtggtgaggcagcctcggggacacgacttccctccaatctcgtttagagagggagccatggggcgagcaaaggacactgatctggacctgctctctttgcaaagatttgaggaaggcgcccctttctagggatggggccacagtgattatcacacttggataactttcctgctcaacggacctagatttgccttgcttactaatcatgcaatgactcatttggaggattcaatgttaactgcttgtgcatctaccagtttgtagctatctattcccatgtgccaaattaaaaaaaaaaagtctttgggggtgccaggtgatggatgaagtttgatattatttgatcattaaatgaattataaaaccataatataatactgtatattaaataaatagcctaccttgtttattgtcagtgatgctacctctttcctcagccctttatttacttgttcaggataacatagcctcagggattgagtaaattaccacttctcactgtcctagtgctaaaatgccaagatcttaaggaacaaagaatttctttagagccctctgcagagacctttctgaaatcagctctccagggaggcaatcatgttagttttcattaaagtcctagtggtgagaaaacagcaagacagtttaaggaccagactggcagatttttcttaacagcaggattctttgggcctcctgtgctttcttgctccaacctctcctgtgttctggagcctccaagaaggagagatcacttttaagagggacccgaaagaaagggtcaaacatgagcaggaggaaagtgtgtgggaggagatgctccaggtagaaggctcagcttaagttcaggtacagagctagagtgggagagacattctgttgggtgatccttattagccagggcatgctgggttacacagccatggagagttagtttggagggcaatagggagccagtgaagttttctgcatagattaaagttgtaaaaaaggaagaataatacagcggtggtttgaaggattgatttggtccaagggagaggacagtgggaggcgatatgggccacaggaatgggtcctgatcggatgtaggagaagaggtcaggcctagggaacggtcttccattagaacaggtagagggaggaggcacaggtttaggcgaaagggaggaggatgatgatttgatttttttttccaggtccttggctctcctaagactcataaaagccgctccagcggctaaggaagttctgtgcaaagcctgtagtttctagttgtgaagatcttcaggtttgcttgagcaatgaaagagtactggatttggagtccgcagtcctggatggccaccattaccagcaaaaggagtatttccggagcctggcacaacgctgggcacattgatggggctcaatgaatatgtattaaatgaacgagtgacagaacagattcgagacttggtgctgccatctactacagagaccttgatcgtgtcctttatctgccgtgaacctcagtttccatatctgtcaaccaggggtggttccctggggtagtgtgagagtaaattcccgccgcctgaggtgtgcagagttcccgcccttcccggagccgggcgccccaggagcgctctctctggctcccgccagaaaggatggctcctaggggtcagggccaggggtctgggaaggggtcgcgccgccagcagccagctccgggggaggcggccgggtcctcgctccgcgcccgccttccccgcgcggcaggagccgggggcgggcccggcacaggccgctcccccgcccggccgcccgcggtggcgctagcggcctctcacccggggcgggcgagttctgggaaagcccggcccagggcgggggccccgctgccgcccgcgcagccgccgctgtccgggcagcgcgcacatctcggcgggagcggactgtgaacggcgcgggtccacacggtaacgctgggcaacgtgggcaacgcggcgggcggcgggctcgcgcggcgggaggggcagcggcggcgcgcccgggctctacctcccgggctctgcctcccgggctctgcctctcgggcacttgcctggctcctgcgcgttcctgggcatcggctctgcagctgacacacagtagcggggacacccgacgccgctagcgacagg

SEQ ID NO: 5635 - DNA, 2300 bp, Homo sapien
gctaagatgggaggatcgcttgagcccagaaattcaagaccagactgggcaacatggtgaatccctgtctttacaaaaaatacaaaaattagccaagcgcagtgctatagtctcagctacttgggaggctgaggtgggaggatcacttgaacccaggctggttttaaaatatgtccacaaattctttgatatttctcctttcaaaaggtggaccctaattcccctccccttgaatgtgggttatacttagtaattccttctaacatatagaatatgatagaaggaacagtatgtgactgctgaatccaggaggcagaggttgcagcaagcagtgattgtgccattgcacttcagcctggtaacagaatgggactctgtctcaaaattatgatgatgatgatgatatttataattataataacaacaataattacaaagtccttagaacaggacctaagcatcaccaaaaatgttttccccttctcctcctttgaattgcttacctcatgggtaagaaaggacatattagctgtcaatctgaaggctttggcctgaaaaatctctttaaaaaatagagcagatatttgaattcaagttagtgccatatgccactaaaattatctatataatcttgacctgaaaagttgttcatggtgtgctttgaatttttaaaagcaggtacagaacagaatgaccaacattatctggtatttgcatagttatacacatatatctctatgtatgttgatgcatagggagtgttctggaaggaggtttctgaaagtattgataatagttattgctgtgtgataggatttgttaggatgttgagctaggacactgctgctctgtgtgggctggtttattccctgcaaagaatatgatttctagggtttccagtgatttttcagagtagttgtagagacatgaatatactgggagcctctcacccttgaggctgtgtttgtgcttgagggaacacatatagaagggattaaggggtagttgatgactctttgggaaaagagggtacgggagaagcaaggggaagaaagacatctatttgtcaaagagcaaaggcaaggcaaagctggtgttggcagcagagcgtgactgctgattagttttctcgggagcaactgcttctcctggaagggaatgatatgctcatcatgggcaccttctagtcctatagtgccttgtatatcctttataattgtgtttccacattggatagaaatttttttgattccctctctctactaacagagttacaagcagtgcaggcttgttagtgataagttatttcagctttatatgcctggaaaagtttttacttaatttttatttgcagaagacatttttgctgggtatagaatttgaagttgacagtagtttttctttcagtactttaaagatttgtccactctcttctggattgcattgtttctgattaaaagtctgctgtcattcttatctttgtgcctctttgcttaatgtgccttatttctctagcttccttggcctccctgaagtcttaactatttctcttctactcaggtaaattgttggattttatctgagtttcccttccttgccttgttgcctggaaactttctaagcagtaagctagggcatttatagggctcacttcttttttttttcttctttcagacatcaatgtctgtgttgctcgttgttcaatatctgaaaaccactgggtttttttctgattttctttttagttatttaaggtggatgaataaatcttgcccttgttactccattttggctggaagcagaagttctgaaacattaaataaaaaaaaaatactaaaaacataaaaaccaacttctgattgcaaaaaaaaaccttttttctcaaaattgtctgtatcttaggattgtgagatcatttttttaaaaactcactgagtgccacagtgtttgacattatctcttttcttacaggaaacaggaatcattcaaactggattttaaaatcattgcaaatcagtgatggatcagaagttgcagagtgcaatcccgagtaaaagtcttcaaaaaattttgcttcaggtaacagaggaaggaaaattgatctaccaccttaaaaccctgatctagaaaaaatatatattcatgataggaagttataactaagaaaatttatttgcctcttaatgctcctgaatgaaaggaattatccctttgttctttgggaggacttgtgtatctgagattgttgtaataatcagtcattttattaaaaccttgacatgatcaccagggaggaaaaa

SEQ ID NO: 5636 - DNA, 2300 bp, Homo sapien
gtttggatgcataaattctgattaaaaaaaaataactcacccagaagtcacattatttaaaatcatttgctggccaaacacagtggctcatgcctgtaatcccagccctttgggaggccaaggcatgaggattacttgagcccaggagttcgagaccagcctgggaaacatagtgagaccctgttgctataaagttttttaaaaaattagccaggtgtggtggcttgcacctgtggtcctagctactcaggaggctgaggtgggaaaatcacttgagcctgggagatcgaggctgcagtgagctgtgatcacgccactgcactccagcttggatgacagagcgagaccctgtctcaaaaaaaaaaaaaaaaaaaaagaaaaatcatttatcatagaaaatgtattctgcaaggaaccctagagcccatctaagtccaacctcctaattttctttttcttttgtagagagagggtcttgctctgacatccaggctggagtgcagtggtgtgatcacagctgtaacctcaaactcctgggctcaagttatcctcctacctcagcctgtcaagtagcggagactacaggcgcacaccaccatgcccagctaattttaatgtttgtagaggtggtgggggaggggtcttaccatgttgcccaggaaggccttgaactcctgacctcaagccatcctcccacttcgtcctcccaaagtgttgggattacaggcatgagccaccatgcctgtccccaacctcctaatattaatgagattcaaaaagggaagtggactgactaaagtcattggttcatgacagaactgggccaggccagagctcttttcatgtgacgtttgatacttacccctacatttggaggtgccaccttccttgcaagggccttgcatttaggccaggagctcggatactggcacttctggacaatggtagccaagaatttaggatatgcacttggggagccacagcacatgctttgcacacccttttgcagcaacactttgtccctctgcagggtgttgagcatgctgctgtggttgtgtagctcacaaagctggcataagcaatacaaactggtggttaggaagcatgctgacaaacctggtaccattacctaatagcttaccactacttgatctctctgagcttcaccttcttcacctgtagcataggaacaataatggaatccaccctatagggttgttgtgaaggttaaatgagataatgcatgaaagtgcttacacattgcctggcacaggataaacacttcttaaaatttactattatgatcagtaatacatccaaaccaaatattctgcctctggcatctccactagtctcaagctaacctctaatctgcaatgaagccttaccaggtctctcttccaagcaggtgctgttgacagacttttacccctcccttcacaaacatgacctctcacatctcctgtttcaccccaaccatggaccacaagatcctaaagtaatcaatagcagttgcccatcaataatagggctaggaactcctgggttttcttgttcatcatcagttataggaagaaaaattggccactggcttaaacaaatactgtctttcttaggagttgtctttactttgaaggcacttagacccttgggaggctctgctattctgcagcatggcaggtgcccacatacctggatggctgccttctattattattcccttgatactgggttctttgcacatgtatacactttgggttctatttgctacccttttttttaaacttgactaaaacagtgagtaattgggaagttctgaatttctatttggaaaacaaattgatgagatcagaaaaatccaagtaatcctaaatttacagaagccagattactaaaacgcaaggacatttttttgtaatgtagaaaagttatgtttcacagaggtttttgcaatgccctgactctggatcgcagccctccctcgattctgggtattacatcatttcatttcagctaatgtaaacactcatcaccctgcacgttgcaggatttttcactgtgatttgagattgggcttcattcagtgggtcgtggtgattaatggtttcagaaggaagtgcagcaggaagagactttgcaggaatggaagaggtgaggcagctccacgtgagattctgcaaagggattaagatttggcaccaggcttggtttctgtgcagcctcttaggcagagagccccaggagagggaagcaggctgtcagctgtggctttgcacgctctcagctgtcttgaaggttgg

SEQ ID NO: 5637 - DNA, 2300 bp, Homo sapien
tcccacaactagctgaggttgagaaacactgttctagagaaatcaaaagcactttctgcagcactacaaaccaaatcaagctgaaaattaccaacagagaaggatgatgcttctgttttcagtaaaacacccttttcccattccaattttcaaaattcttgcttattacagaaaaactggaaaataaagaaaagcaaaagatcacctgtgataccactaccactgtgtagttttccatagttgtgatgtcatattacacaacatttataatctgcttttctacataatgtattaaccaagtttttctccatattactataaagttctttagacctcactttcaattctatgtgagattcctcctcatgatttcacaacagtgtaagtaaccattctcttattactattaatttgtttctgggttttcactattgtaaagctgttgtgatacacatatttgtgcataaaactttttctgcacatgaggttatttccttgacaacccttagaaaaggtctatccttggccaggcacggtggctcacagctgtaatcccagcactttgggaggccgaggcaggcggatcacgaggtcaggagatcgagaccatcctggctaacacggtgaaacctcgtctctactaaaaatacaaaaaattagctgggcgtggtggcaggtgcctgtagtcccagctagtcgggaggctgaggcaggagaatggcatgaacccaggaggtggaccttgcagtgagcagagatcgcaccactgcactccagcctgggtgacagagcgagactccatctcaaaaaaaaaaaaaaaaaaaaaagaaaaaagaaaaaaaggaaagggtctatcctcctgatatcaatttgaaaggcaaacgtgatttgccaaaggattctaacatcaaagcccatgtgaaatgttcctctgaaccccatctctgcactggtctaaaaacatacaacaaatctgcaacttcaagagtctttgtctgaggaacatcaaaggagccaggaaaaaaaaaaaaaacatcccagagctttctgaatagagaacattgcagtggatcatgagaacaagaataaaagttcttgtgatttttggcacagagagacaaaactgctatgtctttaatatggtagaatttgctggttgcagaggcaaaatattttatgtagaatacctttcttataagcctaatgccattttccatttattaaggaagtttagctttattgtatttaattttattttttggccatattttctcctttgagacagagtctcgctctgtcacccaggctggagtacagtggcacaatcttggctcactgcaacctctgcctcccaggttcaagcgattctcctgcctcagcctcccaagtagctggaactataggaacgtgccaccatgcatggcgaatttttgtatttttagtaaagatgaagtttcactatgttggccaggctggtctcgaactcctaacctcaagtgggtcacattttctttttatctcaggtatttatttagattttggggaatgcaataaatttgataaacatcttaacagctatttattgagataagtccagaacattttgaaacaaaaataggtcaaaaataatatttttttcattaacatctagatagtattcttatgttttagcagctgactacagtataactgcaaagcagaagttaaactcttaccttcatcctgctcccagattcacagggaaacctacaagtctgtataaatcaaagcaaaggccaatatatctagatacaaaaactcaaaagatggcaggaaatggtaaaaagaagttgggaatcagaggacctgggtttctgcttgtctatatcaactagcaagcctgcaccttaggacaagtcattgatatttctacatttcaattgcagaaaaggaagtctatcaaatatgaaacgacatatgtgaagtgctcttaagagacaaagttcttttttaaatgcagtaacatacaaagagggctgttactgggtatcactgtgtatgatgtattgtgctttgtgatgtcactgcaggtataatcaaggacagaaaatcagtattgatggggcaagccatgggactggaaggcagcaggcagatgtcagggttggggattactggctcagaagcaggtatcatagcagaagcccaagtctcttccaagtcacagggctaggaaccaagatatcagcaggggaagcagggggtggagggggtataaaaatgacccaactacaaccaccaatactaccatttactgaggc

SEQ ID NO: 5638 - DNA, 2300 bp, Homo sapien
ttatgcattcacagcaaagatgtttaatcgtggcttaatttgggtcttaatggaagtgattttatcctgattggcttgctgtaaatgtttagccagttcattaaggactcagtggccttattttctctgggctgtggcatcagcattttcacctccattgatgtctacccagatagagagcacttgcctggctctctaatttgaagacgtgccctttcaaggggccaaagttgctaggaaaatggccatatggttttgctatcaaattttactttcctttaatatccagctctggtaaacactctttctaccttaatctgttcccttccttccccactctggattaattgtggcctttggcaaaaatgccatgtttgttttagaccatttgcccttctgctttagtcctgagtgtaaacactgcctgatatgtagaactacatgctgggtttagttcgaggctttatctccaggtgctcacctggggtggattcgctcattgatcacacaggtccttttgcaaggctgtcgaagtgtagaattggactgctgggacggagacgatgggatgcccatcatttatcatggacatacgctgacaaccaagatccccttcaaggtaatccttcataactttctttaaatcaaatcacaaagagacattatcttcatttgtctttttttttttttttttttttttttgagacgggttctcgctctgttatccaggctggagtagagtggtaccatcttggctcactgcaacctctgcctccgaggttcaagagattctcctacatcagcctcccaagtagctaggattacaagcccataccatcaagcccagccaatttttgtatttccagtagagatggggtttcaccacgttggccaggctggtctcaaactcctgacctcaagtgctccgcccgcccctcagcctcccaaagtaccgggattacagacgtgagccaccgtgcctggccttcattctttatttaaatcagtgacttgaccaaattacaccttagatcaagggtctttatgctgggtctaaatgaagacttcccaaaagtgtttgctgtatcatgtggaatgtgcacatgttcatttttctggagttaatctagaactctcattagattccccattcaacccaagttagtaaccattaccttacattagttagcatgtaataatattgttgcaatttttacgtaatatgatatataaaggcaaggtctattttcctgctataggaattaatggtcatttgtcctagtgtcatgctgacaaaggccaatgtcaggagttaggagatggttaaatagttagcattataatgtaatgagcatcagttccacctaagaagattggtcacccaggaagactgatctcactggatttgtgtttcaaattctgggtagcttattagttgagttatgcaattactaccttcattcagagggtcttaggctatataacataatttttctctgaactgtggccaggttgtgaaggaatattatttttattttacatgtagaaatagtggctaaaatgcattttctcctcaacttggtttcctatttagcattcctaaaactcctgtatgctatattggcatgggcatgagttgataactgtgtttacatatacacataaatatatgtgacatatgtcttattgcctcaaataaattataaactctttataagcaagaaagtattttatgcttaattatgtttgctgctataactaggacagtgtcttttacctgcaatatactctatatatgtatacagagagagtatatgtatataaatagatttgttaaattcaatatgatagttgttccttatagtatgtgaacaatactcactataaagtttaatgtctttctacaaaatggccttatcctcatgcttcatttgaaaatacgaaaaccatctttggccagagtctgctgcatgtaacaattgagatgctttctgtggctataactaccctgccttctgaccaccttgacagatatctggactctaatgagctgttttggctctcataggaagtggttgaagccattgatcgcagtgccttcatcaactctgacctgccaatcatcatatcgattgagaaccactgttcattgcctcagcaacgaaaaatggcagaaattttcaaggtgagctctcaacaaaaaggcaggatggtatgttggcccttgttttgcaattgtcattgggttgttttgttttgttttgttttttgagacagagtctcgctctctcacccaggct

SEQ ID NO: 5639 - DNA, 2300 bp, Homo sapien
ccctgctcctaacggtcaggaaggtaaatgccatttgaacggggcattttaactgcatggatgtcagcattctgtttccaatttcttgggcccggttagcatgacgttgtgatacttctgtgaatacaaatgtaatgaaatgatttatctcatttacttcttgtcagcctgcatggccctgatttggtataaggtccttttggtctaatcgtttgtgctctgatgatgcgatactaaatcttgagtgagaaattagctttcttgtttttcattttaaaaggtcatcatcacgatacacttctaatacctttagagtcattccaaatagaaaagcaaaaaaagagcaaaatataagattatatcttatgatataatattcagatatattttattttctgttatgattatcacttagtaaattaataacaatcatgaaaactttactttttaattataattgtgaagactttgcattgcacccaataataagtctttccccctaggttttggcatttctcaaggtaaaagaagtaaatagcttcatttcaaagtgagagtgagtcaatcatgtatgtaccttctagaagtgcttcagccactaaatccttcccaaacgtgtgtgctgtcagcttcttgacacggggtatcttccataatatttgcacagttccaatcatctgtatgaaaattggcatcttcatttagattatgtctatatgccagattattttgaatcatttaaattatgtatataagtgacaaaaactactggtaaataaatcaattaaattgaaaataactgcatcaacccaatttttacagttatgcttcaagccatcattttgttaacatactatatagttagagcctcattcttatagataagtacaagtatctggatgtcctcacagtgatgcacatgtagctcttaagtgaagcattgggttcgttttcactgaagtctgctaacttattttcagacaacattctggaagacagacctgaaaataaatcatgtaatgacaagcttcagtttgaatataatgaagaaatcccaaagaggataaagaaagcagataactctgcttgcaacaaaggaaaggtgggtgaacggtttctgttaaatgacactttgaccatgtggtactcttgtcagtttcagatgagattccacttgctccctgtccctccctttcacctttcccctcactttcccttagatacctgccaaagttcacttggtgatattaaaagacacccaccttccatttgtggaaagttagtcactgattcatccagccaatacctactaatggtgtatgtgtggcaggtactgaagtggcacagaggtggtttagtgatgaaggcagacatgtcaactgtgttgaatgtaagtgcatagaacagtgattatactgtgttatcagagaatcaaggacaggctctcagggaagatgaggtttcagaaggaagatttggctaaacagacaaaaacagaacattcgggccaagagggcagcctggtatgtccagggaattgcaagaagttttaaaggcatttgggatgaccaagaagataaacgggccagatagcagaggaatgacactgagaataggaagataaatgagatacccagaccctatcctcaagtgcctcacagtttatagactctgagcaaatctttagacgcagttgcagtgacattgttggacaatggaattgtaagatatgtcaaaaatttgagccacggaagatacatagtcaatcctctatttatttaacaaagatttattgaccattccacatgtaagacagtggaccatgcactgagggaagatggaggatgaattagactcacctcctgccctcagaaagcttttactctaggaaagctgttgggacatgtatatggataattaccatgcaaggggaaatacagtaataacaccagaggaggacagataaaagagctttgggaatccagaggtgagtagcatataccttccatgtaaaatggtatcatttttcccttaccaggtttatgatatggaactgggagaagaattttatcttgatcagaataaaaaggaaagcagacagattgcaccagagctttctgaccttgtaatctattgtcaagcagtaaaatttccaggtaagattaggcaatatcatctataacttttaaagatatcaaaggttaaaaatatgccatttatttaattgggcattgtgaacactctcaaaataactaaattgtgttgctgaaatcattgttataatacctcctaaatatctt

SEQ ID NO: 5640 - DNA, 2300 bp, Homo sapien
accgagggtaattaagtttcagtgaacagggctacctctcagtggtgtgttggttgacattctcccgagagttctgttccaagccctctcatttcttgaaatgcatccctttgccctccaaggtgttccaacctgcagcactactgtgggtctgagtaacccagaacagccatgggggatggccaaggctctctgtgggggaggcaactctcagtgccagggacctacacccagctagcccaaagctgtccaaggcagcagggttctacttttgtcattcaaatggcttgttagcaaaccactgtttgatgaacaaagcttgtctctcagtgctgagaaaatgacagtgtgtgtccagggaatggactgacacttgcaaggctctccccatgtggctccttcagtgtaggaataaaaatgagccctggaagtcacagaatcttccggacgagcctcaccatggaatccctgggcacctgctctgtggactgtgtggtggatccaaaggagaatgaggcaaaatccccctcagaatcagacttccagatcatctggctctacctgctcctgaattgcctgccttagaaacccagggaccaggacctcccagtgccttccaaatgtaaatccctggtagagaggcctgagactgggtatgttaatcaagtggcctgggtgattctggagatttcagcaagtgtagtaaacaaggattctagtcaactccacttttgagtgagaaaggctcagagagatttgccttggccaaatcacaaagcatggtagccaagagcccaggtctctgacccacgatcttatctgatgatcttgtcaccactgaataatttttgtcttacagggttgtaatcttttaagctatgggtatgtcaaggcatacagagcagcgtaatggacattggagactcagaatgagagtgggagggaggtgagggatgaaaaactacctggtgggtatgacttacacgacttgggtgacaggtgcgctaaaatcccagacttcatcactatacaattcatccatgtaaccaaaaactacttgtaccactaaagctgtcaaaataaaaaaattcaaaataaaagaacaaggttgcactcctaactgtggaacaactgggtatctaggaggtacccaaacatatgcctataaatgaaggagctccagaaaggagatgtcacaatgagttgaagagtctcagatactttccaaggaccccgtccttggaatttggaatggggccaaggggagaaggaaggccaggcaaggttgagaacactctgagcaatggcctggcactagaaagacggcagtgtatgtaggtgcctgaggagagtgggggatgcaggggagcttgtgggaagatattggaaactaggttgatggggtcataaaataaaaataccatatccttttttttttctattagaaggagaaaaaaacccaggacaatagaagtactaaatgcaaccgagaaataaaccctaagagaaagcaggtcgaaaaaattcaactacttccatagtgtggtgcaaagagcccacccctgggagctgacaggaattctggctcttgccctgccactgacctagcttctgatggtggggaagttccttcctttctgtgggcctcataccacatgattgttgagtgcctcattgcaatgaagggttttttttttttttttgcatatggcttgtaagaagggacttgggatgatgaaaggtgacatacactgaaattgataatgtagcaaaattaaaataaacggcatagcaaaatgaacagtttatagtattttcctcatgtgcatcaaacaaatgattgtaaaaagaaatatttagaaggtattataacaatcattctggcaatccaatttagctattttgagacaggaaataaaatcagggaaaaaatgtaagaaatttcatttttctaaagagaaaatacactatacctatgaagaaatgtatgctatgtgaacacttttaaaaaacaacatacttggaatttttaaaataagccgaacaaccacatgcttagaagctctatcacatgacctcctgatcttccacgattctctactggtacagagactttatctttcacacagacttcaaatatctttgggaatttgtgctccttatttactgagtgcttgagaagaaaagacaaagccagtggaatggtccgagtgtggcatccgctgcatttataaagaataagagctgcagtgggtgtgattcttggacagagtggcgctcatccttgttcctgcaatgaa

SEQ ID NO: 5641 - DNA, 2300 bp, Homo sapien
ttactatttaatctttgttagtcaggtaggtgaaaagtttatatatatataaactttttttacctgcttattatttgtcagtttttctcttaaagtaattgtcttaatgacttgtgatgagtttttagtacatattcattttaataaataactgctatgtgccaggcactttttttaggtcctgggaataaaatagtaacaaaagaaacgaaactatctgtttgtggagcttgcattacataaagaatattaactctttgttacataggttgcagattgttctcttttttactttgccttttaattctgtgttcagccttatatatgaagctatattttttgttatgcacatagtctcctcaatcccaatttacggagtctctccgagatttttaattttaatttttatatttaaatatttaaaccatttgacatctttgtatgtgtggtatgagtacagatttaatatctgtgtttaatatatgtaatgaatatatattttatatagtttaatatatattgaatatttatattatgtatatatttgatataatctgacagccagttatttcatcaccattttttttctgctgatataaaatgctgcttaattattgtgttatatctatagtatatttgggtatgtggtacaataataatcagaaagggtataattgataaaagacatgactattcttttttctccacaatattcttatttatttcagtatattactccaggcagtttagaatccatttttcacttccttccctcaaaatagtccacacagagaatctgattagaatcgattcaatgtattgattagtttggatgaattaaaatatttacagaattgatttttttctattcaagaatatcatatcttgccatttatttaagacttcttttatgttcttaagtaaaattttatagttttcttcactgaggtcttagatattttaatttgtctttagtaatacagttttgggtgttaagctgttctaccattttatttctggatttcacagttttcctttggcatcagattcctttttattttcttaaatctgatttcagttgaattgctaaaattataaacattaaatgaaagtaacagagcatatttagcatctttacttagaattgtagagcaatcagataaggcttgaacatgaaactcagccataggaaaaccctttaactttcgtgatgctagagtaaaaactacatcatttgatttggagttatttttcgttggtaggtgatattttgagcacatacagtacctacaaaatattcagagttggtctttctgatacctagaatgacttcaggttcactctttatgcctttagttattccttgtttcattctgtgcttttagccgtgtaatcccaaatactcagctttcttccaaatgtgcatattggaacatcaaaataatacaaacctgtagttctcaaggttttttccaggaatgctgctgtgcctgcgggaggtcggtagggtgatttcatccagagaaagtgtagcattttaaaccccttttgttcttagtgtttgagtatgcgaagtttgctgtatcacacaaaacaccagtttccaaattagtttctgaatttttgaatggcataaagcaataatttttatttttgtccccagaccagcatcagctgggaattagaatgcaaattctggggctcaactcagacctactaaatcagaaactctggggatagggcccagcaatttgtgtatcttctcccatactggtccaaaccttttcctggcctgttttctctttgtcatcctgttggcatgtgttctctcttccttatactcattaaactgcaaagaaagttttgtatatttagttagtatttgctagcgtccgttttgtatgtttgctcccgtccttccatagacacaagttattaatatagcatacagataaaagaagttggtgtaaaatgttataaaagatgtttgaaggttttttcatgaacgagggaaataacactgttaaatgcttttctatgtaaagtttttgagggcaatataaatattaagctgtatatttgtgttttttttccaatattagatgttaaaaacatttttatgcctaagaatcaaggaagtagaagtgaaaaaagatacagaagacattaataaaccaaaaaaatttatgactttcaaagaaaagagaaaatctctatcaagaatgcagagaaaggtttgacttatttccccttttgtttcatttaaattttctgtttatttgatcttagattaaacttat

SEQ ID NO: 5642 - DNA, 2300 bp, Homo sapien
ccagaagttaagagaatttgaagaaggcctggttagccaatacaagttttatttggaaaatctggaacaaatggttaaaggtatattaaacatatcttcaaagtttgtaacatacttagccttgatcatgaaggtgaattctgtacagtgttctgtgttgtgtagtgagaggcaggtatggtcaggaacagaatctagagtcagacttccaggggtcaaatcctggctccaccacttactacctatgtgatgggaaaattacatagtctttctgtgtctcagttttcctgtctaaaaaatggaaataattatagtacttaccttccaggattattgtaagaagtaactgagtttgtagatatgaggtgctttaaacagtgcctagcatgtactatacactatattttatcaattattagtattattgctgcagtttttagtaagtagttgtatttttgttgactacaatgcatttaacaaaatacattgttatgaacagttgggatttattctgctgttttttatttggaggcatggtagtcagggaagaaggataactagaggccaggcgtggtgggtcacacctgtaaccccagtgcttttggaggccgaggcaagaggattgctcgaagctaggagtttgagaccagcctggggaatgtagtgagactcctgtctctaaaaaaaaaaaaaaaaaattaggcatgatggcccatgcctatagagccccagctactggagatctgagctgagaggatcacttgagtccagaagtttgagcctgcggtgagctatgattatgccactgcactgtagtctgggcgatagagtgagaccctgtctcaaaagaaatgaataaataaatagaaggataactagaaatggatatttgcatgtcttgaaaatggatttatgagtcaattatttgggatgataaactcttaaactcttcagaaaaggaaggacatagaaaaaataggggtaggaatagggaagacagttgttgcctaggccaggtgttttcatttggcctaattggctcatttacccagcttatttactaagatcacccattgctgtcagctggaacaggaccactgaatcctgttggcctaataagggcataaaggtagtggagtatagtggggtgggggtgggtagtatggatattgcttctatgttctggtgttccagctggcaccctattagtgtttgttcttccagtgagagggcctgggagtttttcttttgtttttgaatttctgaactgtttggaaagctcctgggatctttgtgcaaccatctctgtctgatagaactataacatgagccacatatgtcatttaaaaaaaatgcagacacactaaaaagcaatgaaattaattttaatagtatattatatatattcagattatcatttcaacatgtaataaattttaaaaattaatgtcttacattctcagttttttttagtactaagttcaaatctggtttgtattttatacttagagtgtattttatacttagagtatatcttaatttgtattagctgcatttcaaatgctcaattgactcctatatgtggcagttagtagcctccatattggacctttcctgagcagatcgaaccattatgaagtctttttttcttcttcttttttttttttttttttgagacgatgtcttgctctgtcgccaggctggaatgcagtggtgcagtcacagctcactgcaacctctgcctcccaggttcaagtgattcccctgcctcagcctcctgaatagctgggactacaggcgtgtgccacccaccatgcctggctaatttttttttttttatgttagtagagatggggtttcaccatgttggtcaagatggtctcaatctcctgagctcgtgatctgcccaccttggcctcccaaagtgctgggattacaggtgtgagccactgtgcccagcatatgaagtctttttttaaggggtgtgggaatgtgtgtgtgtgtgtttatgtgtgttaaaatgtacattgattgtaaaagaaagccaattagtttaacttttgaccaatgagtaaagtaactacagttatcttttgattagattggaagcagaggaagctgaagaaaagtaatgtagtttccttaaaggcatacaaaggactggcagaagtcgctgtgaagagcttgtgtgagctgttggtggcactacctcattttaactttcacaacaacatcatcgtattgattgtccctctcatgaatgacatgtcaaaattggtgagttgctgtaaatggttatt

SEQ ID NO: 5643 - DNA, 2300 bp, Homo sapien
aggattgggctatgacaatagagaagagaaagtggagacgctaaaagaatacttttttctggaagtagggacaagtaggaaaagaggcacataaaagagcaattaaagggagataagtttattagaacaaatcttaaaaatggaagagatttgaatatgtttataagctgaggggaaggatctattagagagggaaagaacacaggaaagaagggataattaatgatacaagaatctgatgaagctgggaggagttggttttgaactggaatggggatgcctcatccttggagagactggaaggaaggctaaaaggatgggagtgactgtagatatgttgatatgcttgggagggaattcaggcacttgggaagagcacaggctgatgttttccacttgtttgatgaagtaatactccagcgggacaggctctgctgtttctgacactgtgtggaaggagacagagcaaggaagaagttggaagggaggttgaaagaagagtgccagatggacctcttggtctttgtggtgggatcaggaaattggtacttttttccctcagtctctctaagagcaacactattcaaggggctcagaaccctttgagccgcactactgggttttcccacctgctcaggactgcgaggccagactctgtgtcagggccatgctcaaaaatcatagactcaaaaaaacccacaaaaaacttgaagtggaatgcttaaatttattgagaaaaaaaagtctttgagagacaagcactttgatactcttattcttgcaatccataaaacttcctgtaaaaatgaacgactttaggcggggcgcggtggctcatgcctgttatcccagcactttgggaggccaaggtgggcgaatcacgaggtcaggagatcgagaccatcctggctaacacggtgaaaccccgtctctactaaaaatacaaaaaaaattagctgggcgtggtggcgggcgcctgtagttccagttactcgggaggctgaggcaggagaatggcgtgaacccagaaggcagagcttgcaatgagcccagattgcgccactgcactccagcctgggcgccagagcaagactccgtctcaaaaaacaaaaacaaaaaacgactttggtgaaattactaagcagacagaatttacccaaagttgtaagatactgaaatgcagatacagttttttatttttatttttattttttagacagtcttgctctgtcacccaggctggagtgcagtggtgtgatctcgactcactgcaacctctgcctcctgggttcaagcgattctcctgcctcagcctcccgagtagctaggattacaggcgcacgccaccatgtctggctgatttttgtatttttagtagagacagggtttcaccatgttggccaggctggtctcgaactcctggaactcaggtgatccacccgcctctgcctccctaagtgctgggattacaagcgtgaaccaccgcacccagccatggatacagttctttatcagctaatggttaaaaattaaagcaaaaaaaaaatgcaaaataaaacactaagaatcacagacttttaagtgaccaaggctgatgagaaatcattcgccatgctacaaacacggccagaatgtccgtcgaggggcaggcattacacacaaaaaataagcttctttctgccctcaggactgtatggaggaaaaagactacgaaaatcagtatctataacagcatgagataagcaacgtgaggagaggcacaaaatgcaatgaggtgaccgaaaaaaccaagtcctctcattctgagaggaggagcccgatttccccaaggttttaaaagaaataaatagggcgagagtcaaagaatcatactcagataaccttgcaaaatgcgcccctcccgcccggcttcccgcctttggcaccgacgccctcggggcttccctcgtgccagtccgcgcgcgcacgccggggggcaaccggtccagggccgcgagacagtcaccgcgagagggcgcgagcccgaacctgtctacggaagtcccgccctcacttccggcggcggaggattgggagggactgaaggccgtttccggctctggtagtgtagggacttcggcacgtgtgtcattccccgggatttctgtagtaaccctgcttctggtgaacttgtctggccggcattcatttaaggcctaaggatgaaggcggtaagtgtcctcaaaagcccggtcgccgcggcctagggccccttcgggtgatagagtcactgcctgagttagcttttaggcaggttttca

SEQ ID NO: 5644 - DNA, 2300 bp, Homo sapien
atattggccaggctggtcttgaactcctgacctcaagtgatctgcctgcctctggctcccaaagtgctgggattacagatgtgagccaccacgcctggcctcttgatgtttttttaaattgagtgttaggtacatgcatgcccattttattgacattttattatataaaggttatattccctcttatatctgtatgtataggtatttttatatgaaataaattttaaatgcttgacaataatgtctcctctacgacttctattttctgttcttgcattcactaacatacttttagaatgaatgagtggtctatattctatatacttttatagaatgagtggtctatattttctgcttcgttttatccacaactgatgcctcttcaatttcttgcaatacaacttttttgtcctgaaataatgaaacatttgggtctgtgcccgacccttatcattattctttcttcctaggtaatgttactcatgattcatccacctacttgcattatacagatgacgcctaatctgtgtctctgaacctaaaccctaacccaagttttattatttatttatttgaaacagtttccctcttgttgcccaggctggagtgcagtggtacgatctgggctcattgcaacttcagcctctcgggttcaagcgattctcctgcctcagcctcccaagtagctgggattacaggtgcccaccaccatgcccagctaatttttcgtatttttagtagggactgggtttcaccatgttggccaggctggtctcgaactcctgacctcaggtgatccacctgcctcggcctcccaacgtgttgggattataggcgtgagccactgcgcccagccaactcaagttttagaactctatatgctggatattttcagtcgtttactttaccagatgtatttcccctattaatcgtttttttcctatccacttttctatttcttcaaaccatatcagtttcagtctcatatctttgtagtaatcattggttactctctcttctgtcacttctgatcagttatcaagtctttcgtcttttactttaaatatacttcatttccactcaatggtcaatcatcccattttaatccactatcgcagagtgctggaattatttcaatagctcctctctgcctgaccacttcctctccctccttaggtgataatctttttttcttgtttgagacggagtctcgctctgtcgcccaggctggagtgcagtggcgcgatctcggttcactgcaagctccgcctcccgggttcacgccattctcctgcctcagcctcccgagtagctgggactacaagcgcccgccaccatgcccagctaatttttttgtatttttagtagagacagggtttcaccgtgttagccaggatggtctccatctcctgaccttgtgatccacccgcctcggcctcccaaagtgctgggattacaggcgtgagccaccgcgcccggccggtgataatcttttaaacagaggactgtgatgaaacatggtgctaggtgagcaagataacttaggatatctttcttttgtgttagatgaagtgaagaagggagggtgttgaccctcctggatgaagtgatgaagccctgaactgtggcaatgatgccggagaaggatgtaaaaatcgtaaagtcgactggtgaccaattagagctggaaggacttacccacgctaacacctcccaaatatgggagtattttactaccataaatgaaatacatcaagtgaatttttgctaagcgagcaatacccgcgcttcggtaagaactgtcacgcttagagcgggccaaccagcttccaccatccagatggcggatcctagattggcagcctgcgtctctctagctaccgtctctatggttcggggaatctccaggtcggggcttgaccggtccgacttttgcgcgtgcgcgagtcctggcgcgtgcccgccctcaagcaactgtccgacccagcgggtgggaggggtgggtctgggaacgttgcggcggctgtcgccgcggccccagcacccagagctgttctctggccaagcctgcgcctgtagtccttctttgcctcctggggcggccgccacccacccccagatggtgggtccggaggatgccggagcctgctcgggaagaaaccccaagttgctcccggtgcctgcgccggaccccgtgggccaggacaggaaggtaatccgggccacgggcggctttggcggaggcgtcggcgctgtggagccgccggaggaggctgacgaggaggaggaggctgacgagg

SEQ ID NO: 5645 - DNA, 2300 bp, Homo sapien
aatggcaaacagccatattcaaaggtgctcaacatcactgatcagagaaatgcaaatcaaaattacaatgaaatatcatctcaacctagttaaaatgacttttatcaaacagacaggcaatatcaaatgctgaagaggacatggggaaaagggaactgttgtacactgttggtggtaatggaaattagtacaaccactatggtgaacagtttggaggttcctaaaaaaactaaaaatagagctaccatatgatccagcaatcccactgctaggtatatacccaaaagaaaggcaatcagaacatcaaagaaatatctgcactcccatgtttattgctgcactattcacagtagccaagatttggaagcaacctgtgtccatcaacagatgagtgggtaaagaaaatgtggttcaagggaggtggaggctgcagtgagccaagatcgtgccactgtactccagcctggaagacacagtgagactctgactcaaaaaaaaaaaaaaaaaagaagaagaatatgtggttcatatagacaatggagtattattcatccacaaaaaggaatgagagcctgtcatttgcaacaatatggatggaaatggaaatcatgatgttaagtaaatagccaggcacagaaaaatatcacatgttctcacttatttgtagagctaaaaagtaaaacaattgaaatcacagagatagagagtagaaacatggttacctaaggctgggaaggacagtagtggggcagggagaaagtggggatggttaatagattttaaaaaatagaaagaatgggccaggcaccgtggctcatgcctgtaatcctagcactttgggaggctgaggcgggcggatcacctgaggtcgggagttcacaaccagcctgaccaacatggaaaaatcccatctctactaaaaatacaaaatcagccagacatggtggtgcatgcctataatcccagctactcgggaggctgaggcaggagaattgcttgaacctgggaggcagagatcgcagtaagccatgatcgcgtcattataccccagcctgggcaataagagcaaaactccgtctcaaaaaaaaaaacccagaatgaataagacctagtatttgatagtacaacagggtgactatagtcaataataatgtaattgtacatttaaaaataaccctgtagccataaaaaagaacaagatcatgtcctttgcgggaacaaaagcgggaaccattgatggagccagaggctattatcttccacaaactaatgcaggaacagaaaaccaaataccacatgttctcactcacaagtgagagctaaatgatgagaacttctgaacacaaagaaggaacaacggacactggggtctactttaagggtggagggtgggaggagggagaggagcagaaaaggtaacgattggatactgggcttaattcctgggtgataaaataatctgtacaacaaacccccatgacatgagtttacctatgtaataaaccttcagatgtaccctggaacctaacataaaatttggaaaacaaaaagaaaaacgagaaaataaaaataactaaaagattataattggattgtttattacacaaagaataaatgctcaaggggatggacacctcatttacgatgatgtgattattatgcacttgcatgcctgtatcaaagtatctcatttatcccataaatatatttatctactacgtacccacacagaataaaaatgaaatttaaaaaaaaaagccaagataggccaaaacttggcctcttcagccagttaggcaagtggagaatgtaatggtaaagttcttgaaggaaattaaaagtgctaatcaatgaacacataaatgataagaaagcaaaacagccttattgctgagaaagtgtgagtggtctagataaaagaccaaaccagccataacatttgcataagccaaagtccactccatagcaaggccctaactctcttcaattctatgaagggtgagaagtgaagaagttacagaagaaaagctggaatctagcagagattagttaatgaagtttaaggaaaaaagctgtttatacacatagaagtaaaagatgaagcagcaagtgctgatggggaagctgcagcaagttatccagaagatacactaagatcactcatgaaggtggctactctaaacaacagattttcaatgtagacaaaacagccttctactggaaaaagatgccatctagtattttctaagcaagacagaagtcaatgcctgcttcaaaggacaggctgactctcttcttag

SEQ ID NO: 5646 - DNA, 2300 bp, Homo sapien
tttttgaaattttttaaaaccatgttcttgtattacctttaaaaatgaataaaattttaaaaagaattaattgaagcaaaaaacttattttggacaatatataaactttggtgtttgggcaagacgtattttttctattcttctgtccctgaaatgtcctatttttatgtagtttcaaatatctgcaatagttagttacaaaataaagaccaaaaaaatttgggaattgagaaaacttttgaaatctttcctgtcctgaagtttttatgagaccctgcatatgggagtgccgtgactaggcacttaaattaaaaagataggggtagagattttgtttgttggtgacacacaccaagtctgtgtgaaatataagtagctttagatagcaatatcataatggagaaaccagtttcagtagtgatagaaagcaagatcgagcatctgttgaagtgctatgaggtgccaggagctttacatatattatttaatcatcagtaaccctatgagtaggtgttgtttttctctggtttacaggtaaagaaagctgagttccagggtagctaaataactttcttgaagtccctcagatagtaaatggcagagccagaatttgaatctaggtctgattgactccaaaaatcatttttttctgctgttccacaatgatacttcttagcagaagcatctctttctgcctcatatgtacattctgtatggatgattactctgcagtaattttatttactttctttctgagtatataatgaatagttttggtagaatcaagtacttagatttgccacttttttgatgcttgctacatcagagagacctgacctgtaataggtaaagagtaaaaattaaaatttgcaaatatatttctttcctattattcatacatttttgttctccccccaacccccagaactttatgaaatcttcctctcaagagcaaaagaacggtggaaaagtttcagtgaaacaagttcagagaatgatacagaaggtgtgatttctttttttaaataagaattttaggatgaaaattcagatactgagcatgtatcagaagctgtagtaatcgctttacatatatcatcttatttaatcttaaccctttcagtaaacaaggctagaaaaaagacttgatttacagaaaagttcatgtaagtatcatcctaagacctcttagctatgtcagctatttgtggagaactaaaagtatgtaaaaggtaaagaagtttatactggcagacagcagctatttcatcatttttgactcatttttatgaagcattgaaattatgagaattaaaattataagtattcacttctgaaatattttttcaataataaatggtgaggctgggcggatggctcacacctgtaatcctggcactttggggggccaaggcaggtggatcacctgaggtcaggagtttgaaaccagcctggacaacatggcgaaaccccatctctactaaaaaaacaaaaattagccgggcgtggtggcaggtgcatgcaatcccagctacttgggaggctgaggcagggagaatgtcttgaacctgggaggcagaggttacagtgagctgagatcacgccattgcactccagcctgggtaacagacttcatctccaaagaaaaagaataaatggtgaaaattgcactttagtagaaattaattgaatgtaatgaagagttctagtcagaagcagtgtctacataaattactgttttcttatttcctggatatgtataatttgcatgtgtcatttaactttttggtcattgtctttttaaatattgcttctgccctttcttgcctgttttccttctggactccaattacatgtatagtagaccatttaacagtgtttcacaagcctcttatactctctcttttttttttctttttttggtgggggatagatataattttatataattgaaaaaaattttaattcatcatatagggatggggtctctctatgtttccctggctagtctcaaactcctggcctcaagcaatcctgccttggccttccaaagtgctgggattgcaggcatgaaccactgtgcctggccaattctttttctctctctctctctctctctttctctgcttcagtttcattgatttttattgatccgtcatcaaattcactaatcctttcttctggtttatctagtctgctattaaatctaaatctgtgtaatgggcttttaatttcagatgtgctttgtaattgtagaatgttcacttggttctttttatacattctgtttctctgttgaa

SEQ ID NO: 5647 - DNA, 2300 bp, Homo sapien
aatcatatctgtagagtcccttttaccatgtccagcaacatattcatagcttctggttattaataaggacttggacatctttggtgggcaattattatgcctactacagtccctgtcttcatggaacttaagttctagaaaatcaaataggcaattactgtagaatctgcaaaaagtactcagaagaagacagagaaataagatgagaacaaagaaataattggattgcagaagctaagggaatgctgttaagagagatagcaccctctgggtttttcaataagtatcattggtcatactggcaagagaaatctcaaaatagtatggtaatggagtgggaatacatactgaagtgtgttaaaggtgaaaagggagctgagagccgggtgcagtggctcacgcctgtaatcccagcactttgggaggccgaggtgggtggatcacctgaggtcgggagttcaagaccagcctgaccaacatggagaaaccccgtctctactaaaaatacaaaattagccggggtggtggcacatgcctgtaatcccagctactcgggaggctgaggcaggagaatcgcttgaatccgggaggcggaggttgcagtgagctgagatcacaccattgcactccagcctgggctaaaagggtgaaactccatctcaaaaaaataaaaaaataaaagaaaagggagctgagaaaatagagatagtgattgtaggcatccctttcaaaacacttggctgggaacaagagacagagttatcattgcaggtgttcttttttttttgagaccgagtctcgctctgtcacccagtctggagtgcagtggcgcaatcttggcttactgcaagctccgcctcccaggttcacgccattctcctgcctcagcctcctgagtagctaggactacaggcacctgccaccacgcccggttaattttttgtatttttagtagagacagggtttcaccatgttagccaggctggtcttgaactcctgacctcaggtgatccgcccgcctcggcctcccaaagtgttgggattacaggcgtgagccactgcgcctggcccattgcagttattcttaatggtctcactgtgtaagtccattatacaaatctcttctagaagtaagtgataacttttttttttaattaaacaaatgtatgggctggacaggcgtggtggtacacacccatagtctcagctactcaggaggctgaggcaggaggatagctggagctgggaggcagaggttgcagtgagatgatatgccactgcattccagcctaggtgacttgagtgagaccctgcttcaaaaaaaagaaaccaaaaaaaaaaaaaaaacaaaaaaaaaacaggagaagaagtatatgatagctgccaataacttacaagcaagaagcaaacatctatacagcttagccttttactcaaggtctttcacaacataaacacatcctaccttctctaaatgcctttccttactccagctgagctggtcctattgttcccatttttgtgtcttagttcatgcttcttttccattttaggttttttcctatttctgtctcttgcttttccaggactccaggctcaacccccacaacgtctcctttcttggtatttcagcagcacttctgatagatctcttttattctgagtccttcattttttactcagatgtgttataacaatgaaaataatcacctgatttttattaaattttgtgattctgtactctattttgaaagaattcagactgagaggaaatgaaaactaggtaatacgctgagatagccttttgtagcagtaaaatctgatacttttttgtttttcaaaaattctccctaatgttgaaaaaccacaccatatgaacaagaaattagggagatttcgtaatcattaggggctctctgtatttacctttgctgggaaggaaaaaagaaatcttggttaattctactttgtaatgtcactgtaatttttcaggagtacaataaaataaactatatagatttattattgtaagtccattttgactaaatttttctccctttgaaggtccaagggatgtccttcattgcagcagtactcattctcaatttggaagaggcagatgcctttatcgcatttgccaatctcctgaataagccatgccagttggccttttttcgtgtggatcacagcatggtatgaatggatcatgttttccattgtttctgtagtttgaatgccctcttagagtgaaaaacaataattagaaggccaaaacaatctaatctaatataaacttatca

SEQ ID NO: 5648 - DNA, 2300 bp, Homo sapien
taaaaattaaaaaataaaaatttgggatcagcagaaaagaatgctagctctgcttgtgtgtgtgacctcctccaggcccctaggaataaatttagaacaaatgaggcagcagagtgccagcacatgtgtttggtggcgcttggggtttctaaaaaacaactcagagacatgtgttaagatattatctctagtttttataaaggaaccaaacatctcctgaatctaacttcctgggctgttgttttaggctaccattaccttcttccttatcaagttgcttatttacttgtcagggctagctaggttcctggaatttcccttgaagcaactcaagatttccctttattcccatggttttttttttttttttttttttttttttttttgagacaaagtgtagctttatcacccaggctggagtgcagtgttacaatctcggctcactgcagccttgaccacctgggatcaagtgattctcccacctcagcctcccaagtactaggaccacaggcatgtgccaccacagccggctaattttggaaatgtttgtaggggccaggcacaatgtgtcacgcctgcactctcagcacttccggaggccgagttgggaggatcccttgaacctaggagttcgagaccagtctagataacatggcgaaaaaccgtctctaccaaaaaacaaaaacacacaaaaaccccaaaccaacaaaaattagcctggaatgggctaatgtccgacactaaaatgtccgggcgtggtggcacgcacctgtagtctcagctacttgctaggctgaggtgggaggatcaactgagcccaggaggtggagattgcagtgagcagagatcgtgccattgcactcctgcctggacgacagagtgagaccctatcttaataaaataaaatatagagactaggtttcgtttctattttttatgagacggagtctctccctgttgcccaggctggagtgcaatggcgcgatctctgctcactgcaacctctgccgcccaggttcaggcgattctcctgcctcagcctcccgagtagctgggactacaggcgcctgccaccgtgcccggctgttttgtatttttagtagagacagggtttcaccatcttggccaggctggtcttgaactcctgacctcgtgatccacccgccttgggctccgaaagtgctgggattacaggcgtgagtcaccgcacccggcttgtaaactcttaaattttgtatagacacaatcatacaagttgtgggagtcaaaatgaaggaaacgggtggttacatggtaggtatatttaatgccatacatcttaagaaattggaggtgggaaagggagccctggagagggagacaaaggaaatagttgaaaaggaatgcaaacaagaaaaggaggaattgaaagctgaagtgaaaaccagggacaagaaaagctccgctccttccttcactgcccactcgaatgaatgaatcctgtttggtttcctgaatcttccttctgctggccactccgcttggtccatcacttctttcagcttgcccttatcctaaacagctttctttaacccagtcataatcttaatttcctgttccttctctctcccgtcccacccacaaaaaagccctcctctttgtcattttgggggatttttcacttaagatgtgagccgcgcgctgcgggtgcggcgaggctggccctataaaaatgtttctgtttctgacatcctcgtgcagatacgcagacgtctctacctacaggatcatgggctagcgggtgctcaatcacagcagccagcgttggaaggcgccttgcaaagtattaacagcactatcaaactttaattgcgtagttcggaaccagatatgtgaggaaactgggttctccacgatcggccacctcgcccaatctcacaggatagttacaggctgagttcggcagcgggacccagtttcctcctgagagaggtccaggtaaaggtttacggttgccacaggtcagtcctgacgaaaaccgcaagctgcgccaaatctcgcgcagcggggcgggagggcgggtggggaatgtaaggtatcgcgagatgacaggattttcccgcgaaggagaagcgcgcttttttccctggcgggggatttggctagaaggctgggccggcagcggttgtgaggagttagctcgcggcattgcaggctctgagaggaggggacccggttcccgggtgagtgtccaggcatgccagcggaacggcccgcgggcagcggcggtgagtgaggaaaaccttttgggcgcgggtggc

SEQ ID NO: 5649 - DNA, 2300 bp, Homo sapien
tgtgaatgcatttggaggggtataacccaattgagtgttctgccactgtggaccctgctcctccaagttatcccttctgtttcttcaccttttccttcctcactgggtctttgcctttcaattatagatacattgtgttttcctgtctgcagaacaaaaatttttgatccagtctttctagattgccctgttttttattctttatttccaaggttttttttgagacacagttttgctcttgttgcccaggctggagtgcaatggcgccatctcggctcattgcaacctccggctcccaggttcaagcgattctcctgcctcagccttccgagtagctaggattacaggcatgtgccaccacgcctggcaaattttgtatttttagtagagacggggtttctccatgttggtcaggctggtctcgaactcccgatctcaggtgatccacccaccttggcccccaaagtgctgagattacaggcatgagccactgcaccggcctatttccaagctttttaagagtaggctggactggacatgatgcctgacacctgttatcccagcactttgggaggccagggtgagaggatcacttaagcccaggagtttaagactagtttgggcaacatggcgaaatcctgtctctacaaaaagaaatacagaaatagccaggtgtggtggtgcatgactttggtcccagctacacaggaggctgaggtgagaggatcacctgagcctggggaggtgaaggctgcagtgaggtgagattgcgccactgcactgcagcatgggcaagagaatgaaaccctggttttttttttttttttttttttggagagagagtctcgctctgtcgccaggctggaatgcagtgctgcgatcttgactcactgcaacctccgcctcccgggttcaagtgattctcctgcctcagcatcctgagtagctgggactacaggcacacgtcaccacgcccagctaatttttgtatttttagtagagatggagtttcaccattttggcctggatggtctagatctcttgaccttgtgatccatctgccttggcctcccaaagggctgggattacaggcgtgagccaccgcgcctggcccttttttttttttttttaaagagtagcctgtgcatatttccttacacattatgcagttgagcagttttacgcctaccagttgaatttattggtatctttgaaattgatacctagcacaaagcaaacaatttatcttttcctctcttccgaatcttgctcttttgttttctctttttttggtgttaatatcagaaccagtatctactgtgtcatctaaaacaatttaggaggttatctgaatttccttatatatctagatttttatcgatttctgtgagtcatttcatttgctgctactctggtgtttatgcccttactgtgccctatttatagtagtttcttaattgatttttataatcctagtctagctctcattgtcaagagtaccagattggtttttctgaaactcaaatataattactcataacctccattactttttatggtttcacaaggaattgcattttcttgtagaaaaatttgagaataaacaaaatacaaggaaatcacctgaaaagctgtcacacagataatcactaacattttggtatatgtatgttctttttctttgtattacggaaaatctcaaaaattacaaatgtttagaggatagtaaattgaatgtccacctttatcactttttttttttttgagatagagtttcactcttgttgcccaggctggagtgcagtggcatgatcttggctcacagcaacatccgcctctcaggttcaagcgattctcctgcctcatcctcccgagtagctgggattacaggcatgtgccatcatgctcggctaatttttagttttatcagagatggggtttctccatgttggtcaggctggtcttgaactcctgacctcaggtgacccgcccgcctcggcctcccaaagtgctgggattagaggcataagccaccacgcccagccaatcgctttttaattctgggatattttaacaaaaagctcagcaagactttttttttttcttaaggtggagtctcgcactgtcacctgggctggagtgcagtggcatgatctcggctcactacaacctttgcctcttgggttcaagtgagtctcctgtctcagcctcccaagtagctgggattacaagtgcccaccaccacgcccagctaattttttgtatttttagtagagacagggtttcaccatgttggccag

SEQ ID NO: 5650 - DNA, 2300 bp, Homo sapien
gagtgggtgactttctgtgaaaatataaattgcttaaataagggaaaattctagtgctatttgatgtttcagcacatatggaactaataaaagctcaatttttagtagtctagtgtaacattaatatcaaaacttgggaaaatattagaaaagaaagctacaactgcgttgactaaggtgtgaatagggaaatcttaaattcaaaataggtggagttcaaactttattgcatattttagtaggtctcttccaggaacagaaatatctatcagttttaggaatccttgtaagtggatcaaatgaaaacatgatcatttcagtagttactgaaattacatttgataaaattcaacatccatccctcataatagaggttttatttttagaattcttgttagaaaaattgtgagatcattgtttaaaaatctttttcctcaattcgttttctagcattgctattggaaatacttaatagtagatgaaggacacaggattaagaatatgaagtgccgtctaatcagggagttaaaacgattcaatgctgataacaaacttcttttgactggtactcccttgcaaaacaatttatcagaactttggtcattgctaaactttttgttgccagatgtatttgatgacttgaaaaggtgggtaagccagttatttaatgatttaacctcaaaaatctgtgctgttagttaaaattactttcttttcagtgactgaattaaaatgccaaatatttggcaagttctttgtggtgtatattgtatgttctactcctgccacaaattatgtgagagcagattaagaaaagattatttaaaacttacttgcattgattaaaggaagactgctgaatgcaactttaagataatatttttataataaggttcttttatgtgttacctttgtaaaacattttaagatggatttttcttactatatcctcattaaacaaccagggacaatagagttgttaaattatttcctatctcacataaaagaaaacctaggtgtaaagttgttacaagataagactagttagttagcaccagagccaaagttaaaaccaaggtctcccaatgtaaacacagtgttttaattctggaaactgtttgaatcttagcttatataataaaatcagacataaaagtagttttcagaaagtaattagtagcttcagaatggaggaggaggtaatgttgacataatttaaaactgattacaacggaaatataacttgggcaaaaaataatttatacttgttttggcatcagtgaaggaagtaagctaattgggtgtggaaaaataattttaaattttgggaatttatttcaaatctggttaccgaatggtggctcaaggcaggctaccttattgtgactctgggcgcttttattgaaagacaagaattccaggtcctgtgcagacatactgagttacagtgtcaaggtaggagttgagaatctgagttttttgaacatgcttctggtgatccaagtttgggaacttctagtctactgcataaatgttactagcattttccagaattgggtataatgttacctattctatattattaatctgcatgctcatacttaattgctcattgtaatatatatattttcaacattgggaaggaataagcatgtatattattgtcaagttatgtatatgttgaattttaaaatatttattgtagtgggccatacttagactgatggagaaaaatcatatggctttggttttcagagatagttctcacttttgtaatgtaaaattataaatatataccttaatcttatttttgatttttatactactgtacaattgttaatctatttataaatcagaaaagtgttccctttaagctcacagttcttgatggttcaaaaatgcaaccaatttatctttgttgttggaatgtgttctcttccattataaattttaaaaattgcacctaaggatttgatgcaacaataccacgtttcattatcagattattactgtaaatgataaatcatgtatcatgttgacataattgaatttatgtgatggttaacttaaacatttttctcttccagctttgagtcttggtttgacatcactagtctttctgaaactgctgaagatattattgctaaagaaagagaacagaatgtattgcatatgctgcaccaggttttccatgttttcttattctgcttaaccataggctcgatagagtataaaaggaactctggagatcacctgtctaaccctttgtagtagagatttgaaaaatgaagatcctccta

SEQ ID NO: 5651 - DNA, 2300 bp, Homo sapien
acaggcgcctgccactacgcctggctaattttttctattttttagtagagacggagtttcactgtgttagccgggatggtctcgatctcctgacctcgtgatccgcctgccttggcctcccaaagtgctgggattacaggcgtgagccaccgcgcccggccggacatgttttaacatgtttatgaaacatttacatatttttcctgattgcctgtcggcatatttgtttttgggttggtagataccaacactggtaatgtgtttactatctttggtaatagtctgtctatgattagctctatacctgttgggtatttaagtccagagtcctgaaaatgagctttattatatatgattactatatgtaaaccattgtcagtatttaatggcaggggtataaagagtatacaattatttgtttattattattagtagtagtagtagtattttttttgagtcaacgtctctgtcgcccaggctagggtgcagtggcaagatcttggctcactgcaacctctgtctcccaagttcaagccattctcctgcctcagccttccgagtagctgggattctgtaatcccgccaccacgcctgactaaatttttttgtttttttagtagagacgggatttcaccatgttggccaggctagtctcaaacttctgacctcaggtgatctgctcgcctcggcttcccaaactgctgggattacaggtgtgagctactgcgtccgacctagagtatacaatgattttaatctagtatttgtgctcttttagtgacccgaatattttaatgcataattattgtctgttgcttctgtgttctctttataaatgtgataatcatttgtaaccaccccagctaatgaaagagaataattttaagcctgaaactttagaacttatagaaggaaacttgtatgtctgcatccctaggtcagctggctttttactgagtcttaaaacctcattctattaaaaaatttttaatttttaaaaaaacttttagttttttgggtacatagtagatgtatatatttatgaggtatatgttttgatattgatacagaaatgcaatgcataataatcatatcatggagaatggggtatccatcccttcaagcatttgttaccctttgtgttacaaatgatccagttatacacttttgtgtgtgtgtgtgtgtggagacagagtcttgctctgtcacccaggctggagtgcagtggcacaatcctggttcactgcaacctctgccttccaggttcaaacaattctcctgcctcagcctcttgagtagctgggattacaggtacccgccagcacacccagctaatttttgtatttttagtggagatggggtttcaccatgttcaccaggctggtctcaaactcttgacccaggtgattcacccgtcttggcctcccaaagtgctgtgattacaagtgtgagccaccgcacctggcctctagttatactcttctttatattttaaaatgtaaaagttaaattattattgactgtagtcaccctgttgtgctaccaaatattaggtcttattatttctactttttgtactcattatttcaaatatttttaatttttattcatttttattatttccccttttgtatggtgctgataacatctcattctaaaagttgtgggctataactgaaacttcaaccctaagaaatacaaatgctacctttatatttttacttttaaaattatttgagatagattcttacagtttttaaaagaaaataaattctgaaatgctgcggacaactgtgagtttatcatttggtctggtctgggaaaatctcaagatattttcaccttttgagatttggcattatttatataggaagtcaaaagataaggtaaaggagtatatggggacagtattccttgaaaaacaagaatgtttaatactcatatttttctgttcatgttttaattttagattttaacacctttcttattgagaagactgaagtctgatgttgctcttgaagttcctcctaaacgagaagtagtcgtttatgctccactttcaaagaagcaggagatcttttatacagccattgtgaaccgtacaattgcaaacatgtttggatccagtgaggtatagtggttttgaaatgtactgtaaatgaaacttgacatataaaatttctcttttttccctttttttttgagagaaggtgtcgctctgtcacccaggctgtggtgcagtggcacaatcactgctcactgcagcctttacctgcctggctaaattttttgtatttttt

SEQ ID NO: 5652 - DNA, 2300 bp, Homo sapien
tgaggtatagtggttttgaaatgtactgtaaatgaaacttgacatataaaatttctcttttttccctttttttttgagagaaggtgtcgctctgtcacccaggctgtggtgcagtggcacaatcactgctcactgcagcctttacctgcctggctaaattttttgtatttttttgtagagactggcatttcgccatgtttcccaggttggtctcagactcctgggcttaagcagtccacccaccttggcctcccaaagtgctgggattccaggttttagcaattgtgcctggcctaaattccagttttaaggtccccttgttcatttttaggacttgggtgaatttctaactggggtataaggcataaggcttagtggcaaaagttgtttcctagtatctggagtcctgctaaaatgttaagtgataatctttgtattaattgctttacagtcatctggaatacttactaaaaatttaggccaggcacggtggctcatgcctgttatcccagcactttgagaggccgaggcgggtggatcacctgaggtcgggaatttgagaccagtctgaccaacatggagaaaaccctgtctctactaaaaacacaaaattagctaggcgtggtggcgcatgcctgtaatcctagctactcaggaaggctgaggcaggagaatcacttgaacccgggagacggaggttgtggtgagccaagattgtgcctttgcactccagcctgggcagcaagagcgaaactccgtctcaaaaaaaataaataaaaaaaaaatgtatatttccgtacagattaactctaatcatgctttctggagatgaacttggaaatgcatttttaacaagcacacaggtaggtatttgagaatccctgtactaaggacttggcaactagactaatctccagatatacagattgagcatccaaaatctgagttgctccaaaatttgaaactttgagtgctgatatgaaactgaaaggaaatgcttattggagcatttgtattttcccgttagggatgttctacctgtacagtttccttacagaaggttattgataaccaaaaagattaataatcaatttgatgatgattattcatcacccaccatattataggagatagaggtgggatgttattatcatgtaactgaaggagacccttaagttttgtttaactttccaggttttttattgtacactataaacctacgtattttcttttcaaaatatttattgtgatgcatttttaaacaataggaccaccagactcttctccccccgacttttttttttttttttttttttttgagacagagtctcgctgtgttgcccaggctggagtgtagtggcatgatcttggcttactgcaagctccgcctcccgggttcatgccattctcctgcctcagcctcccgagtagctgggactacagtcgcccgccaccacgcttggctaattttttctatttttgagtagagacggggtttcaccatggtagccaggatggtctcgatcttctgaccttgtgatctgcccgcctcggcctccgaaagtgctgggtttacaggcgtgagccaccgtacccggcctcttctccctttttaataattaattataattaaaggaagggtctagccgtttacaaatttacattatttgtctgttaatgagcaatttcataatgagcagtttcatgcagtgttacaccagtctgaagaaatatcctctgtactgcaaatttccggagccatatttcaactttaaggtattaaatccttttgtgtaagttcaaagtagttttatacacccttcatttttacctattgagatatgaaggcccttcctcttactttcagatattgttgtccatgttaaaattaaactaatttcccacaacatttgtatttgtctatagattgtcattttgtacataaaatatgccttattttgtttacatttagaacctaaggacatagctttataaactgaatttcttttaattcgttcccttttagaaagaaacaattgagttaagtcctactggtcgaccaaaacgacgaactagaaaatcaataaattacagcaaaatagatgatttccctaatgaattggaaaaactgatcagtcaaatacagccagaggtggaccgagaaaggtttgaattcaaaagtgaatttaagtattctttaaactgtgaccattttttgcatttcccatatatgcattatttgttttggtagagctgttgtggaagtgaatatccctgtagaatctgaagttaatctgaag

SEQ ID NO: 5653 - DNA, 2300 bp, Homo sapien
agtagattttaggtgcttataccacaaaaaagaagttaattatagaattgattaatatgtaaatttgtttaaccatagtaatgattccactgtttatatgtctaccaatgttgtataccttaaatatatacaatggaaataaacaaataactgtactagtcatttagaataccacaatgacatctttacagaatatgcctttgtacaagcattgccattagtgatctagaaatgtatgtatcattttagtgatatatagagcctcatgagcgctaaatgtcatctccagttcaggtctgcacaactgtgtttgttctgtgccatgggtctgtttaatgatttccctacctcccattcaccactgaagcacatgcctgttgttctgcctataattccccttccttgctgtgcaatatttcattccattatttctgacacagaccaaaaaagcaatagaaacagcagtgtctggaggcaagtgggagctggagaagccatagtttctgagatcttacccacttaattctctgagattggctctttcctcagttatactgagtaggtttcagctcttcagtgacagagaggggagaaaccctagcttttatttcttctcttgagaatgtacaaccctgttattttgtgaacagtgtggtgtagattcagagtgagaaatgtttttaggatttattttattttgctaaaactgttctcaaggcagctctggtgtaagtgagaatataccacagcgggcgtcagaagatctcagttcaaatcccagcctgccatttatgagctgtgggacactggacaggtcatctgttctcctagagtctccctttccccatttggaaaatatgaaataatattctcagccgtccagtgtttttcacggggtttaatggaaaaaggtgtgtatgtttacttagttaattgataaccggtttagccatttaagatgaatgagtttgttagctgctttatgtttaggcagctgtaatgttagtactacattaaaatatttcaaaaggatctcattttcaaggaaaatgatctagtgtttgagaaagcattatagtgttgcagtcttgcagatccttagctcagctaggtccgagttgtcttatgcaggaagaattaggcacacagacactggagagtgagtggagtagaatttattaagtgaaaggaaaactctcagcaaagagagaggccctgaaagcaggttgcagattgccacttcacagttgaataccaggacttttatagaaaagctgatgaggctgggatacttatttgcataaggcgtgaattcctggtgtttccaccccttccttccattgcgcgtgtgggctcttagtctaagccactccatattgatttatttcccttcctgcgcatgtgttaaaggtaggaatttttcactgtgggcatatttaggcaagctccctgtgcaagttcccttatctgcacaaaacatctagtgtaagtacttggggtttttgtggattgggcaatgacctggaagggttggaggttctctggggacccttcccttactgcctgcctaatgcaagctggctaactcctctcaataggataaacattattttatgtacaaggaatataatacacagattgccctcaaagtcatatttccaactgctcatcaatctaaaaatccaaaattttgaataattttttgatgaaataatttatttcattgtttctcaattttggctgcacagtggaaccacctgggctgtttgaaaaaacctaggcctagccaggcacggtggctcatgcctgtaatcccagcacttagggagaccagcctggccaacatggtgaaaccctgtctctgctaaaaatacaaaatcacctgggcgtagttgtgcattcctgtaatcccagccacgccagaagctgaggcagaatcgttcgaatccaggaagtggaggctgcagtgagttgagatcttgccattgcactccagcctgggcaacaagagcgaaactccatctcaaggaaaaacaacaacaacaacaacaaaatcctgggctctgcttcagactagttaaaccagaatctccagggtggggcaccggaaagaacaagaaaaaagaacaccttatttttatcttcttcagtgagccaatgttcattcaaaagagagattaaagtgctttttgctgactagtcacagtcagagtcagaatcacaggtggattagtagggagtgttataaaagccttgaagtgaaagcccgcagttgtcttactaagaagagaagccttcaa

SEQ ID NO: 5654 - DNA, 2300 bp, Homo sapien
agaggaggagcagaactggaacacctagctctcaaggaatgaaatgattattctaaagagagcaaccaagcttatcttacccaaactaaggtagtatatttctgttagagtttaaagttacgtgagtcagggaccaagttattgcttttctttgccctgtataaagggttctccaaggccttggactcacccaagtactaaaggttataaaaccaaactcttctgacccccaatctagtcaacttgggctgtaattattaatgaaattaatatttattttgaaaatcatttactagactgaatcacgaaatactgaaccattgtacacaatcagtaaatatctgtggactcaattgaactgaatgttttgcttgaaatgaaaccttcaagatgcagggcttatgaattctagtctcagctctagcaccagcagacaccatgttcttggctacagtactgaatcttcaaggctcagcctcctcattcctgagatgggtcaattttattgtaagcaaaggcaattgagagattccaaagggatatgaggtgtgagaattctctctaaatggggttagaatccctgttaaaaatgaccagtgaaacattgtgcaattgtgtcttaacataacttactttttcttaataagagaactggaaataacctcattaggaaatttagaacaaatacgatgatatctttaaagaaaatggctttgtgtaagtattgtcgttagtgatctagtaatgtgtatctttctggttgtatttagaccttcaactcaaatgtcagctcccgttaaggtctatacattgtggtggttttgtgctgtgggtccatttagtgatttccctacctcccatcctctattagattcacaactgttgttctgcccataatttcctatgcttgctttgcattgttacatttttttttgaaaatcagaaagcaaaatcaatataaagcagccatgtctggaggagaccaggaggtcaagaagccttagtttctcaagcccttagcaccaaattctctgagatcagctcttccttcagttacactgagcatttcccctctgcagtgatggagaagggagaactcttattttttctcatgagcatctctggggctgttttccttagataaataagtggttctatttaatgtgaagcctgttttatgaacaggatgaatgtggtatatattcagaataactaatgtttggaagttgttttgttttgctaaaacaaagttttagcaaacgattttttttttcaaatttgtgtcttctgttctcaaagcatctctgatgtaagagataatgcgccacgatgggcatcagaagacctcagctcaaatcccagttctgccagctatgagctgtgtggcaccaacaggtgtcctgttctcccagggtctcccttttcccatttgaaatataaaaaataacaattcctgccttcacgtgtttttttagggggttaaatggtaaaggtgtttatatctgctaaggtaatttacttgatatatgtttggttattgaagatatatgagttatgttagctatttcatgtttaggctgctgtatttttagtaggctatattaaatagaggatttcattataaaggacaaagtctcctaatcttcgatataggattgacatactttttaaatatacaaggcatagaatatggccatttccgttaaatcataaattcccaactggttattaatctaagaattcagaattttaagtaattgtttttgcatcagattgtttacttcagtgctctcaattatgacggtgcattggaaccacttgggttaacatttttttgtttttattaccaatacctaggcttcaacctagtacaatgaaaccagaatgtacagagtgggcactgggacgaaggagaacaagaccaaaggacattttatttttatctctatcagtgggtcaaagtcctttcagaaggagcatatagtgggcctaggtgattggccactttatccatcaaagaggcacacacacttaattagcatggagtgttataaaaagcttggagtgcaagctcacggttgtcttaacaagaggagaaggcttcaatggatccttttgtggtccttgtgctctgtctctcatgtttgcttctcctttcaatctggagacagagctctgggagaggaaaactccctcctggccctactcctctcccagtgattggaaatatcctacagatagatattaaggatgtcagcaaatccttaaccaatgtaagtatgctccttcagtggcttgca

SEQ ID NO: 5655 - DNA, 2300 bp, Homo sapien
atctacacattatctataattctttctttctgtaaactgaaaggtctaggaaggagccgcagctcagcaggagagaggaggagctgagctgggacccctacctcctgaggaatgaaatgattattataaagacagcaaccgagcttattttacccaaaataaggtagtatatttctgttagagtttagagtttcatgagtcagggaccaagttattgcttttctttgccctgtataaaggcttctccaaggcctttgacttacctaagtactaaatgttataaaaccaaactcttctgacctctcaatctagtcaactggggctgtaattattaatgaaattaatgtttattttgaaaataatttactagactgaattacgaaatcctgaatcattgtacactatcagtaaatattggtggacccaactgaactgaatgttttgcttgaaatgaaacctttgagatgcagggcttatgggttctagtcccagctctagcactagcagacagcatgttcttggctaagatactgaatcttcaaggctcagcttcctcattccggaaatgggtcaattttattgtaagcagaggtaattgagagattcaaaagggacatgaggtgtaacaattctctgtaaattgttagaatccctgttaaaaatgaccagtaaagctttgtgcaactgtgtcttgacataactttatttttcttaataaaagaaatggaaataacctcactagggaatttagaacaaatatgatgatatctttaaagaaaatggctttgcacaagtattgacattaatgatctagtaaagtgtatctttctagttgtatttagatcctcaactcagtatgtcagctcctgttaaggtctatacattgtggtggttctgtgctgtgggtccatttagtgatttccctacctcccatcttttattgcatccacaactgtggttctgtccataatttcctttgctttctgtgcattattacatcatatctgaaaatgagaaaccaaaaacaatagaaagcagccatgtctggaggtgactggggggtcgagaagccctagtttctcaaacccttagcaccaaatttttccctcagttacactgagcgtttcacttctgcagtgatggagaagggagatcccttatttcttctcatgagcatctctggtgctgtttcccttagagacaaataaggggttctatttaatgtgaagcctgttttatgaacagaataaatgtggtgtatattcagaataactaatgtttggaagtttgttttattttgctaaaattgttctcaaggcagctctggtgtaagagataatacaccacgatgggcatcagaagacctcagctcaaatcccagttctgccagctatgagctgtgtggcaccaacaggtgtcctgttctcccagggtctcccttttcccatttgaaaaataaaaaataacaattcctgccttcaggaattttttttagggggtttaatggtaaaggtgtttatatctgctaaggtaatttacttgatatatgtttggttatttaagatatatgagttatgttagctatttcatgtttaggctgctgtatttttagtaggctatattaaatatttgaaaggatttcattataaagaacaaagtctcctaatctttgatatagcattgacatactttttaaatatacaaggcatagaatatggccatttctgttaaatcatatattcccaactggttattaatctaagaattcagaattttgagtaattgcttttgcatcagattatttacttcagtgctctcaattatgatggtgcattagaaccatctgggttaacatttgttttttattaccaatacctaggctccaaccaagtacagtgaaactggaatgtacagagtggacaatggaacgaaggagaacaagaccaaaggacattttatttttatctgtatcagtgggtcaaagtcctttcagaaggagcatatagtggacctaggtgattggtcaatttatccatcaaagaggcacacaccgaattagcatggagtgttataaaaggcttggagtgcaagctcatggttgtcttaacaagaagagaaggcttcaatggattctcttgtggtccttgtgctctgtctctcatgtttgcttctcctttcactctggagacagagctctgggagaggaaaactccctcctggccccactcctctcccagtgattggaaatatcctacagataggtattaaggacatcagcaaatccttaaccaatgtaagta

SEQ ID NO: 5656 - DNA, 2300 bp, Homo sapien
aagagagaaagtgaacttattttatccaaataaactagcttatacctacgtgagtgaggcagcaaattactacttccctttgccctggataaagggttcaccaggacctggactcactcaccttttaaaggttataaaaccaaacacgtctgacccacattttactcaactggtgctagaattattaactaaattaatgtttattttgaaagtcactgattagattaatccacaagtattgaattttagtcaatcttggtggcccggtttaactggatgttttgcttaaaaggaaggcagcaagatgcaggggttatggtttccagccccagcttggtcacttgcattctgtgtgtccttagctaaagtactgaatctccatggtctaactttctcctctctaaactgggaataattttacagtgggcaaagataattgagagaataaaaagagatgtgatgagtgtgaaaattctctgtaaatttgtcataatgtctataaacataatcgataaaacattgtataactgggtcttaatattttcttaatgaaagagctggaaataactgtactggtcaatttagaataaaggtaatcttttcagagcatgcctttgtatacacactttgttattagtgatctagtaatgttcataaatccagttgtatttagatcttcatgaccattgactatcagttcccatttcaggtctgcacattgcagtggttctgtgccctgggtccattcagtgatttccctgtgttccatcttctgttgaatccacaactgttgttctgtgtataatttctcttccttgctgtgtatgattacattctattatttgtaacaataacagaccaaaaacaatagaagcagccatgtctggaggtgactggaaggtggagaagccatagattttcaagccctgtgccataaattatgtgagattggccctttccttaatagtgctgaacaactttcacttgtgaggtgatgcagaggggagaactctaatttttatttcttcttttgagcgtctccggtcctcttatccttataaacaaataacggacttctatttaatgtgaagcctgttgctttctgaacagagtcaaggtggcgtatcttcagagtaactaatgtctggggtttgttttgtttttctaaaattgttcttgagccagctgtggtgtaagtggtaatgaaccccaatgggtatcagaagatctctgctcaaatcccggttttaccggcaatgagctgtgtggcactgacaggtgtcctgttctcccagagtttctttcccaatttgaaaaataaaaaatgataatctttatactccagtctcttttaatgatgaatatacatttatatatatacttttatatatttaatataatatttaatagtataaatatgtatttatgttattattatgtaataatgtatgtaacactccctgctaattcagtttgtctctttgacatgtaaagtaaataatcacctattattataataatgtaataataacacaaatattattatgtaataacatatatatttatgtatattgtttatatacatttaaatatatataaatatacatttattagctaataatttgatatatgtatggtaattcaacatgtatgagttatattcactatttcatgtttaggcagctgtattttaagtgaactatactaaatatttgaaaggcttttgttatcaagggctaagtctcctattttttgatatagcattacaatgtacattttttatacacaaaatatagaatacactgatttccctcaaggtcataaattcccaactggtcattaatctgagaatattgaattttgagtatattctaacatagaatcatttacttcagtgtttctccatcatcacagcacattggaacaaccagggacttttaattaaaaatacctgggctccaatccaatacaattaaaccagaatctcctagattggcactggaaagaaggagtaggacaaaagaacattttatttctatccatgggccaaagtccactcagaaaaaaagtataaattggatctaggtgattgtttactttacatgtcaaagagacacacactaaattagcagggagtgttataaaaactttggagtgcaagctcacagctgtcttaataagaagagaaggcttcaatggaaccttttgtggtcctggtgctgtgtctctcttttatgcttctcttttcactctggagacagagctgtaggagaaggaagctccctcctggccccactcct

SEQ ID NO: 5657 - DNA, 2300 bp, Homo sapien
taccctccatcttgaattttgagttagatgtagcaattctgtgagacttagaggttatgcttcttggagaatattctataaatgggaaaactgttccatgttgtgttcatggatagtcaatgaatagactgtgatggaaaatgctagttgtctctcagtattcatgcccacatctctctcatgcatatggaatctccagttcttagttgagcatataggcactcagaataaagatcacagttcccagactctttctgaagccacataacttaagtctgcgccaatggaatatgagcagaggtaatgtgtaaaaatttctagttattcacctaggcaaggggaatgttcttcccctcaccactctcccgtcccactggatggaatatggacgtgatggcaagttgtttcagaaatgccctaaagatggtggagcaacgttacagaaagaatctgggtccctgaaagggtgaagatactaaaccagtgtgatggatgattttaggtgtcaacttgactggattcagagatacctagatatctggtaaagtattcatttcttgatgtgcctgtgagggtgcttctgaaggatattggtgtgtgagtaggtggattgagtgggaaagatccaccctcaatgtggtaggcgccatcttattggctgagggcctagatgcaatgaaaagctgagaaagggaaaatttctctctctttccgtgtgtgtgtgtgtgtgtgtgtgtgtctatctacctctccccctcctggaactggaacacccttattctcctgcccttggatatcagaacttcaggttctcagcccttcagcctcaaattgagagttaggccattggcttccctggttctaaagatttcaaacttggactaagccacactaccaacttctcttgttcttcagcttacaccataggacttctcagcctccataatcacatgagctaattcccctagtaagtccctctcacatatctgtatctatattcatctttatttctctatttcctattggttctgtttttctggagaaccctgactaatacaaacagcttttcactgcatatgctcagactgtcaattgaagaaacaaatttactattttgtgtctttgttgaagcagccaaacttatatctaaccaatgcaccacaataaggagtttattcatcttaaaggcagcgtgatgttttaggcagtacttggactagataatttattggaatattttagttctaatattagatatagttacaatgttaatatcatcaaattgaaaccattaaatctcagatttctggaatgcgaataagtgaacccatcatccaaagcttacattattttactccctctggcgactggaaacatggataggaattgtgatgaagaacttcaaccaccagtaaccaagttacacctcacacagttataaataaagttaaaatcttatcaaaacaataaatcttcaatattttattaaacaaatattgtgacctcttttaaatatatgttatacacaccccctttcaaattttagttttgctaatttgaggctccaaggtggaccctcccaccgccccccgctgaggatcatgagatctggctccctacctgattgttgcaagactttcacctacactaccttgagtacgagactttcacctacactacctcgagaggcaatccctagagggccttcgatgtgcctatttatttaaaaaaaaaaaaaaaaaaaaaaaaaaggcctgtcatctcagtgggttaaagaggcagggtgtggttacctcacctggctgatgagcaacccccttctccctttctgcagtgcaggattttgtaagcaacaaaatcttatttaaactctgtgtccatcatcttttcaccacacttggcacagtagtctgtgacctatttctcctgacatcatatcagaaagcaaggcacacctgttgcttcaacttagctcacagcccatagattttatctcccagaagcaaaagagattgccttttaggcttgagagccaatgaaagtgagccaggacttagtttgtgctggcaccaaggaaatgcctttttccccagagccggcaactaaactataagaggtaagcagttctcagaggagacagaaggcaacagctctaccatcctccaaacatctgaagccccccatagaaactcctcttggaattggtaagtatctgtgctcatgggcttcttctccaatgatctgactgttgcttgtactcataaggaaattgtttgccttatggattcattctcagcact

SEQ ID NO: 5658 - DNA, 2300 bp, Homo sapien
gatatagtttctactattataaagttctagtatttttcttaaaccaccacaaaagaaatttgaacactgccttagtctgcttgggttactatagcaaaatgctatcaactgagtaactcatatataacagaaatttatttctcacaactctggaggctgggaagtccaagatcaaggcagacgcaatgtcagtgagggcccactttctgattcagaaatagctccttctagctgtgtcctcatatgatggaaagaatgagggatctcttgggagcctattttattaaggcactaatcccattcatgagacctccactcatgatctgatcacctttcaaagatctcacctccatcaccttggagtttagaatctcaacatacaaatctgggttggaggacacacaaattcagaccatggcaaagacaaatgccaaaatcgaaaacatatttgcaacacttatgaaagataagtggtcaatggccttaatgtagaaagagttcttactaatcaatagggaaaataaattaacattacttggcactcctcttcaaatgcttcatctaagggtgggggcacttgaaagtgtttgcagttatctaaagaaagatacttctttgtgtcacccacaattgcacggtttcatatatatatactcaatgctaaagggtaacttgatagctataagatggcaatcagtgatactgaacaggtcttttccactgtgtccctcggccttcccatcagcccagtgagtaactcgaattagatgaactccccattccatgccagatcctgtttcctatgactttgttttggagatataatttatatactataaaattcaccgtttaaaagtgtacaaatccatggtttttagaatattcacaaagctgggcaaccatcaccactgtctatttctggaagattttcatcaccccaaaaagaaacccattagcagtccctccctattccccgctctctgcaaaacctggcaaccaataatctacttcctatctttggatttgcctcttccagatatttcttacaaatagaatgcaacatctagctttttgtccctgacttctttcagttaccataatgttttcaaggttcacccatgttatagcatgtgtcagtactccactctttttatgaattaatagtatttcattgtgtaaatatatatactatatttcatttatcagttcatcagctgatagatatttaggttgtttccacatttgggctattacgaacaatgacattttatgatgcccaagagatttcagtgtgagaaacagaagatgaaggtgcagtatgtgggaaaggcccacaccggtaaagcagatccttttccaaaaatcaataggtctgtagttgggagtgtaagcattactgcaagacaagcaaggtcatcaccagttaatcctagaagtattctagttctctaagcctgaaaactaaaaagaagcgtctgtcagaagagcctctggcacacagatgcaaccagcgtatgccagtctcataggaggtccacaataggtgttctatggatgcagaagaatctatagaaacagcccaagaagagaggcaggaaggtctttttgttttgtcttttctccagtgcaaatccagaaatccacagcaaaagccattctcaagccatgagaaaacaacaaagaggaagttttcataatccctttgcatcacagtttcaaaattaggctatatttcaagtaactggtggtctgacacttagccatataaactcaggacctgattgaggtgaaaggataacagcaacagagccacagatcactggattgtttcagtgggctcagtctcctgcctgtctcagttttccccagtcgccatcgtgttactgacccaatagagaagagagactcctaagagagagggtaacccagagacctcatccatgcctgccagaatgcttgaggaaaaattctctactcaaaagataaaaatgaagccttcttttgtggtttttttcaggaatcacctttgtgcctgggagcccccagctgactgccaagaaaattcgctatcaattacgcatgtctaaggcccagtgcattgtggctaatgaagctatggccccagttgtaaactctgccgtgtccgactgccccaccttgaaaaccaagctcctggtgtcagataagagctatgatgggtggttggatttcaagaagttgattcagtaagtggacactgaatatgagatgcttaaatgaaggaaatgtttgactttgaaagatgatgatatatgagaaag

SEQ ID NO: 5659 - DNA, 2300 bp, Homo sapien
aaccaatggacatgagccagcctgttgttgggcacccctgtgttggcgtaatgggtgcgtgggtggggtatccatgattgtcagaggctctacgtggttgcagtaagatgggcttctatttcaaggccaatctagctattggctgccaaatgttcaaccttccagcaagaatgaccaactgaacagtgctatcttttgaagacaccagctaagccacttggtggcaagctgactagcttggatcccttccattttggaaagtgcagtgatttatttattcagtcaggaatagacccatataggtatattgggtttgcctttgctgtccacagggcctcaaacacaacactttctgaggacacaaagatctttagatccactagcgcaggatccctcatggccttgtgggaccaaggacccattttactgcaaaggaggcacagcagtgggcacatgaccatggagtccagtggatctatcacaatctgcaccacccagaaatggccagcataaaagggtgatggtatggcctgttgaagacatagttgaaatgccagcttatatacgaccccttgtgagtgtagagtgccattttctagaacataggaacactcaatcggtgaaatttacttagtgctgtgtccccaagaggtagacggtatgagtacaggagcaagggggacagtaagagcattcctgctcaggataactccttgtgacccacttggggaattagtgctccccacacgattatcaattatgaaaacaaaaacaattaaaaaattcttccagctgatttttttttttaaagcaggcaggaaagaaggcacctagacatcttatctaaaaatttttttccgtgtaaacttatacgaaggaatctggagtgggacttcatgggttcaaatcctggctccacttcttgatcactgtatgacatggataagtcatgtaatctctctgaacctcagtttactcatctgtagacaaattagtaataacaggagattcacagctcaggtagaactcaaagcacaggggttgtccctgataaacacacacaacttttggccaggtgcagcggctcacgcctgtaatcccagcactttgggaggccgaggcaggcggatcacctgaggtcaggagttcgagaccagcctggccaacatgggcaaaccctgtctctacttaaaaaaaaaaaaaaaaaaaaaaagccgggcgtggtggcgggcgcttgtaatcccagccaaggcaggggaattacttgaacccaggaggtggaggttgcagtgagctgatattgcgccattacactccagcctgggcgacaaaagcgagactcagtctcaaaaagcaaaaacaaaaaaaccacgcaacttttatatttagccttgatgagtcctggaggtacaatttctacctggttaactggatacatctcaactcttcccgtggtttcgcctcttccccaggctcgcagagaagacgttgtcctcgcaatatttttaaaaatactatgcaccagtctgcaggaaaaggcgcagggggcggcgaggcaacctaggcctgcgtgcctctggctttccttttggaggaagctttcatgcgcgtccatgtgaagagaccaccaaacaggctttgtgtgagcaacatggctgtttatttcacctgggtgcaggcgggctgagtccgaaaagagagtcagcgaagggagataagggtggggccattttacaggatttgggtaggtaaaggaaaattacaatcaaagggggttggttctctggtgggcaggagtggggatcgcaaggtgctcagtaggggtgctttttgagccaggatgagccaggaaaaggactttcacaaggtaatgtcatcagttaaggcaaggaccggccatttacacttcttttgtggtggaatgtcatcagttaaggtggggcagggcatattcacttcttttgtgattcttcagttacttcaggccatctgggcttttacgtgcaagtcacaggggatgcgatggcttggcttgggctcagaggcctgacagaagcgcccccttggcgagcacatgcgcgcctcaaaggggatggagctgcgcgtgcgcggcagagtcacaatggcagccagattcaggtgcggccatttgtgtgtccccgaggttcctcgcgggccggcatcccacgccgagggtggtggtggcaggctttccagaaaggcagcacaccaggctcagctctgctggcgagcaggaggcgacggcagaggaaacttcaacccgatgaacttcctggttg

SEQ ID NO: 5660 - DNA, 2300 bp, Homo sapien
ccacgcccggctaatttttggtattttcagtagagatgggtttctctatgttggtcaggctggtctcgaactccagacctcaggtgatccgcccaccttggcctcccaaagtgttgggattacaggtgtgagccaccgtgcccggccctccacttggatttctaaaagcaaacaaactattcccaaacataggcatttgtgctgtcacacaattggacaagcaagataatctttttatgtgtaaatctgtgcacagggctcttcagtaggtaggccaggatcacagggagacagagctgcacagggaacaaactcattgagcatgggctctatgccaagcactgtgctggggcctgggtaccaggatgaatgggtgccaagaaaactgcgaagaaactgggcccagagagggtaagtggtcctgaggatggccaatgtgttatatacattaagtactatgtgccaggcactattctaggcactggggcacagcagtgatctaaacagataaaaacccctgtccttatggaattaatgcttaagagtgggggtggaacaaataaatatacaaaatatagagaatgccagatggtgatacatacaaaagaaaaaaataaggcaggggaaggtaatagagcattctagagaggatatcttaaatgatgctcagagatgacctcagaaaatgacatttgcattttttttattttttagtttttgagatagggtctcactctgtcacccaggctggagtacagttgcacgaccacagctcactgcagccttgacctctccggctcaagccatcctcccacctcagtctccctagaagctgggacaggtgtgccccaccaaacctggttaatttttatttttttaaatttttttgtagagacagggtcttgccgtgttgctggggctggtctagaattcctgggctcaactgatcctcctgactcagcctcccaaagtgccgggattccaggcgtgagccacgtgtccggcccctagaaaatgacagagagtggtggggatgtctgggagaacagcattgcagacagggccctgaggcaaggccctgagttaggagcaaggagcacagcctggcagactggggggcaggtgaggaaagggcaggaggagttggggtcagagagggagttggggccattctaggggtggccttgtaggcattgtaaggatctgggttttcactggtggtgaggtggggacgccatggacagcatgagaaatggtctggtccggcgtggagaatgcactccaccgggagggcgtcagggggagcctggctaggaagctggtgggaggctgggaatccaggtcccggactcagctcttcttttgcattgacttggcccttggcccgccccaaacttgaggtttgaactgttgaggtcagaacctaccatgaactccagcctggaggaaagatttctaggaaggccttgaagttcagttataacctgagtgatggtctcattagcattataaaagttccaggatggggttctgcagcactgggcccgggcagtggtccagatgctgacgagtggtgtagcgtcgggcaagtcttctcacctactgagcagactcagttacttcatctgtaaaatgggactaaacgtcccggttgcctcagcatcaaatgagatcgttcgaaagcaccttttaaacatcattaccgattacaaaaagcaaatgggaagtcggagccgacctcagagggctgacttggcacagcacttcaaatttctcgttttacaaagcacgaggcgcgagtttgtctcgctgtcaggacctgcttccctctcacctagcacccgccccgggcccgagagccgcggtgcggccgtgcgtacaggagggagggaggcggtgtggggtcccgggcagagctgctgagagccccggccccgcatctgactcgcgctctctcggcgggactccgggccagggcccccaggccggcgcgcagggcggggagcggctgcgggcgggaggacgggcggggcggcgggcggctacgcggcctgggcggagccgcccccgccctggccctcgcggttgccctgcccccgccagccccaggctccccgggcccgcgccgcgccgctctttctccgacagccgccgggggtgccctgcaagctgttccgcgcgtcctgcccgtctgtccccgcgggtcgtcgcccgccacagccgcgccatgaccacccagcagatagacctccagggcccggggccgtggggcttccgcctcgtgggcggcaaggacttcg

SEQ ID NO: 5661 - DNA, 2300 bp, Homo sapien
agaggccgtgcaccttttcccctctaagcaggctcgggtactgccagtagctcctgcttcgtaactcattttttgttgtctccttggctttttgcttttgttgtcatttaaaataggccatgatgttttgctttattttgtttttaactttttctctgtagcctaaagctactttctcgtccagtggcagaactggcctcactttgctttactactcttggcatcaagggccagagaaggaggaagggaggggcctggaagaagggtatgggtgtggaaaagcccaggagactgctccccagaatctctctctcaggtggggggttggaaggaggcgttgcctaggaagagttcagaaattctggagcctttgacctgatgatcccactcttgggaatttctatcttaattccaaggaaacaaaaatatcacctacatgaagggggggtatgagtaagtacgttatgtgtatttacttgatggaatattatgccgctgttaaaatggtcattaggagaaaagcagctacatgggaaatatttgttttaatcactggtggaaagagcagtgtaaaaatggtggattcttttaattccaagtttgggctgggctaccagtcactgggggaagtgctttacctgtgtgatattgttacattctcctggaaaaccctcacaggtggggcgtggtttgccaccctcattacacagatggaaaaactgaggccctgaggggttaataatatggctgggatcactcagctagtgtgtactgttgctgaatcaaactcaggaagctggacagcaacattgtgctgcagaggtttgagtttcaggagatggagttactaatttttaaatacctttccaaaatttcttcaagtttggttgttacatttaattaaaagaaaggaagaacatggggctgggcctgctggtagctcagaggctgccccacactagcctggggaggcctggagcaaggcctacagtcacagaaggaactagagcaggtacttggatttctggccttctcaccagcacccttcttccacccatctcagaaatcagagctcaagggagactcagacatctaggagaattagccttcacctataggtgggtgtgggcaattaacaggtcacagcctgtggggccagcatgcggaagcccaggcaccaggtggggcagtggccctgctcatgtgtggcccacaggcagcatccagactggcctgtcagtgtggtttatagcaggcgaccccccttttggaaggctgattgttaagggcctaggtaaggtgacttagtctcagcctaatgaattacaggggtgtgggactaagcttcagtcccagcatttggagaaatagaatatatatatgtatcaggaaacccaaatgtttatcccatttggggaggaagaagatgagctgtgagatgggcagaccagagttcaaatttcagcctagtgatcttgggcaggcctggaatcctctctgcctcagttttcttatctataaaataggcattcctaactcctagttctggaggtctgggtcttcaggataaaatgaggtgctaattatggaatgctaagcatggatcctcacaccaggcaagtcagtgtttaaaaacccatagctagtcatgattatgtttgtagcttggttaactctgggcttggaggggttcctccaagcacacatgtcccagggcgacagggcctgccggccttccttccttggcgtgcctttatctattttgggatggggacctgggcggggcttaggctacaggggagcagggaggatcttagcttctgtaactgagcagaactcaggaaagtctcagccaacacagaggacatgacatccgaggggagctccagggatgcgtggaatttccatcaggtgagaagggaggaggaggcattctcggcagagggcctcataggaaccaaggcctagaggtctgaaagtatctgggcaggacccctctgcttcctcctgattgtgaccccagcacctcctgccacacaggactcagtaagtgctggggcagcttactcacaaacctcatgctctctttctttcttgcagaatgtgatggtggttccaaagctgtgatgaatggcttggcacctggcagcaatgggcaagacaaaggtaaggttcttggagagaaatctggattggtactggaaggcatttctaaaggtgcggagtatgtcaggccggggccatcccatctgcctggtgcaaacatcattggcctaaccaagccataaactggtgacctg

SEQ ID NO: 5662 - DNA, 2300 bp, Homo sapien
gaactcctaggctcaagctgtgcacccacctctgcctcccaaagtgctgggattacaggtgtgagccaccacgcccagcccctttttgttttctaacagctaatttcattttccagcagatttcatgtttctggacattgtatttatttgttccctgaatttatcatatttatagcattttgtcttctgtggccagattgcaagctagctggccacaaaacaccagtgttttaaaagtttttaaagtagtggccagagttttaaaaatcagaaaatcttacataatttgatttctaactactcatgaaaaactagaatatctagcagtactgggctctattcttgcatgggacagtgggctggaatggaacagaggttgccccctcaggagggagtccaatttgctgtggtccccacatcacctgtttgctacctgtttgatcctctcaggcttttggttttgtcacccctgacttactgttcgtttaaaatcttatcctaaaaaatcaagagatctttaggttcaacaaaacaacctttttttttgttgaaatggagtctcactctgttgcccaggctggagtgcagtggtgtgatctcggctcactgcaacctccgcctcccaggttcaagcgattcttatgcttcagcctccccagtagctgggaccacaggttgcaccaccatgcccagctaatttttgtatttttagtagagatggggtttcgtcatgttggccaggctggtctcgaactggtctcaacctcaagctatccgcccacctcagcttcccaaggtgctgggattacaggtgtgagccaccacgcccagcctgatacctctctttttaaataaggaaactaaaatttaaatgatagggaaaaaaatgttgggacagtagggtgaaacaaatatttttttctttaaataaatttgtgtgttttatggctgggcctggtggctgatgcctgtaatcccagcactttgggaggccgaggtgggcggatcacctgagatgaggagttcaagaccagcctggccaacatagtgaaatcccgtctctactaaaaatacaaaaaaattagccaggcatggtggcgggcacccataatcccagctattcaggaggctgaggcaggagaattgcttgaacctgggaggcaaagtttgcagtgagccgagatggcgccattgcattgcactccagcctgggcagcaagagcaaaactacatctaaaaaaaaaaaagaaagaatggaatttgtgtgtttttaactaagaggaaggaaagaaagcaacaatgtaatttttaaaaagtattctttacaaatatcaagtcattatattagttttgaaacatataatgtcctttgtataatgtgatttactcacaaaaataccatgttgggaacatttatacaaatttactaattacatttgctcttaaatattttcattttatttttcaaatagaagtgaactactgaactcaaaggagttgaatgtttcttaggtttttttccttttaatagacaaaaatataaaactggacaacagaagtcaccagtgttttaatgaaacaaagaattagtttttgggtctggtaccttctaaagcatctgtagattttagaaaaggaatttcacaccaccaccaccaccaagaaagcccaaccaacctaaaacttgaataactgaacttaatccgagtcattcctattttatgagccatcatgatccacagtttctgtttcttctcatgtcgtcgtttcctttctgaaatcattcttgtagactgctgaagactaaatgctagcccagatggagactgaatttcaacctttttcatttttggcttcttggttttggggtgagagttcatcagactgttggtatacgtgacttgccaccaactctacagcaacctgctgtctctgagctttagttgtttctgagataaatgagatcatgtctgggccttcctcaagctctgacattctagaattccactattctgtcacatactgcacatactcagtgctgggtaaacctggagtactggccatgtaacaacttctgtggggttcaaagggcagagtctcagtagagatgggttcctaatgtcatcgtttatttctcatggctgccagtaataaacacgaaagaagaactaaatatagtgagttatgtactcaccagctcatggtattatcctgaacttgccgcactgagaggaaattctgtagctctgtttagtagatggtacagagtaaaccccaggcagagagttttcatcttcttg

SEQ ID NO: 5663 - DNA, 2300 bp, Homo sapien
ccagctaattttggattctttagtagagatggggtttcaccatgtttcccaggctggtctcaaactcctgagctcaggtgatccaccgctgcccaccttggcctcctagagtgctgggattacaggcgtgagccaccactcccagcctattatgagcatctttatgtgtcaataaacctcttcattttttgtagctattaatatatgatattctgtcatatggttgtactattattaaccaatgcactcaaattggatatttggattgttttgattttttttttttttggctattctaaaatggtgttgccctgaatttgctgggtaagtaactagtctctctaccctttgttatacacctctgtggataacctcaggataacgacactattcccacctggggtcgtgtggtggatgtgagttaacgcatgtaaagctcttagcacaagtatagtacggtgcatagcagcctagacgtgctcaataaatactagctgttttattactttatagcccagagagagctgtcttacacagattgtggagtaaataaataggagagccggggaagtgttctttgaaaagctgcaggatgaggtgcagataggggaaggccgtgggctgggggctccctaggttgagtagttccccagtgttttctcatttatagagtaagcttccagatggctaggactcttctttttttttttaatacacagcagaggacaccaggtggtcaccaaagacttgtcaccgttccctgacatctaagaatctttgctgatgagtttccgatcagtctgtgcagttatcaaggccagtctttaccctgccacccacagcctgttcactgagaatgtgctctggctgaagatgcttgcaagggcagctgacaaaaatcagttgtgctcagcccaaagggcgagtgtcttatcttcagggatgtgggaagctgggcatggagggagcaagttccagaccagtacttgctggctctgcgaccttgggccagcagattccccactctgatccctgtctctgtttccttttctgtaactctgagggggactagaggaggtcaggagaatggcatagcacagtggttagctctgaaccccatctaacacggtgccttccccccacttgcaatgaccttgttgcattgtatgcactctacttttcacattgtagaggatcttatttatttacttgtctccactaaaatggaagcttcctaagggaaaaggccttgcctgtcttgttctctgcagttaacactggggtccagcactgccacagagcctctaaatatatgtgtgttgcatgagtgaaatctcagagcctgggttcaaatcctggttgcaccacttgctgtgtgacctcggacaagccacttaaactacacctcagttttcctgcataaaaatagtaattattttcagttttctcactagaaaaatatggattagtaatcgttcctctcttatcaggctaagaggatcaaatgaggaaatatccgggaagcattaagcacactggctggtacagagcacacgaatgacaacagcaaacgtttatgtagcacgacggccaggaactgatcaaaatgcatcacctatgttaactatgttaatcttcactagattttacgaagtcggactattatgccattttacagatgggtaaactgaggcccaggagttaaataacttatcactgttattttacgtctaaggttccttccaagctccccgtgggcgacccttccgaaggaccagaaggcgcgccaggccagcgtccggcccggccaggacggaaagggttactaggcccgcgcgcccgttaccggcggaggccggcgggctcacaatgccaggagccgggcgccggacacttcttcgcctcccatccgcgcacacgccccttcctgtcacggctgggcccggccccgcccccggcaccgcccgctggccgggcgctgccagagtggacggttccagaggcatgctaatgagggggcgggcaccgcagcccattggttgtccgcggagtgtcggtgaagtcagcgctgagtcccagaaaaacagagcggggccagctgcagcgtgtagtgcgagtggggcggacgcgcgcagcccgcccgcccggcgaccagcaaggtaagcccgcgctcgcccgcccggccgcgcttgcccgctcggcggcggcagcgccgggggtgtgcgcggctcggcccccgcgggcggcgcctttgttccgcgctcggaggaggcgcatttaaagggccagctgttggaggg

SEQ ID NO: 5664 - DNA, 2300 bp, Homo sapien
ctaggcgtctttactgatttctggcacaaaaatcggatcataccattccagcacttaaaaagtcatgtttctctgtttttaaggattataaaattcaaaatctttagcataccacaaaaaaccctttgtaagtttaggataccagccagacccctctcctgtcatgtcctactgcaagtagcctcttttcacggggtgtctcacacctctgcatatatcattcccttattccctcttcctcatatgatcctgtactcctctcctcttttaggtaaactccttacttctagtgcttcaaagcacaatttgaatatcaactctttttaaagccattgtattagtctgttttcacactgttacaaagacatacccaagactgggtaatttataaagaaaagagatttagatgattcacagtttcacatggctggggaggtttcaggaaacttacaatcatggtggaaggggaagaggcaagtcttacatggtggcaggcaggagaaagcaaaccagtgaagggggaagagtcccttataaaaccaccagatctcataagaactcactatcacaagaacagcatgggggaaacagtcccatgatccaatcacctcccatcaggtcccaccctccataggtggggattatgggaattacaattcaaggtgagatttgggtggggacacaaagtcaaaccatttcagccatccctgaatgtctggccatcccattctttagtattcatcacatggtattgtaattatttgctcatatatctctctcttccataaggctgtgaactcagctatgtcttcttccacacccagggaatgcttggctgtctcagtccattttgtgctgctaaaacacaataacacagactggataatttttaaataatagaaatttatttctcacagttctagaggctaggaagtccaagatcaaggtgccagcatctggtgagggctttcttgctgtatcctcacgtggtggaagggcagaagagcagaagagaacacccacctccacaaaccttttgatagcagcattaatctattcatgagggtcactctattcataaaggtggagcactcttgacccaaatgcctcccattaggccccacctcccaatattcttgcattgggaattaagtttccaacatatgaattttgggggacatattcagaccatagcagtagccagtgtttaataaacaagaaaatgaataaataggcttagtagtgttatcagggacgacagaagggcatgatgcctttctgtgcccaacctcctatcaagtgctgccctcccaccacccagcactatgtgcctatgcaggaatgtgtcctttgagcaaaatacagcaaggaaagagggagaaaaatctgtgttttcactttttttctttttctttttaagaggtggggtcttgctgtgttgtccaggctggatttgaactcctgggctcaggtggttctcctgcctccacctacgagtagctgggactacaggcacacaccacagtgccaggtttttgtggtctctctttaaaggtgagtctgcattcacctttggaatagttctagttgtcatagattgaatatcctattttaaaatgcaatattcttacaactgcctttgatgaaagggagttgagatgggaccattggggaaacctccagatgactagggggcaagtaatttgattgcagtgccaaaatgcttccatttaaggagccaaagtttgcaaatgtgtgtaaactgatccaatctattcccaggatgtgcctgaagtaacaaacatatgtaagttgatccaacctatttccgaggtgtgcccgggatataaatggttaacattgacaaacacaccttatgaaatctaccagcagctgagggtgccaggcacctcttctacctccctggaaggcccagtggggcggcgtttcgaaggtgtcttcgcccctgtctccggcccctgtcccctcccgggacgtgggcgttccccctgaactcgagtcccgcctcttccaggctgccggggcctggtgggctggcccgccacgtggagcgctggcttgattctcgaaaggggcctacgccattgccgcgccgcagctccaggacaggccctcgccccacgtcaacagcgtagggccggctgcccaggtttactcttacgccactgacgtaacgtcatcgtgcgggacgtggacggaagaaaaaagagagtgagcgagcgccggaatcagcccggcgtggagtgcggacccgcggtagtgccagggggcgaaggcgg

SEQ ID NO: 5665 - DNA, 2300 bp, Homo sapien
ctcctgggctcaagtgatcctcctgccttggcctcccaaagtgctgggattacaggcataagccactgttcccagcctgaagtagttatttcaggttaggtttaaaatacctaatgtattttccttacttagaaaaaaatttgaaggcagataatctacagatttctgttgttcaaaaatctcatatatttcaaatattttatattcttgaatatttggtcagcacagagtttcatgaggttaaaattgtgctctttctattgtaattataaaaatttacatttttacaattatttacatgaaaatgcattatctggttaaaaatcaaaaccatatagaatgatatgcctttctgcattttgcaattaatcctcctggagtactgcattaggtataccatatttctattctggaaactttcgaggctctctgatggcttccagactacttggatgcacttcataatctaacccttacgtatcatcttctttgactttacactgctcctgtattcaaatcctttactttagccacatgatctgctcaagccagtgcctactaagcagctcacacataggagatactcagtaactgttatttagattaatcaaggaagccaggtgccatggcttacacctgtaatcccagcactttggaaggccgaggcgggcagatcacttgagatcaggagtttaagaccagactgaccaacatggtgaaactctgtctctactaaaaatacaaaaattagccaggtgtagtggtgggcatctgtaatcccagctactggggaggctgaggcaggagaatcgcttgagtccaggaggcagaggttgcagtgaactgaaatcacaccactgtactccagcctgggcaacagagcgagactccatctcaaaaaaaaaaagatcagaggtcgggtgtggtgggtctcgcctgtaatcccagcactttgggaggccaaggcaggcaaatcacaaggtcaggagttcaagaccagcctggccaacatggtgaaaccctgtctgtactaaaaatacaaaaataaaaattaggtgtggtgggcacctgtaatcccagctacttgagaggctgaggcaggagaatcgcttgaacctgggaggcaaaggttgcagtgagccgagatcgtgcccctgcactccagcctgggtgacagtgcgagacttcgtctcaaaaaaaaaaaaaaaaaagatcaggaataataacatagtcttattgtgaacttttgtgttcttccactaagctacattgccttccttattactgaataatgcttaagaaacaatggcttagtacttggtgattgactataggcaaccatcaggcaattcaagcagatgcttctttacccttctgcaggctataaactgtacttcctgctgtctcataccagtttccctggagatccaggtattgtgggcatatgtaggtctcctgtccaacccgcaagctcatgtatcaggagttcgattcctataccagtgccagtctatacaggtaagtcatggctcataaaggatcactaaaccttgcaaagcctagattgtcttatcagtcatttgttaaccaaataattttttaccttccaagagctaatttatgttagcaaccaatgtttgtttaaagtgagctgacataatttgtcaagtctattcaccctgcctgattactgaaattaacatgatgtcatgaataccgcttatatccttttttaaaaaaaatctgaccccagattatagtacaggttaatttcttttcagtaatcctaccattattactattctgattgattcaaccacagaaaacaccttccataattgttcaatctgtcagccacacagttatatgtgagtccctgagcctgttgattgtgattaaagttaccgctgtgactagtttatagttaccagctcttggttgtatctgctccattaaatgaacacttttaatctgtagcaaacatatacctattgtttattatgcgccttaggagagctttagcatctgccttggtgtttaaaccaatctttagctatagaagtttaaaaacatggtattttcattttacttagaaatgacggccgggcgcggtggctcacgcctgtaatcccagcactttgggaggccgaggcgggcggatcacgaggtcaggagatcgagaccatcccggctaaaatggtgaaaccccgtctctactaaaactacaaaaaatagccgggcgtagtggcgggcgcctgtagtcctagctacttgggaggctgaggcaggagaatggcgtg

SEQ ID NO: 5666 - DNA, 2300 bp, Homo sapien
atatcatctgtgatggtagaaattttaggcaaaaattctacttagcctatgtttaccatcactaccgccaatatctttgcactgaagtgagagacaaaatgtaaactttctcttattcatttaagccatgaaaaaatagccagatagatattttgccatctcagttcaccttctttcttagcttaactttaacttttatttcatgtgtaaagatacaaataactgcattttacatgaggtaaatatctcctccatgtggttttcagggtatgagttccgaaggaaatgtttaaatagctcttggaagcgttagggtttgaagatttcagatcagaggtggaaagtggcccacagaacagcagcatcaacatcacctgtttcagagcaatgcttttcaaattctaatatgcatacacattacctggagatcttgttaacatgaagatgttgactgaggtctgcggagtggcctgagagtctacatttctgagaagctctcaggtgatgctggagctactaatgtgtgtaccccactttgaataagaaggatctaggagatgtgtggagagtgagtagtctgaaaggccccagaattgagagccccattcatgctgacttttcagcaagctgaaaagtcaggtaattaagatgttatccattatcacagagggtaaaggtcaggttcatttaacgtggaatcctcatttgctttcaatgatgcaggtattgtaacctcttttactctgtacaaatgaccattacttatatgaagaatgaaactggcaaggggcatgtttccctatgttcttttttcaatttagcagacttggagtagtaaagcagacagagtgttgtcaatcacctgccatcttctgggcaggggacagcatcacagcccttttcctacatctctctactggttctgaagtgccataaagagatgactgcaagagtttcggtagatttatacattgctatcatagaaattagagaattcttccagaaaatacccttttgaagtatctaaaatcttgaatggaggaattataaggcttaaggaataaaatgcaacaaatctctaaacttgagagatggcaacattgttaggactcgtcagttgttgttaggacttgtcagttgaagtgtagaggaaacaggaagatttggaaaggacagatcaaataattatcataattgtctctaattgtcccatgttcctatggaaatagtgcgattctgttagagactcatctggtatggggcagacatgagcattatcgagcttcctattttctttttttttctttttttttttttttttttttcttttttttgacagagtttcgctcttgttgcccaggctggagtgcagtggtgcgacctcggctcactgcaacctctgcctcccaggttcaagcaattcttctgccttagcctcctgagtagctgggattacaggcgcctgccaccatgtccggctaattttttgtatttttagtagagatggggtttcagtatgttggccaggctggtctcgaactcctgacctcaggtgatccacctgcctcggcctcccaaagtgctgggattataggcctgagccaccatgcctggctgagcttcctattttcattacaaattgctgatcatacacattcttgaccatcaatgacttgaaactgactggcattcatgaccatattcttatctcagatctgcatattaaaacaataattcagttaatagattgtgaataagaagtgatggaaatcagaattgttatttctggagatggagtattgattgggagccttctggggaaatattctgtaacttgatctggatagtggtaatacaagtatataaatttgtaaaaattctttgagtttacacttaagatttgcaccctgtatattatgcttcaataaaaatattttttaaaattagttacttggcatgtttttcttttatctaaacgctttttcttttaaaaaacattttagcaaacttaaactatttccagaagcttcaaaaggtcaatgcaaccaacttccaggccctggctgcagagtttggaggcgaatcattcacttcaacattccaaactcaatcaccaccatctttttacagggtgagcctggggaaggggatgggattgtttggtttagtttttactctcacagcagacagctgacaaggtaactttgcagcactaccctgcagctagctaaaccattgtcagctctttggagggcagtactgtccacgtaatcatgcccttgagttaaccttgtttctac

SEQ ID NO: 5667 - DNA, 2300 bp, Homo sapien
caatacaaataatctttttgcttaactataacaaaagagaaaaaaataacttttctaaaaaaaagttgtgttaaaattcaaaaataagaaaaagcaactcaaaaagatccggaaacattacttccttatcactcatctctaaaattacttcaaccaacagtcttttgccaacgctaataaattcagaaataatttaacactatttgagagttgccatttaaattccaaactttgaaatctaaaatagtctctgatcagatgtacaatggaaattttatagaaagatcattacatggtaaattggttgcaaaaagaagaaattttatagaaagaaatacaatcctgaaataaaataaactaaaaatattcctaaggattaattctaaagagttcaacaaaacaatttttaatatatttttaaaatatttaatgcacatctaacatgtcccagacactgttctaggcatggggatatttcaatgaacaaaacagacaaaactcactatttttggaatttacattctagtatatacatatgatcatataatctgaataatatgaacttggccttttcctatagaaattactaataaggtaaataaatgttttaagaccaaacacatatctcccatagctgtctatcacacaacaacataaaaacatatttgaaaatatttataacacagagagacttttagctactgacttcaaaacattagaaaataaagatcttgtaagagaattcaagtaaagtcaaatgtcctaaaacttacctgagttaaatgattcacttgtaaagggaggtgttgaccagattttaggtaagtgtactagattttagataactcttaacagatgttaatttatatactaaaactaaatatccaaaataatccagatgtcagaaccgtggacataggaaaatactgggtctaggaggagcaatattttgatcatctacagtcccactgtacaatatggtagctactcacgtctgtggttaactttgaattaattacaatttaaaaattaaaaattcaggccaggcacagcgactcacagctgtaatcccagcactttaggaggccaaggcgggagggtcacttgaggtcaggaattcgagaccagcctggacaacatggtgaaaccccatctctactaaaaataaaaataaaattagccgggcgtggtggcgcgtgcctgtcatcccagctactcaggaggctgaaacagaagaatcacctgaatcctagaggcagaggttgcagtgagctgagatcacaccactgcactccagcctgagcgacagagcgaaacaccgtctcaaaaaaaaaaaaaaaaaaaaaaatcagctcctcagtcacgctagccacatttcaagcgcacaattgccacataaggccggtgactaccatgctggacagtgcagctacggtacatttccaataccgaaggaaagtcccatggcccgcgctgctgtggggaatcggaagaggcacgccattcccgggaagaacaaaaacctcctagagaggcttaaaaaatttgccattaacacggggaaaaaaatcttctatttccattcctccatcttattttctcacctcctagacaatgtttcttttttttattctttctctccctattttctcacatttttcctgcccttttttcttatttttctctcactgctttttctaacaacaaacatgcagtccatctttaatgatttgatgcatttctttagggttttcaaaatttctcaatgttaaaatgtaaggagctgaatgaacattatttctaatgtgttttttttttttttaaaaaagccatatttagaggagactgttttttaaggtatgtgaccttaggtgtgtttcccccacctgagaacattattcttccatagaaagggtttctcaccgttggaatccggggtgaaaaaaaatttgcaattctagttccggcctctggggtttccttgcaccggaggccgggctcagtcctctgggccgcgaagtgggcgcggaacctctcggtccgccgaactcctaccgccacctagcggaaggaaggcgcaagggcttcttcgtcactgacggttgccaggcaacggaggcacggcccggcccgcgttaaggaggagggcgcagaccgaaggacactgaaagagctgtaacaaccccactttcgattggttgaagagctctcagccttctcatgagccaatgagaagaggcacgcggatggcgtcagacgctatgcgactcctcccacccacgctctggcaatgcgattgg

SEQ ID NO: 5668 - DNA, 2300 bp, Homo sapien
gtgccttctatttttcaagtattcttataatgtctggcccatgagagcacaccttcatgtatttcaattctgggcatgttcatgtatgcacaagtgtgtgtgtatctaagttttctgtaattttcagagatttttggaaaaggggggagaagtgggaaaaggacagaacttgttgtctgccatctcagtacaatctccttgctaaatttccaattacatattaaactcttttaatcccaaacacagacaactgctagtatcatatgatctaatttggaaatctctgcttctgagatgatattatatgatctcaatttaagacttggtccccatactaaacctgacatctgcatgacacatgtgaataaatttcattcttcatccacaaaattatctttcagattttaatactggatctcaaaagtattgagagttctatattacagagattcttacaaatacaaaacagcaatacatgccaggcacggtggctcatgcctgtaatcccaacacttcgggaggctgaggcaggcagatcacttgaggtcaggagtttgagaccagcttagccaacatggtgaaactccgtctctactacaaatgcaaaaattagctgggtgtggtgggtacacctgtagtcccagctactagggaggctgaggcaggaaagttgcttgaacctgggaggtggaggttgcagtgagccaagatggcgccactgcactccagcctgggtgacagggcaagactctctcaaataagttaattaattaattaattaaatcaataaataaaacaagtttaaaaaacagcaatacaaataatctttttgcttaactataacaaaagagaaaaaaataacttttctaaaaaaaagttgtgttaaaattcaaaaataagaaaaagcaactcaaaaagatccggaaacattacttccttatcactcatctctaaaattacttcaaccaacagtcttttgccaacgctaataaattcagaaataatttaacactatttgagagttgccatttaaattccaaactttgaaatctaaaatagtctctgatcagatgtacaatggaaattttatagaaagatcattacatggtaaattggttgcaaaaagaagaaattttatagaaagaaatacaatcctgaaataaaataaactaaaaatattcctaaggattaattctaaagagttcaacaaaacaatttttaatatatttttaaaatatttaatgcacatctaacatgtcccagacactgttctaggcatggggatatttcaatgaacaaaacagacaaaactcactatttttggaatttacattctagtatatacatatgatcatataatctgaataatatgaacttggccttttcctatagaaattactaataaggtaaataaatgttttaagaccaaacacatatctcccatagctgtctatcacacaacaacataaaaacatatttgaaaatatttataacacagagagacttttagctactgacttcaaaacattagaaaataaagatcttgtaagagaattcaagtaaagtcaaatgtcctaaaacttacctgagttaaatgattcacttgtaaagggaggtgttgaccagattttaggtaagtgtactagattttagataactcttaacagatgttaatttatatactaaaactaaatatccaaaataatccagatgtcagaaccgtggacataggaaaatactgggtctaggaggagcaatattttgatcatctacagtcccactgtacaatatggtagctactcacgtctgtggttaactttgaattaattacaatttaaaaattaaaaattcaggccaggcacagcgactcacagctgtaatcccagcactttaggaggccaaggcgggagggtcacttgaggtcaggaattcgagaccagcctggacaacatggtgaaaccccatctctactaaaaataaaaataaaattagccgggcgtggtggcgcgtgcctgtcatcccagctactcaggaggctgaaacagaagaatcacctgaatcctagaggcagaggttgcagtgagctgagatcacaccactgcactccagcctgagcgacagagcgaaacaccgtctcaaaaaaaaaaaaaaaaaaaaaaatcagctcctcagtcacgctagccacatttcaagcgcacaattgccacataaggccggtgactaccatgctggacagtgcagctacggtacatttccaataccgaaggaaagtcccatggcccgcgctgctgtggggaatc

SEQ ID NO: 5669 - DNA, 2300 bp, Homo sapien
gggcctcttgtcttttcataaccaaacccacctttcttttcccactcctgctccccaagatgcagtgttttttgttgttgtttgtttgtttgtttgtttgtttttgagacggagtctccctctgtcgtccaggctgaagtgcagtggtgccatctcagatcactgcaaccaccacctcctgggttcaagcaattctcctgccttagccccggccccccccaccagtagctgggattacaggcatgtgccaccacgcccagctagtttttgtatttttagtagagagggtttcaccatgttgaccaggctggtctcgaactcctgaccttaggtgatccacccccctcggcctcccaaagtgctgggattacaagcgtaagccactgtgcacagcccccaagacgtaattttaaaccatcattaatttttataataaccatgataggccaggcacggtggctcatgcctgtaatcccagcactttgggagacggaggcggacagatcacttgaggtcaggagttccagactagcttggccaatatggtgaaaccctgtctctactaaaaatacaaaaattagccgggtgtggtggtgctggcctgtaatcccagctactcaggaggctgatgcaggagaatcacttgaacagaggaggtggaggttgcagtgagcagagattacaccactgcattccagcttgggcaacagagccagactgttttaaaaaaaattttttttaatgatactcatgattaaaataactatgtaatttatctaaattattgtttacaagcatttatctaagtaagttgaataaacggtgtctacatgtttagtagaaaacaaatgtttagtagctctggcagaattcatctccttgctttttaagagattaataaacaatgaatacattgtagaggaaagaagtatgttttcactttgaaacctttttaaaaatttttctttagccatttagtattaataacaagggaagtagtattaataacaagggaagaggggtttctactccttttctttttttctttgctcttcttcctcatttcatcccttggagactgtctatagtcccacattttgtccagttttgaatctgtgtaattttgactctatggcagaaactgtttattgctgactatacatttgttctctcttctctcaaataaacagagccccaactttttactgagcacaatatagccaaaagatgacattgcccagcctctttcgcagatagctgtggctattccaggatcccagaaaatggtagccacaaatgaaggcctctgaagcagaactgccctggatctttactgtgctggtgccctctcggactttctcttgcccttctgtctctggcctctcattctcccccgagaaatggaaactagaattcctcttcccccaggtgggtcatagaagccagcaacaaaacctaaaaatatcactttaactttctctttctcccagcctttctgtataaaaactggccataaagaaatgatctgacctgcctcgtctgactgttccagattgttgaaacccattctggagaggcttctaccccacatttagactgttgaatcccattgcagagcgggtcctgtcccacatccagaaggaaggaaggcacagaggtcaagaagaatctagatagacagcattgctgagtttctcccactcagtctatagcattagatcacactctttttttatcctgttatatttctacatggctgttcatacttggttgaacctaagcataaaagtggacaattcccctatatcttttatttattttatttattttcactttttttagggacagggtctcacactgtcactcgagctggagctcggtggcacaatcacagctcatgcagcctcaaactcctgggcccagcatacctggctaattttaaaattttttgtacagatggaatcttgctttgttcctaaggctgaccttaaactcttggccccaaggcatactccctcctcagcctcccaaagtgctgaggtcacaggcatgtgacactgtgcccagcctccccttcaggtcttcattctgcagtctcctgtgtacgtgtaaaattatgatcaaataaatttgtatgccttttctcctattaacctgccttttttgtcagcgattgtcagtgaaacttcagagggcaaaggggaagttttccttggcccctccagttttggtgctgtgaacaggataccaaagctgctctgttcttctggaagctgcaatgaagggaaccaaggacctga

SEQ ID NO: 5670 - DNA, 2300 bp, Homo sapien
ctcatggttctattctccctggtccttttcacagtggccatcataggcttgcttatctttcacaagccttcatatttctggaaagatatggtatagcaaaagcagctgaaatatgctggctggagtgaggaaaaaaatcgtccagggagcattttcctccatcgcagtgttcaaggccatccttccctgtctgccagggccagtcttgacgagtgtgaagcttccttggcttttactgaagcctttcttttggaggtattcaatatcctttgcctcaaggacttcggcagatactgtctctttcatgagtttttcccagctacacctttctcctttgtactttgtgcttgtataggttttaaagacctgacacctttcataatctttgctttataaaagaacaatattgactttgtctagaagaactgagagtcttgagtcctgtgataggaggctgagctggctgaaagaagaatctcaggaactggttcagttgtactctttaagaacccctttctctctcctgtttgccatccattaagaaagccatatgatgcctttggagaaggcagacacacattccattcccagcctgctctgtgggtaggagaattttctacagtaggcaaatatgtgctaaagccaaagagttttataaggaaatatatgtgctcatgcagtcaatacagttctcaatcccacccaaagcaggtatgtcaataaatcacatattcctaggtgatacccaaatgctacagagtggaacactcagacctgagatttgcaaaaagcagatgtaaatatatgcattcaaacatcagggcttactatgaggtaggtggtatatacatgtcacaaataaaaatacagttacaactcagggtcacaaaaaatgcatcttccaatgcatatttttattatggtaaaatatacataaatataattcaccattttaacatttaattcatattaaatacgtacaaatcagtgacatttagtacattcacagtgttgtgccaccatcaccactatttagttccagaacatttgcatcatcaatacattgtctagagacaagactatcctgggtaggcagaaaccatagatcttttgtgtttacagctatggaaaccaactgtaccataaagatagttcactgagttttaaagccaagccacatcttatttttccaaggtttaatttagtgagagggcagcattagtgtggagtggcatgcttttgccctatcgtggaatttacacatcagaatgtgcaggatccaagtctgaaagtgttgccacccgtcacacaacatgggctttgtttgcttattccatgaagcagcagctatagaccttaccatggaaacatgaagagaccctgcacccctttccttaaggattgctgcaagagttacctgttgagcaggattgactggtgatgtttcattctgaccttgtcccaagctctccatctctagatctggggactgactgttgagctgatggggaaagaaaagctctcacacaaaccggaagccaaatgtcccctatctcttgaatgatcaagtcacttttgacaacatccaggtgaatataaaaacttaataaagctgtggaaaggaactcttaatcttcttttctgctacttaggttaaattcactagatcttgattaggaatcaaaattcgaattgggacatgttcaaattctttcttgtggtagttgcctatactgtcatcgctgctgttggttgagcatttgtggtgtaccacgctgtgtgctcaagggtattacattcatcttctcatttaatcctcacaacaatctgaagaaggtaggtattacaattcccacttcatagaaacagaaactgaggttcagagaggttaagtcatttgcccaaatggctgagccaaagcctaccatgtacctaacctttattttctttcccgaacataccaggctgtctcctcataacttccaagcatgcacttaaaactccacatgaatacaaggttcatgggacttggtattcatagaaagggaggcagaaagctggtctgttcctgataggcttgtaatttaatatcattctgttcatgtgctttggatggaagcacatctggcatatgatgctaatcagtggttcccatacccctggcttcctaattttaatgtttgctcacagcatagtagattgacatcaaatagtggccgatgatgatgaaaataaaggtcaaataagttgagccaataacagccgcttttttccttctgtctgcgtatacaaagcactgt

SEQ ID NO: 5671 - DNA, 2300 bp, Homo sapien
tgtggatgaaatgctatagagcaatacttattttatattctggtatttaaaaaaatatatgttgttaagggtgcttattttttcctttttctgtgttgtatttttagtgatctatcagccatttcttttatatttaggtttatgaaaaaagtaaaaggacaagcttactggcaaaactatatatacctttacctaactacacagagctgaaaggcaaaaccgctttgcaatatgtagagtttagctctgataagctggtcatgcctgccgatggagaagtaggaagcagtgagtttattaaaaatattacattccccctattttcttcctgagtaccatattcctaagtgaccctggctcactcacataagtacaaaatcctgtatttacaatattcttttttgtttgtttgtttgtttgagacagaatctcacccaggatgaagtgcagtggctcgatctcagctcactgcaacctccacctcccaggttcaagcaattctcgtgcctccagtagctgggattacagatccctgccaccacgcccatctaatttttgtatttttagtagagacagggtttcaccattttaaccaggctggtctcaaactcctgatctcaggtgatccgcccccctcagcctcccaaagtgctgggattacaggcgtgagccaccgcacctggccctgtgtttattctgttaaaaatgaattaaattattcattcagatgttaaactagattgtttaaagttttgtcttgggtcagatttttgggaaatttcaaatgagcagttagcacccacgctttttgcaggccatccaaggcaaggacagaatgctgtctggaaagcaagctctgcttttgagtgggctggctgctctgcctcgacctctcctttagtgaacctacaggtgctcgcagacatatgggtttgtctttgaactgtatagggaagggaagaagaaaatgagggagggaaggaaagagggagggacagagaaaaggagagaagaaagaagggatgtttctgttagttgtttttcaattgattttactcctcttatacggttaaatgtaagttagtgcgtctctgagatcactgtcattcctctccttctccccattattcctttctttcaccttcctaggggtttggaaactacttgggcctatttggtgaaaagtaaggaagtatgaacaagtgagcaaggaggagggggcggggggaaatgggcagagaacgagggaagaacggagtttgcttcaagtccagatgaagcagaaaaataagcttatggagacccgggacaaaagactcaggactcaaaaaatttagggaacactgtgcactcagcaaaagttttaagaagtattgttaaactctttggagattagatgcagaagacttgggaatgtaaggaaagaggagaaagaacagcttgctggcctctttttctgctgccaatggtcctttcttgctggaagccactcccacagagaatggttaagaagcctccaggcatgaaaggaagaaaatcatgatattcatctctacatattcatctcaatctttaccttctcttttgtagtccttgaaggatcttagagaggagatgagggagagcactaagataagagtggagttagggccgggcgtggtggctcacacctgtaatcctagcactttgggaggcccaggcaggtggatcacctcaggtcaggagttcgagaccagcctggccaacatggtaaaaccccatctctactaaaaaatacaaaaaattagccaggcatggtggttgacacctgtaatcccagctacttgggagcctgaggcaggagaatcatttgaacccaggaggtggaggttgcagggagctgagattgccccactttactccagcctgggcatcaagagcaaaactctgtctcaaaaaaaaaaaaaaaaaaagagtggggttagcacagatcttcctttgtgttcctagagttccacaagtaaaactcaggaaaaaacccacaatgtgcttcaactgcacttaaaacaattcatatgtttttaatgccttttataaacagatgtgccttttcttcttgagggaaatggaactgaagaactctgtcttttgacatcaggaaaacttagctattctctatcatggagcttagatgaaaatggtcttcctctgatacctatgccacaatcattaagatcttcttactgcaggtaataaacttttatctttgaaaaataatgccaggtctcagcaaagcatcacacaaaacatattatgtgtaa

SEQ ID NO: 5672 - DNA, 2300 bp, Homo sapien
taaaattatattctcattgtggtttaatttataatttctttttaaagaggcagtttttttttcaattttttttaaattaagagactttatttttagagcaattttaggctcacaagaaaattggatgggaagtacagagttcccacaaatgccctcaccacagcacacacacagctccctcagcatcaacatctgcattgtgtgatatttgttacaatcaatgagccaacattgatacatcactatcaaccatagtccatatttaacgttagggtttactcttggtgttgtacattctataggttttgacaaatgtacagtgacatgtatctaccattatagtatcacacagaatggttacactcccctaaacatcctgtgtgctctgtctattcatccctccctccccctggaaccttgccaaccactgatctttttactgccttcacagttttgccttttaaagaatgtcattgtgtacatcaaggttctccagagaaacagaaacaataggatgtagacagagagagagagagagaaatttattttaaggaattggatcacatgattgtggaggctggcaagtccacaatgtgcagggtaggatggcaagctggagacttgggaaagagttgcagtttaagtctgaaggaaatctgctggcagaattccctcttccacaggggaggtcagtcttttgtctattaaggccttcaactgattggataaggtccacccttattatggagggttatctgctttactcaaagtcaactggcttaaactgtacctaaaaaataccttcagaggccaggtgcagtggctcacatctgtaatcccagcactttgggaggtcgaggcgggtggatcactagaggtcaagagtttgagaccagcctggccaagatggtgagctgtgctggtggatgcctgtaatcccagctacttgggaggctgaggcaggagaatcgcttgaactcaggaggaggaggttgcagtgaacagagatcgcgccactgcactccagcctgggcgacagaaggagactccgtctcaaagaaaaaaacaaaaaacaaacaaaaaaaccttcagagaaacatctagaataatgtttgaccaaatatctagaaactgtgtctcagcccagttgacacataaaattagccatcatagtcatatagttggaatcatacagtatggagccatttcagattggctttcttccatgaaaaacatgcctgtcaagttttctccatgtctttttatagcttgattgcttacttctttttacccctgcataatattctattatatggatgtatcacagtttacttatttatccacattgagcttctttccataggttcattggtcattggtattttcttttctgtgaaatgacctttcattacttttgtctgtttttcttttttttttctttttggaaattattttatttcttccatgatgatttagagggactatcttcaaaccagtacaaatatttcataaataatatctgactgttttctaaccaattgagtaatttgttgcacaataagccacctcacatctaagcaagaaatacattaaatttgactagtaaagacattatataatgcattaggacacaattaaaatttgctttaaatatttatttgagagagaggacaccacacttcttctcaatgaagagaaacatttttacagtccagaggtcttttttttttttttttttttaacaccaattatgccatgactttatagggagtaggttccagcagctcaggctccttcccattgggtctcacaaagggtgcttctctgggtgaagcaggctggcacttcagttgaacccaggtacctttctctctggcttctttttctgatcattttccttcacgtgtttcgggaagctatctcagctcttagagcacttatgtgctcaatacacacattaattctcttggcaagaatcttgcccttctttgtttacaacaatgccaacagcatgttgggtaacattgtagactcttccagttttgccgtggtaacacctgtgggcattcctttttaaacaatatccattctcttgatgtctacaatatcacctttcttatagattcgcatatacatggccaaaggaacaactccatgttttctaaaaggcctagagaacatacatcaggtgcctttcttcttttcctttgcgttcatcattttggcgaattactggaagatggctgctccagccgaaaggatacttttctctatttttctattgtttcgtctgtctttat

SEQ ID NO: 5673 - DNA, 2300 bp, Homo sapien
cgtgtaccaattccctcggcctggaatgctcagccacctgatacgtacctactctctcacttccctcaggcctttgcatgccttaccttatcatgaaacaaagtccacccatttcttttttttttttttttttccgagacacagtctggctctgtcacccaggctggagtatagtggcgcgatctcggctcactgcaaccaccgcctcccgggctcaagcaattcttctgcctcagcctaccgagtagctgggattataggcgcccaccaccacacctggctaatttttgtatttttagtagatacggggtttcaccatgttggccaggctgttctcgaactctcgaccttaggtaatctgctggcctcagcctcccaaagtgatgggattacaggcatgagccaccacacccagcccacccatggtcactttctagcctttttttctgtttatttttcttcacatcacttgtcaccatgtgatatgtttttttgttgttgttcattgtatctctatttctagtggaataaaaactctatgagagcagagactttaggagttaagtaaataccttaactgtgtccaccttgctctaaaggaattaaataaatcatagtaagtttgaactttgcattttaaggatttactatctaagacacactatggcaaaatatatgtgtaaaatgaacattaatccataaaaggaaatggacattgaagtcttctcatcacaaggcaagtccagaaaacaataatgatttctgaacaaatatatcccagtgaacaatattttcaaagtagaagcgataaatacagtctacttcttatactaatgattatagtctgtgccccatttttctgaaagtgttcttaaataggccctggacagttatttagaagccaaattattataaagttgtttaatagtcatgaaatggaacccaaggatgtagacactatttaaatgccattaaaaatggcatgaagcttttagcctgatgtgtctaccttcactctagaggaccctgcaactgagagacaggccagggcagccttctccctggactatgtcgggttaggccgggatctgccaacttcagcttctgagtttcccttttcttgcctttggttcctgcgggcctgctctcctgggtataagcatcgtctatggatagggtacggctcatatacatgtctgctgatgatcttcaaatgaagatgccacccagaatcacataaaatgtatttatcactttgtagtagttctttatcatcatgtatctttttggacaaaggattcaaagtaaaaggggtgaagttttaaaaatatttacgttttactattaagagattgatctccagtctcagaaaagtggacagtctcactgtcctagggttaccatccacctcttttgtgataatccaccaaagaggttaaaatacaattgattaggtttcctctaatcacatttcagcccccatatcacctcaattgacgtcggagtgttctcacagttttgcagtttcctgatttacgagcacagatggttaattacatccaccatgggtttgacaagcaaggttactagaagtaatcttaaatgtcttcattcaaagctcttgggaatccctacagcaacgaaaataaggagggggaagagattaattaggtttctagaagaaaggtggagtttgaggtggaacttaaaaaaagagcataatttcacaggaaaaaaaaaacgcttcaggggctgcagaaacagctaaagcacatttggagggcctgatgatccacggagcagcccctgggatggaagcggttggtgcaacgtgaagtaaggtaaaccgaatccatgccgtgaagacttttaaacgccaaactgaggcgtcggaactttgctccgcgggcatcgaggagccatcgaaggttctcagcaggtgagtggcctaactggattggtcactgcagtgatccaccttacaatttctccggcgctctctgccgacctcagccggcgatcaggccggcttcgcagtaggtggcggctgagcgccccggcaaccgaagcgccaggccagcccaggccacgccgcgccgtgcgggatgctgaccgtacccaggcgggagccgccgcgccgccgcctggcgctgcacctgggcccggcccggccgccaattggacggctcggggcgaccccgctgtatcgcgagacgagattggcagcggcggggcctcaagtgcccccgcgctggctttgtatgcggagccgcctgccggtcctttaacaatgggcggcg

SEQ ID NO: 5674 - DNA, 2300 bp, Homo sapien
aaatggattggccaacctcgctaccttggtttttgagcagtgaaattggtcatatgcaattttttttcccaatgttgaagatttcaaggagataatatgaaacattcttgctccttgaattatgatgtattaatttcttcaaaggaactttaagcataatataaataaactcattaatttctacagtattcctttgaagtattctgccagtattgctgttgcttcacaaatggcagggtgcttgaaagctgtaatgattcatccagagacactgaactaaattcctaggtcattctccttctgaagaatttcacttcatactaggaacactggttccctcttcttttttcaggcaataagctggataactatgtcatacagaccactttagtgctttcaactttaagtatttgctattggcaaaacttgttaaattgatctttatgtgattttaattaggaagggctatctagattcaagtctgaattacttaagtttgggatcaacttctacctgcagcaatatttagagtggtttagatctaaggaagttcacctctctgccatcactcctgcttccttgggcttagattcttcacaacacatgagcttagaatctcctggcataggcataatatgatggttttaaaccttaaatctaaaatagaacacagtaataggagctttagttataatttcctttcttctgtggaccaccatggaacaaagacccaaagaggcttgatgacaactctggttctgttgctgcatctggaaaatcatagtagtacttaatagtttgtaaatgttctccagccatcagttctagaaatacttactaaaatgaagcctttatatgtagagacagtaaaatgcatgtttggaaagtaaagtgtaagatggtacataatctatagaaacattctggggctggaaagagaatcttattcttcagctgtgcatagctgaaaccttatagatgggtatttccagaaaagaaattaatccctttgaataatgttcagccatcatattgtctttactcctattctgctttcagtaagggaatttaaaagcagatataaactatctcccccatgccccttttttctttaacagactagatttttgttttgaattcagaagaagtgggggatggggctttttgtggaatgatagtgcttgtgttaaatgttcacccagtttttccctccagtctctctctggaattgagattatgttgatgccaagatgaaacaattggagcttaactattttttatttcagataaagctatgacattaaattgttaaaactatcttctcctcttggccgggcgcagtggctcacgcctgtaatcccaacactttgggaggccgaggcaggcagatcacaaggtcaagagatcaagaccatcctggctaacatggtgaaaccccgtctctactaaaaatacaaaaaattagccaggcgtggtggcgggcgcctgtagtcccagctactcgggaggctgaggcaggagaatggcgtgaacccgggaggtggagcttgcagtgagccgagatcacgccactgcactccagcctgggcgacagagcaagactccatctcaaaaaaaaaaaaaactatcttctactctaaaatcaaataatttattttaccagctaccacccacctgcaaaaaaaatttcctgaaaatattcagctgatgagattgagttatttttttcactggcacatgactatttccattctatactagaacacagatcaaaatgtttatgtatttcaagcatttttttttaggggattggggaaaggttggggatggtggcactgggaaagaaaacacagggttctggcacaattgtatctgtgtaaggtaagtacgtctttggatctaaatcctggcaataagacagcaaatcccattttactgactagaccaataatgatcacttgcctgacattttctctcccctcccatccccttttcttataaggtaaatttgaagaaaaagaagacagtgtgcctaagctggagcagctcaacagcctgggttgtatgactaatatgaatctagtattaacaaaacaaaatttgctacatatggaactattattattagaaacctttcagtggaacctctgccttccaacagccgcccatttcattgagtattatctctctgaagcagtacacgaaacagatcttcatgacggctggccaatgatttgcttggaaaagactaaactctacatggccaaatatgcagattacttcctggaagtatctttgca

SEQ ID NO: 5675 - DNA, 2300 bp, Homo sapien
gttagggttttgtatatccttgctttttttttttttaatgttactgatctgtcatggacttagagaaataaattagtttcttacctaccatctttttttttttttttgagacggagtcttgctctgtcacccaggctggagtgcagtggcgccatctcggctcactgcaagctccgcctcctggagctttctcctgcttcagcctctggagtagctgggactacaggcgcccgccaccacacccggctaactttttgtatttttggtagagacggagtttcaccgtgttagccaggatggtctcgatctcctgacctcgtgattcgcccgcctcggcctcccaaagtgctgggattacaggcgtgagccactgcaccctgccccatgtttttcttttatttctctgtaaaacctttatagtttgtgcataatattgctacagttatttgatccagaagtattaataacttcatccttatcatgaactgtaacctttagcattataaagtgccctttttaaaatttggtttaatacattttggccaaaattcagccttgtctgttattaagatcttgatccttgctttttgtttgagtttttctggtatctctactttttcgttgatcttcaacctttcttaatcattttattttagacctgtctctcatacaacatagatttgagtttcactttgtgattcagtctgaagttctttttcccttaatagttgagtttgttttcatttattgatttgatatgtttggacttagttctgtcagattattttgttatacttttgctatttatacctttaaagtatagtttactatatggaaagtttgctttgttttattccttcttttcataattagaaagctttgtgtttttgttcctgtagttaactttgtaatacagattgtataatcagtatttctgttttctatttagccagtatctcagtatctgtaattcacttttataagtaataacagaattagtatatttcctttcctttattctatccctcaattctatcaattttgttttctttcttagggtttacctttgtaccattaaatatccatgtaccattcttactcaatttgtcattattgcagaaagctttctgactcccatcttctcttactaacctaccctgatactgtcagatcattcttcctaaaaccaccattttctaaaatcattattctttctaaaaccaatcttcctaaaatcatcattcttcctaaaatcaccagtatcatatcacaaatcctcagcgatatctctgaccccacaaagtctgtattctcttctggctttcaaaactccgtaactcaacctcattctactcactcaactttatttcctctacaacttctcaatgagtctgccctcactgtccaacaattgagctgagaatataagaagggaagggcttcagccaggctagtgcagtctgctttgtgccaacactggggtgatgactgccctagtctagctgaagcttttcccttctttctacacccagctcaagtcccaggtccataaaacctttagaaactcttcagaaactctttagagcttcagaagctcttgagaattggaagatgtttacacccaagttcaaggattacttccatcccatttctggtctatgtcaggggcctctgttaactaggaactcaggaactctcaaagcagcactactctgtttgtaacattctggcttattattcattgaaatgtgagaaactttggaccactgacttaattctgccctttgcagtaataggacttctcacatctgggaagacaagcattttacctttccttaggcttccccaggtgaaaacaccaccagttccttcagttgttactcatataacatgattcctggacccatcaccagcttgtggcaaaacttgggtttatcaccattccacttaaaattcagttcacaagatttttgtagatacgatctaaccagtgctgaatctgatgggactgtgccttcctatgatcagagtactctactttttaaatcaacccaaggcagcatttgtttattagtcactgcctacttttacactgcatttttgttgttgttgttttgagacagggtctcactttgtcacccaggctggagtatagtggcacaaacatggctcactgcagcctcgacctcctgggctcaagcagtcctcctgcttcagccccacaagtagctgagactacaggcacacaccaccacgcccagctagtttttttattttttgtagagatggggttttgccat

SEQ ID NO: 5676 - DNA, 2300 bp, Homo sapien
agtcttgcttggctcccgcccattctctctcacaggtgtttcctctaataaaattgttgcacatttaatcccatcataacaacttctcatcagagccagactaatgtaaagacatttctttggaaaacatgcatcttgtcagcacctcactttggcgtttcatagttgttgctttataatgctgcaggcaaaacttccagtttatagttatactactaaccacaggatgaatgaatgacatggtaagataaaaaaacaggaaaaatgatgggattttactttacatttcttgttgttcaacccctccatttttgttaaaatatatgtctaatttgaatgcgcatcaagatgaatttttagtaagacttatcactgtgggtgctgagtatgtgagcaggaacatcatagatgctaatttaccttttagtaggcaaccaggcctgtgccaggacttggataagaaggctgttacatgctaccctggagttccaaagtaaccccaatatcaccatctgtctttgttcctccacattttcttcttcccgtgatcccttctcatttttcctttctatcttcttttacttgttttgtcactgctttagaagtcactaataagcaatagtgggaagtagagtatgtgaataaagaatgaagctttctttggcagtctgaaataaattgcttaaaactgtaccccaaagcagccagaataaaaatagctttttatatttgttctccaccatttcaagtatccaaacgccccacatgacttgacccctgcaactttgttttagggaagacttttggtggtagcatactctcatacgaaagtgtgtgaaaaacatcaatttgcttttttacttttcctgtgaggattatagaaccaaaacaaaatatcgaaaattttgagaatacactgactcacaaaaatccaatgcttttctagtcaaacaggatttctctacgtgatttgtatcaaggacggtcatttatcaaaatgtgacaacatgcctttgccgtcattataacagcaggcaattaaaaatgtttttaccatagccagtttgcttatttttctattttaaaagggttttatagcagatatgcaaaagagaaagcagagagaaaaaaataaaatcactctctattcaaacactatcactgttaattttgatgtatttcttgtgtttttctaggcataatttgtttttacaaaaacatagccttagtggctagtcccactttattatgtgagtactggtcaatgcagaaagaagactaaacaaactacagattggttttcagtcatattctaaagaaacagaagccaaacaaacacttggtctggtggaaagtccaagattatggtccttggccctctgttaaggccagctagagtatctggtgatggtgagaggcctccaactgtcttagtcctggatttaaaagggcctaaacggagctaaaatgttccccagagcctagcaatcattgacagtttcctcaggtaaccagcgctgcagacggagaatgctgcaaaggcaaggtgtcagaaaccaattgaaatccgaggttcagccaaggggacccaggcacacacgtgggccttgtgttcaccataaagagcatactggctacaagttggcccctctctgggcaacagagtgcctaacttaaaggggcttacgaggatgccatgcgccaacagctctggttttacaaaatggagtcaccagggagaacgcggtgtctgggttagaccacgttcaccaagtaccagctatacgatctcggacaaatttacttgccctctcttaaccttagtttccccatatataaaatgtaagtgatacatttctgactgctgggattgtaaggaagggattaaatggcttgccaatgaggtgttcagcacaatgcctgcctaacacgtaaaacgtgttggggttggttggttgtaagacccacaacctctctccccactctacccccgccccgccaccagcagcccagctgcagccgcttccgggaaccacttcgcttcggtctcccactgccgaacgcggatccctccgcgttgcgtcacttccgggagactctggccgcggcgattcaatatatccggaagcaactgtcatggctgctgtcagtgagggcccgtaatggagatcgagtcaagggttgcccagggacacttaagagccttcggcttcaaggaggcctctcaaaggacaaaggatgagactgcctggcggcagagtgccccccacaatcgtaggaactgtgtcgccgcgcttccc

SEQ ID NO: 5677 - DNA, 2300 bp, Homo sapien
tttttagagactcttactatccaaattaatatcatttaatcttttattatcatagtgcttatgatgtaccaacttatctgtgtcttaaaagtatgtttacattgttgtaagaacaaatataagtttgatttaagtatgatttacaggtgagaatccttagagagaaatgaatttccatttatatattatttttaggagaaaatttcactgtcttaaagtgagctgctttatgacacagagtccatgaatcgtacgcatattttttttaatccttccacctcagcctcctgaatcgctgggattataggcacaagccactgcacctggcatcagttgtatattgaaaagcagaaagaggtttgcaatcaagatggaaacttcattactatcaccaccatcatcacttttatcatttccattacactcttggtgcaatggcgttgagtactctcttcagtctatcaaacaatatataacgtgttagttatatgttgcacagctctgagaagctcagaggttaaatgctgtcagctagtaagcagtagtaaggtcttcagagggatcaactatttaaagcattaatctagatgtcctatccccataactatccttctcaagtaaaaaagtattccagaatcctttcctaagctatgatttagccttctcccctttgtatctttttctcccttttaatcatcttcccttccttcttgattcactctcctctctcctctcctccctcaccaccccacttccacttttttttttcttgctaaccaatatgttcaaaacctgaaaggagatcaagagaaacctttcaggttttgaacatagaggttagcaagaaaaaaaaggtgatatgaatggtggaagaggtgatatgaatggtggaagagaaaggggaagagataaggtaagtctgactaatattttaatttattttaactttctccaattcttctataacataaatgcaggtttgcaaggttttgtaggtgaatgtatatgtagaagtaaaaataaagttataatgtgaatactgtggggggggatgcaatatcttaatcgaaaaaacaaaaactacatcaaaacacagaacaaaaaactctgtccatttttccaaactaacatcgttttttgttattaaaagaaaaatctcgttctctctctttctgctgtgatgtgtgtgcatgtctggcttgcacagaaatgaggacctgaagagagatgggtgatgtacgatgcggaataaaatccactttgtaaacatgttcttcattccataatggcatcccctttggtatttacagaagatttctccttgtgtgttttacacaagcataaatatgactaatgtgaatttccgctcattcgccttttctaggtggaattgtgtagcccagtaaacacaataataaagaaggcttcctaaagacaaagtgaggatttctcagtgtgctttttattaaaggatggagaaaatcttgcatttggctacaggctgacattttcaaaagcctgccctaagacaatgaaaaatatgtatcatacacatattttaaaaaatttttaaaaattataaatgtcatacatgctacttaagaaaacacggaacattaaaaaatgaaaaatctgatcatagtttcactttcaatttattggtatatccttctgcgccaaggttttttgttgttgcttaaacgtttgccgccacttattccctccccacattttaaaaggaagataatttatgtagaattatgtagaaagtgaggtatcaattagtaggttggatttataaagaacagaagaggagccacactggcctttggggtaaagccaaccatattaactgtccagccctgttgtcaggtagaggaagtattcgtttgagggagatgtgagcctccctcattgtgaagatagtttttgatcaattattcaatatatacaggtttggagttcagtatgtcttctagaactactggcggcagcttctttcgttgacgtgggctacaatggttgctaaaacctgcgtgccagaagccagaggtggggaggcgccatttgctaaaccggaactggttaaaatctcagggtggagaccattcccagtcagcaagggcttgggaagtgcatacagttcctgctcctggtgtctactctgaagagcacagagtagacgtttgtctgccatttcaccggcagtaagatcagcagctgctggtgagcaaagaggtagtagtgggtcactggactggtgggcgccggggccgcgcgctagatggagaggtcagcgg

SEQ ID NO: 5678 - DNA, 2300 bp, Homo sapien
cctggaacattaggctgtcacactgtatttcacatggggtaaaatgtccagtctggaaacacagtctctcattttcatcatgttagactaaatacagtaaaaagaagaaagaccagtggctgtaaaaagaaaaagcagaagtgtaacctttgcctctggtctttttctctggggaaatatgaagttgtcagccaggtgttgagcaaagttgttggtggagagaaaagtcaagtgacttatggggtgcattttacaataattcagaaagaacgagctgactattatcatttcattcagtgaagcctgaatttcctgatctttgatgacattgtatgtgcctttaccatcctagtctacttgtttctttcagttaggaactatgggagaggaggaggcagggtctagagctccttcaggatgcactgcaagaaaattgagcagccagattggggaaaatgaatgatggcaggagacaagcacttgcatttttctcatgcaacattgtctgctctcttgctggcctggccaagtcagtgtcctggccaagcagaagggccccacccttcaacagctctgaagattctgctcctaaacatctggtcaaaccagaaattcataggcagtgatgaatgtgaataatcaaggttacctggaaaaagacagaacatccatttgtgcaaagaagaggcacaggagggaagaaatccatccacggtttccacctctaccactgccgctgttccttctccccctcctcctctgtctcctcctcctccgcttcttcttcctcctcctcctccgcttcttcctcctcctcctcctcctcttcctccacctccttctcctcttctgtcttctcctctttccccactgtcttcagccagatcttgggtctgcaacaggagaggtaactgagagctctttactttgtcctgctgtgtattctgacccaggagaagactggttcccttgataaatgttggaaacgtgtactttattccacaagggtgagcagggcattctcaatggctgcagaaaagtgtgtccaggtacaaaaggtcacttccctcccattttcttcctccttgaccctggactgcgggctgctctttaaacaacaggtaaatcagcatttttcagattaggcagaaggaaatataaagtcttccaggagggaagtagagttctctgaataggttcagcccctacaggtatggctccctcctcccagcctcaccccacctgtctgaccttgagatggcctcgtgtctggcgtgtcactgggtgtgatgagcaagtggtggacaggacagaaagaggcaaatgcaaggaggggaatggcattctgcttttaggacttcagaatggcctgatgtaggaattgcattgttgtgaaactgttagatttgttctcatctgacttttgggtacatcctggtttgtttgaaagcatctggctatcggcgaggtaactcctgactctatcaggcaataaggaggctgcacatctgacgatagagttcatctcccctttcctgagtcatccatccctacccccagatgaacagagaattgcccatcccattttaaatagagctccagaaaaagagatactctaattctctgagtaaactgttaccaccatgccactgacaacctgatatttatttttaaacgtattgcccgcatcggggggtaggaaaaagcacaaaaatgccatttttatataatggttctataagtagaaaaagcttatccataactttatgcaaataagcagaaagtctccaagagaggttcagatggacttgattactctgcttttccttgagcccaggaagttcccagttatagcatgcacctgctggaaacagactatatgtgtttgggacaaacaggaagtagtgaccagccagaaacttgtcctaacctggttacaaatctgattgtaaaagaaagcagctggaaagaaatttgcctgcccaataggtttcattattaaagtttacacaaagtggagtaatcaccaagctggctggctatccagatcacatgattatgtagaaacatgaaacttgactatgtgctcgggcaagttttacttctccctagagcaggggtgtttgccagcagcctgcactctcagaaatcagacttgagtggccggaacccttgagaccagaggcttaccatgctgctccctaggagggccaggaactgctgacgtgaccactggacagttattcgtgtctcttacaattaccaaacagaatggacaagcttaataaaataaccgtccc

SEQ ID NO: 5679 - DNA, 2300 bp, Homo sapien
tggttgtgcagaaaagaaaaaaagaaaaagaaaaaagctaaagactagaaccaatcactgctgtctgagtagagaaccattactgcgaagaccctgacctttgtagcagcaagcaaacaaaaaaggtcacctctttcctcttatctagactttcagtctccctctggtatcaccattggcagagcctgacataaagtcagctggcaaatgagaaagagaatttgctcagtcccagcctcaacctcatggaatccatcagaaaaaaggtagatttgcagctgagagatgatagcctgataaccagacaggcatcagtacatttgaaatttttgttggtaatgttttcaataccagtgactcaaagcaaattaaaatgtgacattgtttaatatgatattttgatgatttagtagtttcacaaaacatatatatccgatttcagattgaactggaatgtctctaaaaacaaaacataaattactacgaactgacatttattgaaagtgctacctttgtgtcaagcactctgcccagcaggttatgtgggctatctcagtcctcattttacagatggggtaaagctgaggcttaaagaagttaagcaacttgctttgaagcttcagagcaatagagacagaatttttatgggcagcctgacgaagcctgagctgttagccacatctcagtactacctccccattccctttactgcttaggtggtgcacctttactattaggtggctataccttgggaacgaacacaacaatcccagactcttgctagaatcatttacttaactccctgctgcagcaccatttggtagctaagactgcattctaacatgaagcattcagctcttcagtaaccaaacacataatagtgagggtcaaaatagactctcatcttccagttgatctctagcaaacagtcatagcatccgggaatttcagggctgcattataggcccttaccagatgtctgaattcccttctgttacagctcaataaacagttatccagcatctgtttgaatacttttcatgacttgtaacacacaactgtataaagctgctctctgtatatttttagacagctgagttactaaacaggtcttacttgcggagaactggaatctattactctacaatttccacctgaagatttctgattttgctttcttgagcaacacagagtgctttacccatgccttaaggcagctgtcacatgactcttcccctaatacggttgtgaggtgctcacgtgttttggagatagcaaaagtctcaaataatatggcacagacggccagccatggtggctcacacctgtaatcccagcactctgagaggccgaggtgggccgatcacctgaggtcaggagttcaagaccagcctgaccaacatggtgaaaccccatctctactaaaaatacaaaaattagccaggcgtggtggcgtgcgcctgtaatcccagctattcaggaggctgaggtagcaggatcgcttgaacccaggaggtggaggttgcagtgagctgagattgtgtcactgcactctagcctgggcaataagagcgaaactccatctccaaaaaaaaaaaaaaggacaaagggtgagcagagctcagattggttattggagaagacaatacagaggaaggctccttggtggttaagagtagtcttttaaaatcagacagatctgagtccaaatcctagctcaatcatttctcagttgtgaaaattcagtagctctgtgaccttgggcaaattgtttagccaaatgagaaaggtaggaccacctgacagtggtattgtgaggatcctgtcagctaaggctggtaggtgcttgccttggccgtgtagtagctgctcaggaaatgagatctatagagtgtattggtgaaagacaaatttaattttgcacataaagttatgaaaatgtctccttatggcagtggttatcatctaaaagtcataccatcccactgaagaagacctattttagggtttataacagactactctctggacaaccttaatccacttaaaaaactaatatatgcatacagcatttggaatccaaagaactgaattcaagatatggcttggccccttattctgtgatcttgaataactgagccttggttctcttgcttataaaatgtacctatgtaagtgaacaggtggtaatacccaccatgaaatactatggagcagttagaagcaacagagcaattagaatacggatctggaaaacatagttccaagtgaaataaaaaggtgattggcaaaatgagaaa

SEQ ID NO: 5680 - DNA, 2300 bp, Homo sapien
atgtgggctatctcagtcctcattttacagatggggtaaagctgaggcttaaagaagttaagcaacttgctttgaagcttcagagcaatagagacagaatttttatgggcagcctgacgaagcctgagctgttagccacatctcagtactacctccccattccctttactgcttaggtggtgcacctttactattaggtggctataccttgggaacgaacacaacaatcccagactcttgctagaatcatttacttaactccctgctgcagcaccatttggtagctaagactgcattctaacatgaagcattcagctcttcagtaaccaaacacataatagtgagggtcaaaatagactctcatcttccagttgatctctagcaaacagtcatagcatccgggaatttcagggctgcattataggcccttaccagatgtctgaattcccttctgttacagctcaataaacagttatccagcatctgtttgaatacttttcatgacttgtaacacacaactgtataaagctgctctctgtatatttttagacagctgagttactaaacaggtcttacttgcggagaactggaatctattactctacaatttccacctgaagatttctgattttgctttcttgagcaacacagagtgctttacccatgccttaaggcagctgtcacatgactcttcccctaatacggttgtgaggtgctcacgtgttttggagatagcaaaagtctcaaataatatggcacagacggccagccatggtggctcacacctgtaatcccagcactctgagaggccgaggtgggccgatcacctgaggtcaggagttcaagaccagcctgaccaacatggtgaaaccccatctctactaaaaatacaaaaattagccaggcgtggtggcgtgcgcctgtaatcccagctattcaggaggctgaggtagcaggatcgcttgaacccaggaggtggaggttgcagtgagctgagattgtgtcactgcactctagcctgggcaataagagcgaaactccatctccaaaaaaaaaaaaaaggacaaagggtgagcagagctcagattggttattggagaagacaatacagaggaaggctccttggtggttaagagtagtcttttaaaatcagacagatctgagtccaaatcctagctcaatcatttctcagttgtgaaaattcagtagctctgtgaccttgggcaaattgtttagccaaatgagaaaggtaggaccacctgacagtggtattgtgaggatcctgtcagctaaggctggtaggtgcttgccttggccgtgtagtagctgctcaggaaatgagatctatagagtgtattggtgaaagacaaatttaattttgcacataaagttatgaaaatgtctccttatggcagtggttatcatctaaaagtcataccatcccactgaagaagacctattttagggtttataacagactactctctggacaaccttaatccacttaaaaaactaatatatgcatacagcatttggaatccaaagaactgaattcaagatatggcttggccccttattctgtgatcttgaataactgagccttggttctcttgcttataaaatgtacctatgtaagtgaacaggtggtaatacccaccatgaaatactatggagcagttagaagcaacagagcaattagaatacggatctggaaaacatagttccaagtgaaataaaaaggtgattggcaaaatgagaaatgtaacaatgccatttatgtaaagtcaaaacaaccacaagcagaatataacacccatgcaaataacagacatccagtacagtgtaatgattgtctacaaaaggaggagaatgcaagtgagttgggaggtttaaaggggatcaataaataaagaccacagaagggcctcagtacatttagaaataaataacatgcaaacaatgatgcttccctaccttcctcacgaggttactctgaggagctaatgagattgtgcgtatgaaaacaaaagttaattgactgtcttcattatgatctccatattggacaaatgaactgaacagagataaaaattccccatcacactttggcaggaagctgttgccagggcagcacctgtgaagccctggcctggcttcagagtctgctggtgagatgacatcaaaacccttcgtgtaggagggtggcagtctccctcccttctggagacaccaccagatgggccagccagaggcagcagcagcctcttcccatggatccaccacgagcgtcccacttgagc

SEQ ID NO: 5681 - DNA, 2300 bp, Homo sapien
taagaatgtactttgttgagatccgccccctgcccacaaaacattgctcctaactccaccgcctatcccaaaacctgtaagaactaatgataatcccaccaccctttgctgactctcttttcagactcagctcgcttgcacccaggtgaaataaacagccttgttgctcacacaatgcctgtttggtggtctcttcacatggactcgagtgacactaatgtgtttatggaggagggttgataacagaatgaaattttaaaatagctccacgtattggaactcaggatgaaataagaaagtgacaagcagtaggttctgatccttctccagcttgacccgggtggcaaattgctctaaaatttaggaagttagccatggaataaaattcagtattcttttcataaatatgcaaaaatgcctcaagggttttaatactttcccttatctacgttttaagaccagcttcctatggcacattgaatggcacgtattttgcaatatagcataaatgttagcaaagctccacccaattatgttgcatgcatgttgcagaatgaaatagctccagacagtgcaacactttgaggtacaccatttctaatttgtgtgttcaggcccaagtaaagcaggaatcaggtttcttctctaatttaatccttctgacagccaaagaatgtgttaggaacaatgaaaactgttgcctatcagctgaaaaaacagctttctttgttatttttatttttaaagtacatgcttattgtagcctgggcacggtggctcacacctgtaatcctttgggaggtgaaggcaggagctaggagtccaaaaccagcctgggcaacatggcggaaccccatctctacaaaaattagccgggcatggcccgcatctgtagtcccagctacttgggaggctgaggtgagaggatccgttgagtctgggagacggaggttgcagtgagccgagatggcaccactgcactccagcctgcgtgacagaacaagaccctgcctcaaaaaaaaaaaatatatatatatatatatatgcacacacacacacatatatatgcttatatatatatatatatatatatatatacacacacacacacacatacatatatatatgcttattgtaaaaaatatattggaggccaggcacggtgctcacgcttgtaatcccagcattttgggaggccaaggcgggcggatcacgaggtcaagagatcgagaccatcctggccaacatcgtgaaaccccaactctattaaaaataaaaaagattatctgggcgtgctgacgcgtgcctgtagtcccagctgttcaggaggcttaggcaggagtatcgcttgaacctgggaggtggaggttgcagtgagccgagatcgtgccactgcactccagcctgggacagagcgagactccgtctcaaaaaaaaaaaaaaaaaaaaaaaaaaaaaaactggaaaacccagaaaataaaaacagccataatctctccctaccaacccccactcccaaaaaaccagttataacatgttgacgggtttctttcctgtctttgttctatttgttgatatcatttgaccttgttcatattgtggagggagagcccattccttagggttttgctgtaaaggtcaatggatccagcaattcacaagaaaataattacactttacatttgtctaactgttttaatttatcaaagcacattgacatgcattatctcatttggtgatcacatcagataggccatttatcaggatattaaaatcagtcgggagagaggggaccttgtcccataccccatggctggggaggctcagagccaggatttgaggtttctaaatttcgtatctagagatttgtcccctacaataatttttatttctctatccaattaaagtctatatatctatgcacagaaattccgtttgagacctaggacttctacttcctgtggtttatttttgcgccatagagcacatttgtatttaatgtgtcttctgagctaccagcctgggaactttgccatcatcacatgcacagcggcagtttgctcaccatgcaccagtgagcttcctccgccgcctgagcagctgggcttggtccctggcagcaggcatctggggcatgtagctgcctcttcagctgtcctgccaacagaagaaacttacctcccatcatctccctgagtgcctgcctcagccgccttgtatgtattcattgctgtgtctataataaatcagcgggtccttgctggaagcttggacgtttcaatggagagctttccagtaag

SEQ ID NO: 5682 - DNA, 2300 bp, Homo sapien
acttgacctctctgttcctcagtttcctcatttttgaagtgtgaatgatgtaacacttattgaggagctaaatgagatgatgtaggtaaagcacatggccaatgccttaaacatggtaagtgcttagtacctgttaagaaaaagatccctgtccatgcttcgaaaacatgtaaatcaaaatttcttgaaggctggttataaataattaatttattgttaataataaactgtgagatcatttaatggggtgtttctatggtctgaatatttgtgtcaccccaaaattcataaattgaaacctaatccccaaagcgatgatattagaaggtggggcctttgggaggtgagtaggttatgagggctccacctagtgaatgagaaattaatgtccttaaaaaagaggcccgagagagctgccttccccttctgctatgtgaggacacacagtgggtgccatctatgaagaatgggccttcactggacaccatatctgccgaccccttgatcatggactttccagcctccagaactgtgagcaataagtttctgttgtttataaattactcagtctaaggtattttgttatagcagcctaaatggattaagacagttgcttaaaccatgtaagcatagctacatctgtacctatttctatgtctactttggatcataatataaaacgtatttctaactgtgggtcactgtcaaacaagtttgaaggccattggattattaaagtcctccactagtaaaaatggagcagcatgccaaaacctcatgtggaatgctaggtgctactttaagagcagttttaccttccatcttttctggaccttggttttccatcaacgcctcagtcctgctaatgttgtctttattgttcgtgcatctgacatgtaacccggaccactgttgccatactaattaatgtagagagaattcccttgcatggaggcctaaattctccacacctatggttaggtctagcatgtgtctttctccatcagatggaatgctcagaaaccttgaggaaagaggagagcttctgattttgaaagatgtttcagctggtaactctgtcttgcattttgcagtgattctgtcacccacatcgtagcagagaacaactcgggttcggatgttctggagtggcttcaagcacagaaagtacaagtcagctcacaaccagagctcctcgatgtctcctggctgatcgaatgcataagagcagggaaaccggtggaaatgacaggaaaacaccagcttgttgtaagtgtcatgggtgtgattttcactgttctttgcttgatggttaagaacataggcttaggatcaacggagctggggtaaaccctaaattctctgcttactacctgtgtgaccttgggcaagtcacttagctttactgagcttcagtctcttcctttataatatgacataacgataatgccagcctcacaaaatggtcatgaagattagaacaacacacatgtaaagcgctgaacacaatgtgttgactatagcaggcatctaacgagtggtcgctattttcccgaacacatttatacacaaatctttcaaaatatttaagccttgatattctagcagccagaaaagcaggagattcctttttttctctcactgtgatcattcagaaaacaaaacaaaacaaaacaaacaaaacaaaaagttaagctctcaattccaaatatttgagcaattgtgctaaaatctttgggaagagggcttggaccataactacagaagttcatagaaaacgaagatgatatttaattgataggtcttttcatttttttttctgatttcaaaaataatacgtgttgataatagcaagttcaaatattagagatgtatataacataaattttgagtctcctataattttatcctccaactacagacaactacttccaaattttttccgtacatatctgttattactattaatttttattgaaaatggatgcttatgcatttgtttaggtgagaagagactattcagatagcaccaacccaggccccccgaagactccaccaattgctgtacaaaagatctcccagtatgcgtgtcagagaagaaccactttaaacaactgtaaccagatattcacggtaacgggactttacatcaacacccagggcaaacgaagggcttgcagcttctttctgtggaccgcaaattaaattataaatttttctgaaaacctgggaaagttttcctcccacctacctgcagccctagcctgatctctgatccttctatccttcttctttctatc

SEQ ID NO: 5683 - DNA, 2300 bp, Homo sapien
ccttgccagagagtgctggggccataaactggaattctatggtccaggttgattctacgccagtcaaggaaaattaaaagcatcatttgtacgagctgtgctgattcaagtagtctaattgcataaattgtatcatccctgctttgtagattaaaagactcagactggaagaagttatttcacttgcctaagaccatgcagcttccagtagggcagctgtggctctaaacagaggtctctctagaccatgttgtcaccagtaggttcagtttaggctgtcactgtggagtcttggaaactggaagcccacaaggcagaggcctcattggtcttgtttaggatagcatcagtgtcggccatgttgcaggtggctgattaccacagtctaagaactgattagaacagcagctgtcacccctgactgctcgttagcgtcccctggggatgcccctgcctcactctgatcaatcaagtcagagtctctgggggcaggttctaggcatcaagagtttttataaccagccccctaccactccctaggtaattcaggtatgcaaccaggatggaaaaaccacctgattaaaggcaatctggtctccactgtgccactaaactgctcttgtcaaggccaccagcaaccccgatactgggaatcagaaggctcttctgacctcttcggaggctacctctcagcagcagttgatacaattaaccaacatctactccccttcttgaatcaaatttctttcctgtgacccccgaacttatctgattttcctgcctcactcaactctccttgctagtgacaccccctcttccaggctgctaaatgtctgtgaacccctggcagctgtcctggccctctgccctgtctacctgctcatgcacaccgggggctttaaaaccatccacaggccggccactcccaaacggatgtcttcagccccagatcccctttatccagtcgcctacttggcacccacacttggacagcccctaggctactcaggtgtaagggcaatctgtttctccagtattacctgcctaagctaatagcatctccatttttgttagtcaagcctcaaacccaggagttggctttattcttctctttccctcacctcgcccttccccgccccatatttttttcatcatttaatcccagtggctccacctccacagtagagagcacaatcattcactgctgtcttcctacagcagccaccttcatcgctcacctggactccactagccagccacctgcttccactctcttcccctgtaatcttggctccacagagaagccctagcaatcctcgtcaccagcaattacatcatgcatctctcccactgaaaaacccttggaaaaggtttcatctaaggatgaaaatcttaccatgccctcccatgtcacatcaaaagggctcaaactcactccgtccttagccccttcccgggtgactccctggtttatgttgttccagccaaccggcctcctgcctgctctgggagtgcaccaagcttacagggcttagcatttgctgtggcttctgcctgggactctcctccctcaacccttcacatgtctgccctcttctcatctttcacgcacagcttcagtgccatctcccagagtcatctaaacaacggcctcctctgtcacttgagtcgctctctccttacactcctatctgctcctctcacagtggttttcatttcaatggccaaattattggtttaattctgttgttttattagcaactcattcaccattttaaagaggcaaatccctaacagggaaattgtaagttataaagcagcccaagtccatggcttcctccaggtctagagagcttcccacccaaaatacaaaaacagagagggggtgaggctgaactcacaccaggcagctcattggccactgagtgcagcaccttgcagcagctggagcccccagcagtgtgactcctgcaacagaatgggcccccacccctcctccagacatcccgaatgtccatgctgttgtccatgtaacacaatgactccatcattatcagtaacatggttaatgtggactcccgtcagctggggatggagtggccagcctcagcctcatgtaacccattgtttccaaagggctgcaggctgcagaagcccccaagctctcaggccagctgtggcttctttgctgagatggaggtatagccaagaaagcagcctgaaaagtaaggacagaaaatcaaggcaaagagggtgggtgaaccaggccatacacgtcggccatgcagcagcagcccatc

SEQ ID NO: 5684 - DNA, 2300 bp, Homo sapien
agaaatggcagctattggccaagatgccaggcattgaacaagttgtgggaccactcttggcaaatagcactgtaaccaggacaaacttggtagactccaaataaagccactttgaaaaactaaaagaagcttatggatggatgatgaaggaggcctctgttagccaagatgcactgagcacttaccatgggctggcatgccctaagcctttcccatgcattatctcattcgatcacatatcaccctgactagagtggcacccttttacaaataaggacaccgaagcttacataagagccccaagtcccacagattgtaggtggcagaaccaggacatgggccgaggcccacctgaccccactgccagtgcttttaacatatttgcaaggataactgcaatgtggataggaatagaaagatagcctggcccccgagccacagtcaggaaggcagaaaagccagtgcaagtaaaccagcacatccctgagccaggagatacctgattcaggataccccacccccatatttgataaagaccctgagacaattaggagagaggggaggagacccccctagaatccttcttgtgctgcccacagtgaatgacttctctctttgtatgtgtccccctgccacccccagctggctgtgcacacaagatcagcagtgtggaggggaccctggcgagccccaactggcctgacaaataccccagccggagggagtgtacctggaacatctcttcgactgcaggccacagagtgaaactcgtgagtcatttttgtagtttattgagaatgtggacttgagtatcaggcagatgtgcgtttgagtctctgctctgccacttcccagctctgtaacttggaagttactcaacatttccaggtctcagtttcattatctggaaaacatggatactaatgaagcctacttcatcgggctgttgtgcagattaaaagagacaacgcacaaaagctctataggtcacacctgggcacagtgggacccgcaggaggcggcatccaccacccacatctgcagtgctgtttgagattcacttgtttccagttttaattttttacaagacaatacagtctcatgattaaaaatgagatgaatcagtacaggaggttggaaatagaaatcaaaagaccccagagcccccatttccactctagaaatgaccactctaaacacattcttatggatccttctagaaattttctgtgcacaatcatgactgtcagtgcacagggaaatatatatgtttttgttactcaaattcctctaataaaatcccattcgtattttttctacaacttacttttttttcccattagtaataggagactaagttctttatgcaaattccctcttgaattaaaaattttccccaagcctttatttgaagtctttttcacgtatatgatgtgtggtttgcacagttatttcaaaggagagttgaatctcctaggagtctcatttctcaacccccagggactcccacactttggagaataaagaaccccttttgccagctggagaatgtattgtacttcaggcagatggacattttttaaatgggtttttctgactgtagaggtaagtaggattgaccctatgaactgtggacgataactcagggagaatggaagagaacagagagggaaaagtccatgatcaatggactatggcgcagggacttgcaggttgtttattggtgagagccatgagtgaggagcagaagaggcgaatgggcccccagggcgtcgaggggtgaagacagggcctctgaccacagggtgctcccagcgggcagttcacatgctgggctgcccgtggggaaactgctgctctgctaagagctggtatcccgggtcagccttgaatctgggtgaggatgaactgaagagagccttagggaaaggcactgcttctccaagaccgccatctgctgggaaatgttcgcaatggcaacatagagccccgaggacctcgggggaggcgccttctggcgttgggagcgcgcaaacgcacaacgggaagcgtttgcccgaggctcacagactcacgtggtagtttccaaaaggcgttcccttgggaaacggatggtggctatattgattgcgcgcttttcgctaccatagaatgtgagttgaatacttctcaaggaagctggtggtgttcactgcatgtgggtggcgacagggcgccccatggacctcctgggagctccctgcctgctgagcctaaggctcccttccactgcatggccgtcccggtgccactgctcccct

SEQ ID NO: 5685 - DNA, 2300 bp, Homo sapien
taaagcctgttactctacctccagttttttcatggtttttaaattaaagaaaaatacattataaaaatcatctaaacccagattagagtttagcttttatagttctatcttatggtgtcccttttcaattattcttttctgatctttctagtgaaccaaatattttgttgccatttattggttgatagccaaagtagcaactaaactggccttctactttaataacataaaactgtgcagcttgttcattcttcaacaccactgtcttcaaaatatttggacaaagggtgttggtgagaagacctggccactactcaccagctgggcattagaggtcataaaagctcacaacctcattgcttgcacaagaggtggcctctcatgtctattttccagaggaattcccttctaataaggaagccagttggtggtttgcctagtgccatctggagacctggaagtgtcacagaagtttgttaggccttttagatgttgactctttggactcgtctactgagaggtgatgaccttcatgggggtgaatgcagagagctatggcgttgggtttgactcctggctttcaggcagaaatgcatgccattcaaccccctcccactcctttgcctatgcgctggccacttggccttcctgccatttggtggcatttatcctcttcaaattccttccttccacctgccagtttctaaccagatcttgccctgtctggctccattctgtatgttatgtgcccatttgatgaaaacagcatgaggcagggtcaacattgcatttctttctaagaacgaggacaaaatatgagtagcatccttccaatagttaacttttagccctttacttgtgtgaaggacttgttatcccagttgatagatgagaagacagatgaccataagtgcaagaaattcagagtttgatgtgaagcccagctctgggctccctgttgactattttgtcattgatgtatgtgaaaccatgtggaaatccaaaaggaaagttgtccatttttctgcttgcagtttaaattgaaaaaagattctactgggcatgatgcaaaacatttctacacatacacatttgtgtgttatagttgacagggccattttacttgcataaaaagatctttgaaaagcctcacagtaataatactttttatatctctaaatcaaaatggctcagttctgagaatttttacattttaggtacaaaatagaagtgggtttcaaatagctcttgattagtgtcattatttgggcatatgtttttaattggcaaaaaaaaaacagacttcagaaattggtcatttttattccatcaagttaacggtgagtggcttatttaataaaaacatgtctgtaatttaacacaagtagcacgtacagctgttcatttgtgtctttttgactgtgtgaagcatcttagacggttttactgaaagatagggtcaccgagaggggaaatctgtggacttaaatcttttttcattacctatcgccggccactaggttaggttagttgccgccagcaagcgcccttcatggctcgactagggaatgtggagagagctgagagaatcgaaatcctcgatttttttttctttgctgagagggacctgagagacattcactcatccctgcaaagaagcagctgcccgaatgcacatagccagttggtagtgacatgaatccgtacacagggctcctggtccagcgctccgagttctaaccactctggccacgtgtgcatcggggagttgtaaagtgagttatggaaataaaacaaggcgagaagcccagtcccgatcttcaggagcagcattctcgggagccagaggccgaggtggcgccccgggcaggcgccttaggctgggtgggtgcggagctggccccggcctttggctccagcatcttcacctcgctcgcctgcctccgaagttgcgaaggtgccgggaagaggaggggcctcgcctcgggcgcccgagtgattggctgcttagggccccgggcgaaggctgtgtggtccagccctggtggagaggggcggagcggccactgctccaaccaccgccgccaccgccacactcgcagccgccgcagcctcggccgccgggcaagtagctccgagcggctgcttcccggttgcctcgacgaagacagggggcgccgcgctccgcttgctccgcgcctgagccatgcccagcagccctgtgtaaccaccgagtcccggccggagccgaccgacccagtgtgcgccgtctttcggccgagctgagctttcgtgcacgc

SEQ ID NO: 5686 - DNA, 2300 bp, Homo sapien
gctggcagatcagtaatgtcagagatactatcacatgcagaacctgaaatatttactatctttccagatattttagtactgtacaatttagtgtacatttattacattccctatttataggaatagttgtatagtaagtagactgcatttttatgataacggagatatatatatataaagtctctgtccctagatattttaccagattataaatacagcatattcaggtgcttatacaaataggtgataattttgctctgtcccttctagacatggaggcatgtagacatttatagaaatggaggatgaataaaatagcccctatagtttgaattggccatattcttttctttccttagattggtgcttatgagagactttagttagaacttttgtagtttattattttatttatttatttattttattattattattatttttgagatgaggtctcactctgtggcccaggctggagtgcagtggtgtgatctcggctcactgcaagctccacttcctggattcatgccattcttccgcctcagcctcccgagtaactgggactacaggtgcccgccaccacgcctggctaattttttgtatttttagtagagatggggtttcaccgtgttagccaggatggtctcgatctactaacctcgtgatctgcccacctcggtctcccaaagtgctgggattacaggcgtaagccaccacgcccagcctgtagtttattttttaaagtaattttttttttgtaaatcagtatgttaggacccatcaatatccttactgggaagggtaagtttaaaggaaaagcatagtcagaagtcacaaaagttcctctaagtcactagggccagtgaaggagaggtctggtgagagcttcctcaccagagatgcattgcaattaggtataggaaggcttgtgtgtgcctctgttttggggagtataatcctgggaacctaaatctgaatactagatctgcctctcattgactgtgtcaccttgggcagatcacttttaacctctgtgtcttggcttcctgtaaagtaaggaaagaagactacattaaatgatttttaagtttttttttcagctctcaaattttaccattttcttctcagttttttagtttgttaatttcatagttattagtttaggatcttttttgtgccaggtattgtgctaggcactggaaatacctagatgaatagcttctgcctgccagggtttataatctagtgaggttttttatatatatgtacacacatgtatttggaattggacagttacagtatagcgtggtaagtactgtggtggaggtattttcaagaggcagtggaagaatgggagaaggacccacctcttcctgggagactcagcaaaggttttaaagggagaatatttgagccaatgctttcaggagagaaatacgagacaagagaaggcatccaggtggggaattaccaattacagtcagtaaatgtttgtggaatgaatgaatgaagtttcaattttattttttatttctttggtgccattataaataagaactcataataccttaattgtataatttgtaggaaaaggaattatagaaccaaggagagagtgagcaaagagatggcaaggccacaatttgggaaacattatttcaaatggaggtctctagactcttcgtttctttccctttggctttttgtgaataaatgcctgtagagttctaagaagttatgggagtctagtagaaccagagggaacacttagagactttttgaagttctgccagtgtcagtaatttgtgttcttcatatacttgtctcagtctttaatgcagaaagaatattgattgtaacctatggctaatttgaagtcccacctatgtattgtgcctctttgggttttggcttttcattttactggtttgtttctatcctttagagatgattttttaagtgtcaagtacctgctttctgttatcagtgtttatataacatggaaatcatactagaagtttactattaattttaatattttccaggttcatggagcctgcggttattgtttgcctgggtggaattttaccttttggttcaatctttattgaaatgtaagttttgataatgtatttatgttttgagggatttgattatagtaagacaatttaggagttagggaacatgtaaagttatcagttgggagaacatctaataatctgttaattccatgattccagaaagggaataggctatataaaggtagctgttggctgtgttcttaaatattcaagtgatgt

SEQ ID NO: 5687 - DNA, 2300 bp, Homo sapien
ttccttgatagctttttacaggataaattgaaaggaaggggagagaccaaaaaaaaaaaaggccaaccaggaggccattagtgctatcaaggtatgaggtgatggcatgggaatgaagcagaatggatagatacaagtcattttgaagaaaaatacatgcttaatattacctatgaagaattaaggagaaggaagagccagagataattgtaaaatttcaaagccacatgttagtaccattagcagaagttagagaatcagaaacaagtgttatatatgaggtggaagattatgagtgtactttagggcagtctgagtctgcaattccagaaacattcaagtggaaattattgtagttagcaaaagcctgaaacatgagtgagaaagaagactagcaatttggggtgggatgggaggtgggggcgagggtgttatcatcatcattggaatgctggttaaaagttctgagagcctaaagaagtcacagcagagtactaagactggagcttttggagaagttcacaaaggatgggaggagccagcatggaagatgaaagaggagaagcagcggtcagtgaagtaggatgctgtagtgtcaggaaaggtcagatgtggcagagagatcaaggagagtgaggcagataattggctgctgaatcggtttagaagttcattgcaggcctttgagagaaattttgtggggcaaaagtgagattgtattgtgttttggaggaagtgagggaagaactggaacatgtcttctttgaaaagtattgacattgaaaggatcgggaggtgagaagatgaaaagaatgagggacaaaagatgaagcaaacacttcaaaagagaataatagcaataacaataacttttaggttttatttagtgtttatgatgtgccaggcactatactatttgctttacctttattgtttaaactctatgacaaccccagggagtagacatcattgtagataaggacctttggagattgctgatggctggtgaaaggtggaggggttgggatgcaaaatgagaggagaaaaaacacctcaaaactggatgtggaaaggttgtgtcatagaagacaggatttgcttcaagggaaggcagcagaaaggatggcattggggccttgaagagaggagagaaatttggggactatccctaaagatcttttgggaattaaaatgtaaataaagaaataactgggcagtgccacagacctagttcaaatcagatatgctacattttgagtagtaccttgtgattatgaatcagaatctagatgtaatattgaaacaaatatgtggataaaatcaaagccaagagcttcaagaacattgaggaactaaaggatacctcaatatgctatggaaaatggatttggaaagggctgaattatgatggtgacagggtgaggatgaactaatctggagcaagtgaagcaaatcattcaggatggtgacctaagtccatggcagccagctataatagtttagtcttagtattttaaggaggttttcagattgttcaattagggggaagggaactaacatttactgagtatctaaggtgccatactttatatatacattattaagccctacaaatcacttacaagataagtattagctcctccattttccagatgagaaaaccgcggtcacatagtcagaaactggcaatgtttgactccagagcccatgttttttccatgtaatgctgaatagcataggttatatggccaaattgtactttttgtttttaacaataaatttgattttgaaaatttatataaatgatagcatgttttcaacatatgggtgcttattgtaaagaaagccaatccccttggcataatgaatactcatcctcaaagtgtctgaaatttggatttttgtctaaaggatttaattaaagacttttttttttctttgcattaacatccggttgtcctcatggaacctatgaattttgtggctgatattgcaggttggtaacattttattttctgttattttagattcattggttttcaattttcaactccttcatgatggtgatcttcttggtgggcttagtttcaatgattttaatgagaacattaagaaaagattatgctcggtacagtaaagaggaagaaatggatgatatggtgagtaaacatttacattatatttgtagaaacattttaactgagtgttaagttttaaatgttgggaggtaggtcataatttcttaccggaagtctttgagtttccacaattcaggatttttagagttaagaaagatgtaa

SEQ ID NO: 5688 - DNA, 2300 bp, Homo sapien
ggtgcaccccaccatgcctggctctttttttttttttttggtgtgtttgtagagacaagatgtcttgctttatttaaactaatctcaaacttctggcttcaagcaatcctcttgcctcagcctcccaaatttctgggattatatagggataagccatcatgctttaggttttttcattcacagctgtgggctcgttagcaacagtggcaactgtgctttcctgtgttaaatttattatagccctgggattttagaatatgccctgtttggggaaatacttttggatgtccttgaatgtctgaaccatggagaatccttgtcagaaaaaaaaaaaaaacaactttgtacctgacttttcgtggggtaaaggtttcagagtcttttaacgccttttagagagtagcttcttacttgatataattatgtctttacccccaaagtctggttttcagagtagataggtaaataaaccttaatgaaattaattattggctgggcgcggtggctcacgcctgtaatcccagcactttgggtggccaaggtgggcggatcacttggggccaggagttcgagaccaccatggccagcatggcgaaaccctgtctctactaaaaatacaaaaaatttagctgtgcatggtggtgcacacctatagtcccagctacttgggaggctgaggcataagaattgcttgaacccagcgggtggaggttgcagtgagccaagactgcacctttgcactctatccagcctgagcaacagagcgagactctgtctcaaaaaaaaaaaaattaattattagaaggatttcatgctagtgtggtggctcacgcctgtaatacagcactttgagaagctaaggccaggagtttgagaacagactgggcaacataacgagattcatctctacaaaaaaataaaacatttacccaggcgtggtggcacttgcctgtagtcctaactactctagaggctgaggtaggaggattgtttgagcccaggagtttgagactgcagtgagctatgattgtgtcactacactccagcctgggtgacagagtgtgagaccttgtttcaataacaaataaagataaaagaaggatttcattatcccctacaatcccaagcaaaacaaaactatactccttgaatttgtaccaattagaatcactttggttaataaataatattttataaatatgattatatttttccctaatacttactaaagcgtagggggaaggccctaaggagtaacttacagagcataaagctattgggaactgtttaggcttgggtggggaacattggacaaatagctggcagtctgagggcatgagagatgtatcctcagctaccacctataatatttccctaacattgtggatcttttttttccaatatcccaaattatgattgaagtgataattttaaactgtatccttattaccatttatcttcaccactccttttattttgctgatttcccagggacagatccagcagttgaggtataaaaaggagacatgttaagttttggtgcccatatatacatgtgtacatcttactgggaatgggtagatcataggttattagagaaagtactagactagggatctggaaaccttgattttaattttggtttgaccactaatagctgggtaaccttggcagatggtgatgtaagcacttctctgaaattttgagatgttagggagtggtattagtccattctaacaccactataaagaagtacctaagactatgtaatttaaaaagaaaagaggtttaattggctcacggttctgcaggctatattggaagcatagcggcatctgcttggcttctggggagacctcaggaaacttacaatcatggcagaaggtgaagggagagtcaagagtggccagggagggagagagggcggaggtaaaaaaaaaaaaaaaaaaaacttaatgagcatttagcttgtaggatattttaaatattaagtggttttaccttgtataaagtgttttttcttttgtaggtattgttggtgaggctgatgaaaatggagaagattactatctttggacctataaaaaacttgaaataggttttaatggaaatcgaattgttgatgttaatctaactagtgaaggaaaggtgaaactggttccaaatactaaaatccagatgtcatattcagtaagtattcaaatagtttaatgtaggaagtagtgtttgtgacccgatgtcaacaatttgtggctttgaactttagtaaatgaaaatgtagcttgaaatgggatgcaaca

SEQ ID NO: 5689 - DNA, 2300 bp, Homo sapien
aacaaagagttggactaaaatccagactctgaggaatcttttaaaagctttatacagattggccgggtgcggtggctcacgcctgtaatcccagcactttgggaggctgaggcgggcggttcacctgagatcaggagttcaagaccagcctgctaacatggtgaaaccctgtttctactaaaaatacaaaaaattagtcgggcctggtggcatatgcttgtaatcccagctactcgggaggctgaggcaggagaatcgcttgaacctgggaggtggaagttgcagtgagccgagatctcaccattgcactccagcttggacaacaagagtgaaactccgtctcaaaaaaaaaaaaaaaaaggctttatacagataaatgccatactgtatatatcttagagcttcctacttaaatctaccatattgttaatgaccattatcaatgaatatttgtttctaacggcaaggaattcaatggctttgcagaggtagctgtgaggtaccctactgccactgtggccatttgttgtcccttaagcctggaccttcctttggttctgaatatcccttccgtagctgcagttgcctgctaccttttgttcattatcacactccttggagaccccatttggggatctcttgctgtcagtttttctagctcctgctgtagaaaccctttggagcaatctcattttttaaccctccgttgcttcactgctcagcctcagggttttttttgttgttgtttgtttgtttgtttttgccatcatgaaaatcctaaattccttactgcctaggagggcttgggcagaaagaaaatctatgtgggagtcgctgttggagacaaattaattttcttcccatactttgagggtaagaaggtatttccctgacattcttccatgggactttaatgtttactgccatctttggtgttgtagttttggggtacccactttaggttggtctataatatgggaagctactctctctcttaaggattggggagacatactgctgggtatcttgagttataaattagattgctatttctttgagccactaaatgatgtagctacaatttatgtttaagaacttttgatcaataaaaagtttaataatgtatctttagagaaattgcatttcatgtttcaaataaccaatattatagtacaaatatagtatagaacttaaaaacaaacttgtgcttgcttttttgttcttgttcagaatgatttcttaatttttttctaattgcttaatataccaaaacaacttcttttgattgacatgtttagtatttgtaggttttttggattttcttttgttttattagaaacaggtacatttttgaaatactaggtttattaagttagaaaccatctgaatagaattatagtagcagtatctttgaaagcagtcggggtggaaaatgactcatcttgaggggactttaaggcaatttataaacagtgatgtttgctgaatagaggtttgccttttaatcttcctgcttatgaatagtcactgggtgttttcatagaatctgtggcttccagtaacttgtctttccaagaatgttaaaatcagtgtttatctcagagagatcttatagctacaaatggttatctctgtttatgaccatattcttgagcttttgtatatattaaataaaaactttgttatgtgtttaagctttttttgtttttaaaatcaatttattttgaagttactttataaattttcttgtataatttgctttgtataagggatgatttcacttaggtaatgtttgaaaataaagatgattaaaattttttcattataaaaagtcttaaagatacacaaaaaaagggaggaatagtacactgaacccacacttatttatcactcagattcagctattgtgaatagaaattttaactgtaggaaatgttggcttttttcttgtcttttttttttttaatgtaactattttgcaaactagtgggctaatttgcaatttttattttgtgcagatgatgtgatgccagccacttactgtgaaattgatttagataaagaaaagagagatgcatttgtatatgccataaaaaatcattactggtaccagatgtacatagatgatttaccaatatggggtaagtattgtatgttgtatttaagatttgggaaaatttgcataatcagaatttataaaatgactctgttaaggtgattgtgtactggatcatggtgtaaatgtgttttcactgttttttacagaatgattttaataccagttttatggtcacctgttg

SEQ ID NO: 5690 - DNA, 2300 bp, Homo sapien
agggtttcaccatgttggccaggctgatttcaaactcctaaccttaagtgatccgcctgctttggcgtcccaaggtcttgggattacaggtgtgagtcaccgtacccggccatgaacaagttttaattctaataccaactctcatcagttggtaatgattggtttagagcactgttttgagaactctgaggcaatatctatgttcagcagaaaggagtaacttggttgattagtattgtgtggcccatgagcattggatggaagagtgggggcatacatatatttgtcagtctccccaaataaaaagaatagtaatgaatggggatatactgctacattaacatttagacctttgattcattacttcctatgtgaagattatctacagttgtttttctgaactcccttgaaacagcttatgattttccaaattgttattcgtcctgaccttctctgccaaagtgaatttaatcattcctttattgttgctacaatagccctttattaccttaattataatacttattttttctttgttaatcatttacttgtctgattccactgtggattatgaacttcttaaggaaacgacagtattttacttacttttatattcttaatacctaacgcgatacttggtacctgtcacatgtgttcaaaaggtgagatcatttgttatttccttaatgacctggctgttgtcttatatgaacagtgaggcatttatgtttgaaaatgaaatgactgggtctaagtcttagggtgataatcgtgtgaatcaaaagaaaaaggcagatgtttttggtaagaacatacaagttaatgtttttgggttccctagagtgcagagagatttggggtttgagtctccatggctgagagaatggtagtaccattagaaaaatgaagctgggggaagtggatttgggtagatgagtttggttttggagatgttaggttttgattgaaaatatttatttattaactagttttagatggaggactggagataaggatttcatagtgggccagttggatcacttcttctattatgtgccccatagcaacctaccttattattattgcttgtttaatgcccatccttcccccagtaggacagggaacacatcttgttcaaagctgtatcctcagttataaacacagttgtttcacatgctaagcacttagtaaataattgttcagtgaattaatgtctgcactattagttgatttaaatgcatccaatgttgtctttaatttatactgctacttagaattattagttttaaaattaccatggtaatcagtttccatagaatcattggaactttaaacttgtcgagatcttagaaatctttgacaggcctcccacttgtaccttggaactactcaaagtcattactgaccacacttcagatttagccatgtataatattcactgatatgtagttccataattacttattcaaagaaatatgcatatagtgcatgtctttcaggctgctaacaagatagaatgttggcttgaatggacttgtggaggttctatagcagtcttcttccttgtcctctgtagtactttgaccagtggctgtgtgaaagtctcgcaaggagatgaaattttatttatgcttgctggcaacattaggtttttttttttttttaattgattaacatgaggttctggataaacttgattttgtttcctccttccttgtccatgttagcatggtgaatcatgctggttgcaggtttgccactatttgatagtgtaaatgtaaataatagacacactcttatgagctattgggcttagttcaaacactgtcttctataaaacaagtttggaaaaggtgtatctgcctgagactacaatcagaggatataattttaaaattcacaaagtttcatttttaagatgtggacattcatcatcagattaagcttccagtatttattttatagcttcctgaacagagatgatgcacttttgtttagaacacacaacaaatattcccttaatttgaattagtgtgttttttttttttaattcttgtttgcttttcttgtttcagtatcaagataaagaggaagttgtcttatggatgaatactgttgggccctaccataatcgtcaagaaacatataagtacttttcacttccattctgtgtggggtcaaaaaaaagtatcagtcattaccatgaaactctgggagaagcacttcaaggggttgaattggaatttagtggtctggatattaaatttaaaggtaagtaaaccttaatagtccttacaatg

SEQ ID NO: 5691 - DNA, 2300 bp, Homo sapien
tctgatttctacagcaattactggtgtatgattcattcagcaattaatcatgtactgctttgtgatgtttcttacactatctagaaagcattcttcaaatcttgctatgctatttgacttttcacttgttaatgtcttcattcattcagcaaagagttgaatacctatgatgtgacaagcactatctcagcagctgggacagatataaagacaaacaaatcatagtccctgcaatcaaaaaggtccgaatgcagtgtagaagaggaaatgtgaatagataattacaacacaacacgccaaatgctattgaaatcccaaagaaggaatgctccatttctcaagggatcatgcaaggtttcactgaggaggtgatcatcagctaggtctgaaaggataatatctaaggcacaaggtgaagcagagcatgccagataaagggagtataaagagcaaaggcacagaggtgtaaaaatatatacgggtgaatgcagagcatagaaattggtggaaggtaaagttagggaaataaattagggataaaataggcaaaaatttggactttatcctttagcagggaactttttttctgattacatagttagcacatgctcactgtaaaaaataaccaaacatttataggcatgtacaaagtagaaagttaaccactgatagtagtttgttataatctttcagattgttttctatgggcagactaacatattgccatataaaatgaagttaaactcttattttcttcaacttgaaaatttaacagaacctcttggttatcattccatgccagtacttacctatttcctttttttaaagtggctgtatagttggtaaatcattaccagcaaaaagacctattatggagccagactgagtgggtctggtgtttcagcaagccactcaagctctctgtgcttcagttacctcatctgtaacaggaacattttcaccgtacctgctgcatagggtttctgtgagaatttaatgagccaatatcgttcagaatagtgcctggcagatgaacgccctcgtggtgactccatgatttatttacctaacattgaagaactgttttaagcaagggagtgagcgatataatctggtttctttttagaataaaaaaaacatcaccctggcacctgttggggatgttaaacgggaggaagatcagtcagtgatggatatcttcttgtgagactcttgcaatacatagtgatacggaagactggttggtactggcagaggaaggagaggaaaaataaactcttgaaccacttttaagagaccaaatgctagaacttgttgactgctgatggctgagaagagacaatctgacaagttcgagatttttggcttagtggcctgtgtaaatggtggtgccacattcgtatatttttttttttttaaagattttttgtttcagtgtctactacggatctggcactgttctaggtacaggaaatacggaaacaggatctctgctccgaggagcttacactccaagagatatttatgactgggaagaggagacccagaaatagttaagtaaacacataaatgaacaagaatggcaagctaacttagcatgtcttgattgaacagtaggggtccagtaaatattcagtaactttaaaacatccaaccctgtacgagtttaacaatctctcctaacggtgattacaggagcccgtgattcattcacagcggcagacgagcgccaggaaagggttatttgatctgatccctcaagttccggaggcagcaggtcagacgatcggccccatttggcagccaggaaaaaagcttaagcattttggccaaggttacacaacccgaaacaccgggacgcggcccggaggcggcttcggccttgcggtccaggctaggccactgcgccggggcccagcctgctcggcgcccgcccgagtgctcggcaggcccgtagcgccgcggctcccaggagccgaggggcagccggcgcgcaggcggcggttgccgggccctccctcggcccggcggcggtggcggccccgcgtcgcgaggcacttccggcgcgtgccggggtggccggatgacgtggctgagtcagaggaagaggctgaggaggcgcggggggcgggggaggctcaggagcgggcggtgacggcgacggcggcggcagaggaggcagcggctgggccgggccccgtgcgtctgtccgcgccccgtggatgcgaatcggccgcggcggaggcggcggcggcggaggaggcggcggcgggaggaggagtcggtgagccggctccggg

SEQ ID NO: 5692 - DNA, 2300 bp, Homo sapien
ttctgtgctcattggctggaccctacctgtcagcatctgtgtcttgcagcctgagggcttcctctggcacctggcaccttctctgccctcttataggacaggttgaaagcactggggaattaacacacggagttgctgccctcaaccagtgcctgacaggaggtatggatgagtgccccagcttacttgcatcctccggtgggagaattcttagttgcgcattctacattgtgttctagtcattcctaggttgcccgcagtgtaacttgcttgatagcccaccattcattgcaccatccgcttccccgtctcacctccatcacctctcaaatagacaacttgcacttgaatccttgtctcgggttctgcttctgagggaactcaatctaagaagcatgcaaatatatgctggtaattcctaaatagcagagggagtagggaaccgtactgatggcatggctcattgtagggaggtgtttggacaggggcacaggtgattcctcaagagccctgatggacttgctaggaaactgtggagaagcgaaggaaaggagagaggcaggagatgacaaaaggggcaatggcttggatgccagaacacctgggttcatctctcagctcttgcattttccagctgttcagcataggatattgggtaagtcatttcacctttcttttttttttttttgagacagggtcttgctgtgttgcccaggctggtcttgaactcctgtgctcaagcaatcctcctgcctcggcctcccaaaatgctgggattatgggcatgagccaccatgtctggaccatttcaccctttttagctttagtttcctcatctataaaatggatattgtaataatacacgtatagattaatacatgtcctaataatacatactaatactctgccatagccttattgcgaaggtcagatgaaataatacagaaggaagtactttacaaactgtaaggcattgtagagccatcccttgggttaactagcatgccaaggtattgctgactattggcaacagtctcaaagtttagatatgaataattataataaaagctaacactgagtgtttacatgggccacacactgttctaagcactttccatgtattaactcatttaatcttcatcacaaccagtgaaagaactattatcatcctcattctacagataagaaatagggacaggaagaggtcaagccacttgtccaagatcatatggttcacaagccacagagctagtatttggactcagagagcctctttcagagcccagggagccataatcaccatgtcatcttaccactaagtgagattttgtcatgtcccagttttctctcctaaccttcatgaatctgtccctcgtaagtgacttcaccttaatctctttggagctgtgcacacattttgctgttctactgcttagagttctgtcttatggcactagctggcattttaagtggtacttccttttattctctaattttaaggctcacattttccatggctagcttcaggttctcaggggtccaggcacatgtcctttcccattaccgttttcttcaatgagcttgtaaatgctgatcatgtcctctggctagctttggttttctagtttgagattgtgtctgtttagtctgccattacttgacaattcctagtccttctcattaattgcctctttctacaattttgatttacagaaccacatacggtggtcctaggtatggattcattattattattattttgtactggattttgatactttttcagtaatcagaatattctttatctcatagtttttgcagaaaaaagtcaagagcggcctgggaatttctacgtttcctcagagagcatcaggaaaggtaagccatgtgttatatgaactgaacttttgtgtggttgaagtgttcataggtcagtgatttccaagtgtaacaatagctccttgacattgaaaaatagagggatctaggccaggcatcatggctcacgcctgtagtcccagcactttgggaggctaaggggggtgaatcactcgaggccaggagtttgagaccaacctgggcaacatagtgagaccctgtctctaaaattaaataaattaattaattagataaaaattaaataaattatttaattaattagagagatccaaggatactttagtgtggcactgtctgagagtcttgtactgatggtaaagggggagggaaagagatcagggtcccctacaatgctgtgcaaattggtcgtacaaaggaccttaattagtggaaagtgtcca

SEQ ID NO: 5693 - DNA, 2300 bp, Homo sapien
ggctacccagtttgtgtgtaaacatgatggactcacttgagtgtgccctaatttctgtcctctctttccttcactggcccagtatgggaaggaaattcatggcaagctgactgtgcctgatgcttgggtccctcttgggaggcagaataatgcccctgaatctgtatgtatgctaggttacatggcaaaggagaattaagattacagatggaatcaaggttgctaatcagctgacttcaagatatggagaaaatcctggatcaccttggtgagcccaatataatcaaaaaggtccttaaaagtggaagagggcgtcagaaaacagaccagagagacggcatcagtgggaggactcagttcagctaagctttctgcccaatattgctaggcttgaagatggcagaagacggcctagtgctaaggagtgcaggtggcctctagagtctggaaaggacaaggagacagatcctcctctatagcttccagaaaggaatgcagccctgacaaaaccttgactttgacccagtgagacctatttcagacttctgagccacagaactctaagataacaaatttaagttgttttaaatggtaatttgtcatagcagccacagaaaactaatataccaactaagttgcctcaatataataataatgatacccatgaaaatgtagtgcctggcactgttagtaagcattttgtaagcattgtctcctgtggccccaatgatcatcatatgaggtaggtactgttacttatcctcactttacagatggagatatagaaacttagtgatgtcaagtgacttgcccaaggacacagagctagtaagagtcagagccagggctcggacccaggtctccaagatatcaaagtccatgcttctgatcgtgatgccgacctgcactggttgctcagtggccatcacctgggtctctattaattgcctggtttcagctgctgcctttctctgacttaagtttgttccctgcatgcagtctgttcaattgactctagcccttgtccgtacctttactcctgacttcgggtcttcccctgtgtctggagaccaccccctctctcctccctgcacctttgcccccatcatgttcttccagccgtgcctcggatcgtctggctttaggctctgtcctgaaggttggcctctcgctatggtcctggtggcacggagtggtgccagcaggggtgaaagagctgttggaattgccccttggtgttcacttttgggccaccaataaagagtgtgataggtgtcagggaagtgtaaggcaaatgggcatgggagctccaagtctggtctggaccacagtggcagacccttcaccaaggagggaagaagcctgctggctctatcaagccagtacttagtgtccagaagccatgataaagaaaatgcacctggctagccttgtctgtgagtcagatttccataaataactctattgtaaagaattgatgtttgttgtctgaagattcctcccttactttaggtatattcaaatataaatatattgagtaggcatagtttttactaggctaaatataataatgaagtatttgagaatatgtgtagaaattcaaatattacaatgaactcataagcattcattactttgaaggcagaaaacttgggttcagacaaataaaggtcctgtttaaagaagtgtaaattgaatcctcttttttgaattgttctctgtttaggacattagcctgggtatagaatttaacaataaaaataataataatagtaataatagtagctagcattccttcagcacttcctatgtgctagatactgtgctaagcacttggcaacctcctaatttaatactcatgacaaacctgggagatacgtactattactatcaccattttacagacaagaagagagagaagctgagaggattttaaaaacttggcccaagataattatgggcaaagagaaaatataatagctataatttccctttctgcataagattttgaccttcagttgacttcctagctctgttaccccggtaacctggtaagagccaaatgtcaactatgtttccaggcaacattgcctacaataaaaatggctcctgattggtaaattgcatctggaactgggaggatctgtacaggaactagaaatacttgaaagggacagcattctttgggctttcctgagggcattgactctggcatacctctcatggtgaccctggaagctccgcctctggagttgctatgagagaaattgctcttgtaggacatgaggtttttcaccagc

SEQ ID NO: 5694 - DNA, 2300 bp, Homo sapien
ccttatctttttggcatcatgaggatgatgatgatgatgacgacggtgatgagaacaatgattgatgtcactttaattaactcacactaacacttctaaataattgtcacctcctccctcccctgacttcagtgtcagtaagacatctggtgggtaagaacttggcattccactgaccctcttaccatcagtatgatgactgtatgtgactttgggggtagctggtgacttgtgggttgggtatacctgtcactctctgttgggagctttgtaagtgaaaggggttagttggacgggaaattcactacccaatgaccaaggtgggtgagcaaagaagaaagacccatggtgatgactaaaatgaaaaagcagtcttgatgtttgccaggaaggtgggggaaggtgagggttattgaaacttaaggtttgagtcccaccattgcaagcctctcacctccaaccctgtgaacccacaaatattttcagtagagcaaaggctccttcactggggtccacacactgggaatctggacacaaggccaggtctgaggtttccttttgtgctttctaaggacatgacaatagctgtgatgctgaatttctgaggaaatagccagtgtaaacaagataaatgcagtgtaaacaagagacatgtttatagcctacttcagaatcattttctaagcatactgtaaaccatgcttgtggtaccttttcagacattggttaattatagcaacttatttgttcttgaaagcagatagggcaggatgttgacttggtaacactttgttagccactcgtttgtgttattttatgcatctggaggcagcgcttgctcggggtgggatgggtggtcaggcactcgtgttctcagttatgaccagactttacaaaagagctgatacattctgcctgaatgtctggaattatttcaaaaacaagcaaagacagttttcaacttaagaaaaataaactgcattttcaatctgtattttacagaatttccttttctcctgaatacattttgctgacaggtctccaatatacaccctgcatgggaatcagggtcctctcagacacccaaactcccttcccctctcacacagcccttcccccatatagaaggtgtttcttgtggcccagacacatcatttgcgctcatgcctttgtgcctttaatcatgcttttcctctgccagaaaagtcctcccagctctcctgtgtggtctctccagtaccagtgaggacagaaattttctcactcttccatttcttggggagcctgggataggctttgaatatttattattcattgataaataatgagtatttatttgttgaagggataaggaaatgaacaatgaattattttattactttaaatagaaaatatcatgcctttttcacagaagggtaagttcaacatcccagtgctatttgaccgaggggagcttgccttcttcatctcttaggaagtttttctcaacttctgaatttttcatgtgcaagcacttttctgtctctctctctctctctttttttttttttttttttgatggagtcttgcttagtcacccaggctggagtcagtggcgcaacctccacctcccaggttcaagttattctcctgcctcagcttcccgagtagctgggactacaggcgcgtgccaccacgcccggctaatttttgtatttttagtagagacgggattttaccatattggccaggctggtctcgaactcctgaccttaggatccgcccacctcggcctcccaaagtgctgggattacaggcatgagctaccgcacctggtcccacttttctaaacacttagaaacattaacttaatttagttctatttatagtctcatcgtacaagttggtgcctggtgataaggtatcacataattctctctggttttttttttgtttgttttttgtgtttttttgagacagggtcttgctctgtcacccaggctggagtgcaatggtgcgatctcagctcactgcagcctccgtctcctgattagctgggaccacaagcacacaccaccacacccagctaattttttgtatttttggtagagacagcgtctcataatgctgcccaggctggtctcaaactcctgagctcaagcaatcctcccgactcggcttcccaaagcacttggattacaggtatgagccaccgcgcccggcctccctgttttttcatgtggggcctcatcttcccaattcattggaagctccttaagggacacagctgtacaggacacacttctggaattctcctgtgg

SEQ ID NO: 5695 - DNA, 2300 bp, Homo sapien
taattccagtggtcactgctagccaggagtgggagcagagtttggatagctgacctagcacccaaaaccttacctgcaagtggcaggtgccttctaatggtttaacaagttagaaatatcctttaggttaaaagttgtccagatgcacttggttaggaggaaggaaagagccttctctccctaacatccggagctggaagggaggaacatgcgtttgaacagtgggaatgttaggggagttgaccttgaatagacagatgcatgctcagtagaaatgtctatgacaaagaacacaaactggccaggcccagagacttgtgaagagcgagagaggctttggggagagaaggaagagggtggagtcaggaagaccagtgttcaggcaaggttctccaaatagggagattttcctggcttatctaggagggccgaatgcaatcactaggatccttttttttttttttttttttttttttttgagacggagtcttgctctgtcgcccaggctggagtgcagtggcgggatctcggctcactgcaagctccgcctcccgggttcacgccattctcctgcctcagcctcccaagtagctgggactacaggcgcccgccactacgcccggctaattttttgtatttttagtagcgacggggtttcaccgttttagctgggatggtctcgatctcctgacctcgtgatccgcccgcctcggcctcccaaagtgctgggattacaggcgtgagccaccgcgcccggccactaggatccttaaaactggaagagggagacagaagagagtcagagaaagggatatgatgacagaagcagggccatctggctttgaagatagaacaaggaggccatgagccaaggaatgtggatggcttctagaagctgaaagagccaaggaaattgattcccttctatttggcagaaagaaacccagcccagccaccaccttgattttagccgatggagactcatgtcacacttctgagctacagaactgtaaaatgataagttggtgttgttttaagccactaaatttgtagtaatttattatggcaacagaagaaaatgaatgcacggcctcatcctgatattcccgttcttaaatccatttcattttatttccacctggacttcagccctaaccttgcctcatctctgctctctgggtccatcttctggcccctggattgttgagaactccaaggggatgtgctattcagttgaatttcggcagcaggcaaagggaggagtccaagaagagggcaggtgaaggcaagggttaagcaagagttctagctctggaagcagactggcttggtactgaacctccgggagcttttgttctctgtggaagcctgagcaaggtatttggcttgtttctttggctccaatgtaaagacagtgataggtgctacctcagaaggttgctgtgaggatgcaatgcgataatgtgtgtaaggtgctaaacgcagcgcccagcagacaggaacacaggaaatgaatggcagagaaactctattagacatttatcatgtgacattataattaatgttcatgtgccatcaggagaccagatccaaggaacggcagaaagatcacaggagggcactcaagggcaacgccgagcacccagggccaggtgcccagccctcctcctcttccccttcctgtcccctcccctttcctgctggggcagcaggggcttagggacaaagccccaggcgatgaggaggtggcttggacagctggtgctcacacacacacacacccccgccctgtctcccagaggcctggcagccccacactctccccctccgcctcctccccacaccccctccacctcgggctgccctttggtggcagatcagggctggtttcccgaggagtggggcgcacgtggcgcgaagcccccgccttctcgctgcccctgagcagggggccgtggggggagctggccggcggccggcatggggttctcacttcccctccccaacggccgcgggtgcaggtgccgcgggccgagtcccgcaggcggggcggactctgtggacacgccctcgtggcgaggccgggctgccctgagggaggaagcgccagagcggcggccggtcccgcgcggagcccggcgcccctccagcccgagccaggacgccgccggccccggtcccggccccgggcacgcagcgagccagggatgtgagcggcgccccgcggcatggcagcctcaggtgggtaggcaggcgccgcgggtccccgggctcccggcccctctctcgtaccccgcatc

SEQ ID NO: 5696 - DNA, 2300 bp, Homo sapien
ctggatggaatgaaacaatgataaacatataataggtgctcaatgaatattagctgttactattgcctccctatcctttcttccaaataggtctttgtgataggtcaaccatgagttagttcccaactcaaaataagtgaagcagaaattggaactcagagtagagtagtaaaactagcattaaattggaaattgggaaacttgtctcctggcttttgttgccctttctctacccagcaactatgtaatcttggtcaaatcaccttacttgtctgggcttccaatttcatatcttaagttacaaaattgatctctgaagcctctaggattctctgaatccatatgtctgggactaagagattatgtcgaggaattattacccttggtttgattgttttttaaacaaattaacttggggtggttggaaaacacattgattatttactcatcttagagttacacgttgttcatttatttgaaactgaaacgtatttcctccaaacaccgtagaaacttaaaggccgcaaaagactcacacccaccacctagcggcgaaaaaaggaagtttcaggtgatacaagatgtcctgccatcacacctgaaggatggttgtccacagccattttttaaaatctcgtattagtcctcttccttcaacactcaggacagtattatgtacccagaaactcaatacttcctggcgtcttcatttgacaatactcttaagccaatgaaatcctgtgggacgtttgcgaattttataaagatcaatgttttaagattggcggggtgggctgggagtggtgggggggaaggtgccttcctacccttgcatttgcatctcaagccacccgtacccgaggcccacccagtccatctgttcattggtagatacaccattccgccattccgccagtggctggtgcagagaaccaggaccaccacctttgaaaagacctaaatcaatactccaatgggatcctgatgtcaagtatttaacgactttgctttacctactacagtaattaaaattaagtcttcaaacttaaatttaaatttctaaaagcaggaatgcactgtccttaatcttaaacaccaaaggtgggagaaagaggccagaatcctagggtactaggcctactggtatagggcgatctcttctgcttttttctttccaccccatttcttttccctttctcctttcgtttcccatcttctctcttctcgttctcttcgaagtaacagtgacaaaattaaggtgattcaattattccaagaggcttgctcatataaaatatttctcttcaagccctttcctgaaatcccaaattaaagcatttccaatagtctctgctttaagtattcctagttaagtctacttttggaaatattaaatattctcactttggcacaatattccaaaattccttgagaagttcgcctacgatcagtcttgctagtagaaacctttttttttttttatttaaaacgctcgatttccactttttactaggtttcccaatgttggcgatgtctcccaatgacttaataacgtgtatccacttcacctttgaaaatcttagaggtcagtgcatccaccggcatccgggaatttattcttatttctgcttcttaaacaggctctggggaggagcagtttcgacggagaagttcatagcagcagttattacggaacttgcaacagttggtgccgggcgataggcaggttggaagtgataaatggggctggcgtaaaaaacaaaaagccccggggagggcgggggcagccgtggccttgggggacagtgcgaaggcggcgcggggccagcgggactgacttccggctgtgggaaggcgccgtcccgggcggccagaggcggcggcagccgcgtagaaggacggcgggatcgcagcccggcgggcggcgcgcggggcgggtgagcgggcccaggccgcccccgggccacgccggggccacggtgaggtgaggccggccctgcccccgcaccgcccccggcaggaggcgcgacgcccgggccgcgggtgcgtgcgcggccccgggcgacgcggctgggcgtgcgcggggccgcggcggaggctgggccgggcgggcggcagaagatggcgagggtgtgtaggcggcagcaatgctccgttgagagacgcggctttcggcaagaactggattcgtggcgccacaagctcattcactgtgtaggtgagaccctccgccgaccgccgccgcccctccggccgccccgccgccggtcgccccagaccagggaggaagctggggaagt

SEQ ID NO: 5697 - DNA, 2300 bp, Homo sapien
tggcgtcttcatttgacaatactcttaagccaatgaaatcctgtgggacgtttgcgaattttataaagatcaatgttttaagattggcggggtgggctgggagtggtgggggggaaggtgccttcctacccttgcatttgcatctcaagccacccgtacccgaggcccacccagtccatctgttcattggtagatacaccattccgccattccgccagtggctggtgcagagaaccaggaccaccacctttgaaaagacctaaatcaatactccaatgggatcctgatgtcaagtatttaacgactttgctttacctactacagtaattaaaattaagtcttcaaacttaaatttaaatttctaaaagcaggaatgcactgtccttaatcttaaacaccaaaggtgggagaaagaggccagaatcctagggtactaggcctactggtatagggcgatctcttctgcttttttctttccaccccatttcttttccctttctcctttcgtttcccatcttctctcttctcgttctcttcgaagtaacagtgacaaaattaaggtgattcaattattccaagaggcttgctcatataaaatatttctcttcaagccctttcctgaaatcccaaattaaagcatttccaatagtctctgctttaagtattcctagttaagtctacttttggaaatattaaatattctcactttggcacaatattccaaaattccttgagaagttcgcctacgatcagtcttgctagtagaaacctttttttttttttatttaaaacgctcgatttccactttttactaggtttcccaatgttggcgatgtctcccaatgacttaataacgtgtatccacttcacctttgaaaatcttagaggtcagtgcatccaccggcatccgggaatttattcttatttctgcttcttaaacaggctctggggaggagcagtttcgacggagaagttcatagcagcagttattacggaacttgcaacagttggtgccgggcgataggcaggttggaagtgataaatggggctggcgtaaaaaacaaaaagccccggggagggcgggggcagccgtggccttgggggacagtgcgaaggcggcgcggggccagcgggactgacttccggctgtgggaaggcgccgtcccgggcggccagaggcggcggcagccgcgtagaaggacggcgggatcgcagcccggcgggcggcgcgcggggcgggtgagcgggcccaggccgcccccgggccacgccggggccacggtgaggtgaggccggccctgcccccgcaccgcccccggcaggaggcgcgacgcccgggccgcgggtgcgtgcgcggccccgggcgacgcggctgggcgtgcgcggggccgcggcggaggctgggccgggcgggcggcagaagatggcgagggtgtgtaggcggcagcaatgctccgttgagagacgcggctttcggcaagaactggattcgtggcgccacaagctcattcactgtgtaggtgagaccctccgccgaccgccgccgcccctccggccgccccgccgccggtcgccccagaccagggaggaagctggggaagtggcaattgctgctccggcccgcccgccctctttggctcgagcgtccccccttcccccaccccccggagtgtgagcgcgcgcgacctccaggcgggctcccctgctcggccgagcgcgcgccggcccctcccctccgcgcgcctccccggggctggctctcggcgggagcgcgggttcctccccctcccgctctccatccccgcctgctcgctcccctccctccccgctcccgcccctgctcccgctccaggcccggcgccccggcgccgccgccggcttattgtggcgactcgcctcgcggcgctgccgctgtactgggggaggcgcgaggggcgcgggcgtgctcggcccccacccgcgctgtggccgccgccgtcctcctcctgcgccacccctcccccacgcgcggggcgcgcccccgggtctgcgtgcacgcgcggcgggctgcaggcgggcgcccggcgctcgggcgtgtgcgaagcgtgaggtggagatgggggcggagggagctggagctgtcacagtccccgggtgcgcctgaccgagccaagtggggtgtcatggccgcggggggcagcggctgcacttcctcagcgggcggcggtggccggggagttaatcctcgacgcacgggtcggtgtgtgcgtatttgtgttcggtgtcgtgctgcgggaggagggggtgggaccgggtccgac

SEQ ID NO: 5698 - DNA, 2300 bp, Homo sapien
ccttcctgtaaaagtgcctcatgactgagacagaaaaatcaaagactgaagaaaagaattagccagaagatattatcaaacatctgttcacacatttaaagctgcctctgtgtgctgctgtatttcatggcaagtcacataatagtctcctgaggaattataatccatacagagagagagggagtttaaaaaattatataaaactccaggaaattggagcacaccgactgcatgggttcagtacaacccagacatccagaagcacaaagcagctagtgaaaggcctggctgtctaagcaggtattgcctgtggcatgtcttgagtctagcatcaccctttcacacagtccccactgtctgcgctaagctctaaggatttgtcctgggtgacttacttaaatggtggaaaggggtttttaacatagaatgatttcttgtggttgattgtaaaaggtgtattgaagatctcggagaatgtagcaagtgggccttgaataaagatacaatactactaccttgcagtgacaggcctgtacagtttagtgtggcttcatagctatctcctcacttaagagactgcgaattgggacttgcttgtcatctcaccatttaaagtaggtgaagttattgatttctattcctttatactcccaggaaagggtagcaggattcctgcattagcatgaccaattggtcatgctgagaaactatcttaaaactgttaagttctcagccgagtgcggcggctcacgcctgtaatcctagcactttgggaggttgaggcaggcgaattgcctgagctcaggagttcgagaccagcctgggcaacatggtgaaaccccgtctctactaaaatacaaaaaattagccaggcgtggcggcgtgcgcctgtagttccagctacttgggaggctgaggtaggagaattgcttgaacccaggaggcagaggttgcagtgagccaagctcgcaccactgcattccagcctgggcgacagagcaagactgtctccattaaaaaacaaaacaaaacaaaaaaaaaaaactgtaagttctgttaagtacttctaaacccaagatttgtactgtagtgcacctcaattcttgtcagtgttgtggacttataaacccacgattatttaacaggaatacccagacctaaaataaagtatatgttgaccaaccagagttaatagtgtggtcaaaattttagcttttttgaaaaaaatgtatttgcagtatttcttctctttaagataaaaatgatttttgaatgattacttttaacgtatgaagaatatcgtcactaaaatttgaggctataacaggctgaccttataattaggtaaataattcacatttattgaatcaaaagtatatgagcagacttagaagcagttttcgccaaagtacccaccctctttataatacagatagccaggcaaggtggcttacacctgtaatcccagcactttgggaggctgaggcaggaggatctctttaggccaggagttcgagatcagcctggccaacatagcgagaccctgtatctacaaaaaataaataaataataaaatgaataacgttgggtgaattttataatgtaaaaatggttctttggtaaatgacaatactaattccttctttctctttctctgtctagtgagaactcaacagaggcaaaagcagtagattctaacaatcagtcgaagtccccactggagaaatttatggtcaaactgtgtactcatcatcaaaagcaattcattcgtgttctgaacgacctgtacactgaatctcaaccaggcactgaggacctgcagccttctgattcgggagcaatggatgtatccacttgcaatgctggctgtgcccagctcagcaccaaacataaggaaaaagatgctctgtgtctcgatatgaagtcttctgcttctgtagatttgttcgtagactcgtcagactctcacagccctctacacttgacggaacagaccccgaagaagcctcctcctgagataaaccctgtagatggaagagagaatgccttgactgttgtccagaaagattcctctgaacttccaaccactaaatcgaattctattaatagcagttcagtggatagtttcactccgggatacctcactgcatctaattgttcctcagtgaacttccaccacatccctaaaatcttggaggggcagaccactggacaagagcaagacacaaatgtgaacatatgtgaggatggtaaagaccatatgcagagttcagctttagtagaaagtctaattacagtaa

SEQ ID NO: 5699 - DNA, 2300 bp, Homo sapien
aattgttattcattcattaaaataatgaccataacaataaaaccaataataaaagtcagttcattttcattagcatcacacatcggcaattttaaggcatgtcagtgatacaatactgctccccaccaaggaggggctcccactgccacccgttggtacgccgctgcctcggccttaggtgaccacaagggcaaatgccctggaagccacagggctccctggcttgctcagggaggggaggaaaagtgctgctgcgtatttctagggacggtgcagacgcaggccggtttgggccccatgggtatagtctgcccacctacaagagcagaaaacagtaagggaatggacctctctgtgcatcaatgaagctgaaccccttcctgctggcactgagcccttaacgttgccagtgtccccaaggggactgtggaggccacccagcactagggagggagagtaaatcccaaaggcacattcagaagcctcgcaaggagaccagatacaggtggaagagagtcataggcccccctggggacacagatggagtgtctgcagaggagaatagagagggagtcaccagaaccagcttcctggctcctcttcctattggatggagcgctcctccccagacaacccagaacactgctgcactcacgcccaggacaacctctcggggagcagaaggctgtacttacctctcccctcctggaagcaaaacttctctagtttctcttgccagccaaagaacccctagtggcggagtgctcacacaaaggaaatcagaccctgggggaatttaaacatgaacatgttcaaccctctcttctggcagatgacaagaaagcccagagaggtcaagtgccttctctggactcacgcagcttgttagctggtgctcttcccatcgcccccgcccaccttgctgctgggagcaatgtcgtgtcacagagccattgcagtcagcaggttatgggtttagggcctgccctcctctgatagctgtgccagggaggatgtgctgcacatgcctcctggcctcagacagcagcctggactggctatgagcaaccaaagcatggcccctgtaccaggcagcaccagccctgctctgggggtggatatgagtttgcatgtctggtgtgttgagccacaacgcctcttgagtcacagtcagtaaaactaaatatctctcccatggtctgatcactgttgggactggcctggactatcattaaattcaggagtgtcatggatcttggaaaatactaattgctcctaacccagctgggatcctgccctcagggtgatccctattttcctgggatcaaatgtcacttctcaaagggtggtcgtggaccggcagggtcagcctcacctggcagcttggacgagcagaatcaggctcctcctgaacctactgaatcaggacctgcattgacacaagatcccagggtgatgtagatgcacgttaaaacctgtgaggtggccgggcgcggtggcttacgcctgtaatcccagcactttgggaggctgaggcaggtagatcacctgaggtcaggagttcaagaccagcctggccaacgtggtgaaaccctgtctctactaaaaatacaaaaattcccaagcatggcggcgagcacctgtagtcccagctacttaggaggctgaagcaggagagtcgcttgaatccaggaggcggaggttgcaatgagccaagattgcaccattacactccagtctgggcaacagaatgagtaagactccgtcaaaaaaaaaaaaaaaagaaagaaagaaagaaaaaagaaaaaaaaaagctgtgaggcactgcggggaggcactgcagggacacgcaaaggtgacaaccttagagactgccaaagctcactctggacaccatcagaggccatcgcagactgtccttcacaggatgtgtgtgtgacatgctgccatgatcactctgtaatagtgtcacggggtggatgggggaggcctggctcagcagcagctcagggtactgagtcgtagatgacagcaagctcaatgtgcactgttgtgtgatgtcacagtgcagccaccaggttgggagacctgcttatatacagtgtccagggagcacaaggcctgggggcccacaaacctgggtctgtatgcccactcttcattagcagctccaggaccaagtgcggtcagttttctggaactcgtttccatatctccactgtgatgtaaggatgtgcatggatcctaaatgtgagaagctggcaatcaccaggtccctggcaagtgctcagagtctgagc

SEQ ID NO: 5700 - DNA, 2300 bp, Homo sapien
cctgctcactcccacccttcctcataccccttcactctgtcactctgaggacctaggggcatgtcgcctggctaatcaacactctctcccttctccacatgggtcttggcttccaaggggccctccgaggtcctgggaccagggagctactgctggagcagaaggctggagacatcttcaacagcctgagtgctgtctgtgacaggcctactaagtgccaggtgctggggtgtgtgtctgggtgagcgagtgaggatgccagggggtgggcaggggtgtggagaagcagctgcaggtactaagaggggataaacaaagcagcgggcatggaggaatgtcactctgaggctgcggggagagcatggatagaggggctggggccccatggagcaggagctggtgagctgcagggcaggggcagccctctcagactccggcctggtttgtgggaagcttccctaatatcccaccacacaggcacccctgagaaagccctgccccctgagaaactgaacttatgctcaagaacccacttaccggatggaggtcatggacagggatgtgtgaaaactttaaaagaactgtcaaaagcccataaaatcagccacctaaattgtaacatactgtgctatgacagtagagagactgcaaaattctcatcaacatggaaaagaaaagcaaagaaaacgcctgagccttgggtacctggtgggtgataaggcttcaaccttgtggagtctatcaacctcccctatccccaccctgcccgacactctccccaccaaatgcgtccatgctgtgtctggacccaggccgctcctgagacgggaggtgcttctcgggctacccagctgtgtcctcttgccaagcagcctcacgtcaaggccccgactgctggacactgccccagcgagccacagctgtccttggcgttgaggagatctttcgtcttttctggggttgaggagaattctctccccacctggatgtcccgttcacacccacgtccacacatgccttacggtgacgaaggtccctacccagccgggtgtgaggcctgggtctgacggggctggcctgtggggttctctcccaagcaggccgcccagcgctatgccagccctctctgtctcctttgatgtcaagatggaatattcattttcatctgtttccacctgtcagaaatggaggaacgctggtgtgagtggaggaagacgtttgccagatttccaagtccccttaatgtctgtccctctcttctacaacgggggaagaagcccgtgtaactgtatggtacaaatacgccctgctgagcaagtgttccaatcagagccattctcatcctgggcatgcggctagcttgttcccctctgagaagtgggtgcattgaggtaggaaggagactgtactccgcctagcgctttcgtggaccctcccccccgacaaagctccatcctcaaagtccaggctaagtaaggttggtggcttgaggatgctacctggggcacaggcacagggtttcccttaaccaagaattgacacagcgagtcgggtggggccgagaggccgctgctgccgtcgggggatggggggaaacgggtctgactccccgggaaggcgtccaagcggcaaaataagatctccctcccaccctggactagcagctggggccgcgggtgccggggtgcgtgcgtctaaatgtgcgcatcctcgccgtgtgtgtgtgtgtgtgtgtgtgtgtgtgtgtgtgtgtgtgtgtacagccaggacttggcgggtcgagtcacacccccttccctcttctcccatcccccgcagccccgtgcccgctgacggcgcctcggaggttccacctttgaaactgtaggcggcttgcagccgctgagtggtcgtcgggagaggggggctgcggcgggggagggcggggaggagcctggccctggatgtgtgcttttcgattgatggatgactgccgggtgggagcgagcgcgcgggtgtgtgtgtgatcgtgtgtgtgtgtgtggtgtgtgcgcagggtgcgtgcgcgcgcggggcctgcccattttcctcctcgcagcagtcagttgggagctggagggagggagagggagacgcaggcggcgaaacggcagaggagccgagccccctccgcccaaggcgccctccctccgtccgcgcacaggcgccgtcgcttggaggagcaaggtgcctcccagcccgcaggggcgccgcgcgcaagcccgcgggctcttcggtggctctgccccgggactgcacctggaggcggccccggacgggga

SEQ ID NO: 5701 - DNA, 2300 bp, Homo sapien
tgtgatggagttgtgagccaggataggtgggttggaagccacacaccagcgatgttacctatgtcttttaccttttttttttgagacagagtcttcctctgttgcctaggctggagagcagtggtgcaatctcagctcagtgcaatctctgcctcccaggttcaagcaattctcctgcttcagcctcctgagcagctgggactacaggcgtgagccactattcctggctaatatttgtatttttgtatttttagtagagatggggttttgccatgttggtcaggcgggtctcgaactgctgacctcaggtgatccacccgctgctgcctctcgaagtgctgggattacaggtgtgagccaccgcgcctggccttttacctttcatgttttaaacagctgtctacaagccattttttgtttgtttagtcttttgccttttctatgcataggcttttcctctgtaaactgggcataatacagtaagtcctcaacctattaacatcgttgataggttcttggaaactgaaactttaatcaaaataatctataacaaaacaaattatttttctcatcaatgttataatgaaaagatgttgaagaaaatgatgttattcgaggacctgctgtatgtcggttcacttaacgtcatagtttccaagaacctattgatgccttaagtgaggacttactgtaatagctttactacataccccacaaggctgttgggaagataatagaaataggttatagtaatttataaaaaatttttgagattataagtaatgagaaaaggaaggtaaaggagagagattgtgtgaaacattttacttaaaaaataactagtgaaaaaataataaagttctgggtcaggaagagcctctgggggtgagtagggggagcagaagacacatcaacatttgtccatattaaggagatcaagccttataatgaaggaattttagaaccagctaaccaagactatagaaaagcagtgagcaaactgtggttataaaaagaagtagtgacttacgcctgtaatcacagcactttgggaggctgaggtaggaggactgcttgaggacaggaggttgagaccagcctgggcaacacagtgagaccttgagaccttgagaccttgtctctacaaaaggaaaagaaaaataagctggacgtggtggcacatgcctatactcctagctacttgggaggctgaggtgggaggatcgcttgagccaaggagtttgcagctgcagtgagttatgattgcaccactgtactccaatctgggtaacaaagcgagaccctatctctaaaaaaaaaaaaaaaaaaaaaagtatttaaaagcaaacagataaagtaacaaagatacatgttgaaaatgagggctttgggatagtagagttactgaattacttaaaaaagacaggagaaacaagggaagggaatcaatgacaattttgctgtgttttttgtttgtttgtttgtttgtttttttgagacagagtcttgctttgtcgcccaggctggagtgcagtggtgcggtctcggctcactgcaagctctgcctcccgggttcatgccattctcctgcctcagcctcccgagtagctgggactacaggcgcccgccaccacgcccggctaattttttgtatttttggtagagacggtgtttcactgtgttagccaggatggtctcaatctcctgacctcgtgatctgcccgccttggcctcccaaagtgctgggattacaggcatgagccaccacgcccggtaattttactgtgtttttaagaaacagatgtcacctttggtatcagtagtgaccattcttttttgtctttggagaaactctagttttctaaagaggcagtggtgtccttgatagctggaacagattctgtttttttctgcccattttgaatcctagactagattttccttgccaattttgtttacatgtctaattttcaagcagaattaggaaatgaaaatggttttcaaggatttcctcgtcacttcagggacacattgtttttctagattatgtcatatcctgatgaaccaaaaagtcttcccagaattaaacattgtattagaggcacctaggctagggatagaaacttcatacatttgaaagaacaggcttattggtaagtactactttctagctcttaatgtccattgtttggtttcttttcctctgaataggtcactgcaaatgaccttcaggagaatatcacaaagttaaacagtgggatggcttttatgattaaacactcccagaaactttttaaggt

SEQ ID NO: 5702 - DNA, 2300 bp, Homo sapien
ggaaccttgacaaagctaattacattgaaaaaaaattaccaatatcaggaacaaagaggaggacattactatggaacgtagagacattaaaaaagataagaggatattatatacaaatttataccaataaagtttgaaggtttatgtgaaatagacaaattccttgaaatctacaacttaacaaaattaacacaagaagtaaaggaaaatgtgagtagtcccataacacaaaataagtggaatgtgtaatgaaaaactttttcacaaagaaaattctaggttcagatggcttcatctgccaattctgtcacatatttacagaagaaataacactaatctcacataaattttttcagaaaatagaaaaataagacatattggccacgcgtggtggctcatgcttgtgggataccaaggcgggcagattgcctgagctcaggagttcgagaccagcctgggcaacacgatgaaatcccatctctactaaaatacaaaaaaattagatgggtggggtggcgtgtgcctagtcccagctactcaggaggctgaggcaggagaattgcttgaacctgggaggtggaagttgcagttagctgagatcgtgccactgcactccagttcgggtgacagagtgagactctgtctgaaaaaaaaaaaaaaaaaaaaaagacatatttcccacctaagtgtataaggctagaacaaccttgatataaaacctaatgaagacattacaaggaaaatttaagaccaatctcacttatgaatgaatgggaaatctagactattagcaaaccaaattcagcaacatgtaaaaatgataatacatcataacaaagttgagttatttgagaaatgcaaggttggtttaacaatagaaaatctgtattatttaccataaaggagaaaaattatatgatcatcaatagaggcacaaaaaatttttgataagtatttgataaaattaaacaccaatacacaattttaaataagtaaatatataaataaatatatatatctcctctggaaggcagaggctgcagtgagccaagattgtgccactacactgcagcctgggtgacaagagtgagactctgtctaaaataaataaataaataacatagcaaactgagaataaaaatataccacctgaatttgattttgctaagtgatgagtagggaaagatactatttttaaatttgctttattctgataacttgtaaagttgagattctttttatgtttattagtcattaggtcccctcctctgcgttactgatcatgtcatttgactaattttctattgagtcaagtgtcttttccttattaattttttggcttactggtaaattctgaatactgatccttggttatatgcatagcaaacatgtttttttcagtctgtggcttgtcttgtattttattattacttttaaagttttagatttatttatctatttatttatttatttattatgaatggatagtacgttcaaatgaatataaaatccagaaaatacaaaagagcatacagtgaaaactttctctcccactcttcttccccttttatccatttctctttagaggcattgtgacttcatttttaagacatttagtatgtaatgtcatttgttatacagaaaaatttaatgtagttaaatttatgattctttggagattgtgctttttatgtcttgtttaagaaactctttctctgttgcattaatttattctatattgttttttaatgtttttaaatttggcttttcatatttagatctttactttgtttggaatttattttttgtctgtgatgtgaggtagggatcacccctcccccatattgtaaaactacctgttatatgcttttacatttgtaactgtttcatctagcatagcttaagtggtgatgggagtctgcttttgagcttcatctatgcattggcaaatacagttaattaactggtctagttttttatctctattttccttcttgcagatgagtgctcagagtcctaagtactgcctttcaggccccataatgtgcccttgtatcctctaacatgtctggaatttgcgtaggctgtgctggggcagggaaaggagagtttctttgtcacaacaaacaaggggaaagctttcttcctgtctcttcgatttaccaatgcctcatcagaaactttcagcacttatgtaagaaatgtatttattttcttgaactttagtatatttcgtttgttttacaatattgtagagtagaaagttgtttttgcttaaatatagtagttttttctttagt

SEQ ID NO: 5703 - DNA, 2300 bp, Homo sapien
cagctacttgagtgtctgaggctggagaattgcttgaactcgggaggcagaggttgcagtgagtggagaccatgccactacactccatcctaggcaacagagtgagactctgtttcaaacaaaaaacataaaaaacatcaaactaaatgcaattttatttggacacatttatcaaacttttattttcttttttagagaaagggtctcattctgtcgcacagcctggagttcagtggcacaatcatagctcactttaaccttgaactcctgggcccaggtgatcctcctgcctcagcctccaaaagtgatgggattatgggtgtaggccactgtgcctagcccttatcaaacttttagtattaattcatcaattgaaaaaaatctattagagtatatgatttgattttttatttggatataatagtttgaggacttgcttatatttttcaaaaatatttattggacagccattatgtgccagaaactgtggggagcaaaataaatatagtctctgcccacttgtggcaggaagcctagctgggaaccctcacatgaaataaatagtcacacaaatgactatgtaattgtgagttgtgatatgaactgtgaaagaatagtacagagttctttgtgaaagtttactgagggaattgatttatacaatgggggtcatggaagatctttgagccagtgacatttaagcttcgacctgaaagccaaaaaagtggaaaaatggacgagccagaaaaagcaacatgtgcaaaagccctaagacagttcagaaagtgaagcatgtgcagtacagtttagtaaaaaggaggcagagtgcagggagagccccaggtggcaggatatcagaaggatcaatacagaaattcccgagaaaagtccagcataggaaaacaatatggaaaaacaaaaaacaacaatgctcaaaatttacaatgttctcacatatgttgcctcagttaatccctaggagaagtgtgtgccgcagggaggacaaggataattatggttattcctaccattgaggattaaagtttagtttgggacaaagtcatgcagcttttggttccatggttcatatcacaaggcaaactctgtgggttctctgggaagttggaagggagtgaatgtattgaagcagaaatgaccgactccagcctggccaacagggtgaaaccccatctctacaaaaagtacaaaaatttgccctgtgtgttggtatgctgcaatattgtactgtgctccagcatgggagacagagggagaccttatctcaaaaaaaaaaaaaaaagaaagaaataaaggaagaaagaaatgacctatggctagggctatgctgagtatctgaagaaagaaggctttgaactatacgtttaaaagcaagtacttctaggttgccactccctgcctgcacttgagggatttatctctgggtcaagacagagaacgagtcttgcattaaattacattaaattaaatgaattaatttatggctgggtgcagtgcctcatgcctgtaatcccagcactttgggaggctgacataggaggattgcttgagctcaggggttcgagaccagcctgggcaacatggtgaaaccctgtctcaacagaaaaaaaaaattaaaaaaattgtaaaaaaaaattatttattttcaacttttattttaaatttagggggtacatgagttggtttgttatctgggtatattgtgtgatgctgagatatagggtacggagtcttgcattttagaaagtgatgagtcactttcaaagttgacagttctataattccctgatttacatatcaggacaaaatttgagcataggctggtgatttctgacttgaacctaaaggtctgtggaatcggaagggttcatcaaaatgagaaactacaactcccggcaggcctcggggctgggtcttcttccccgcccctccctctttttccgccagggctgggaacgaccaatgacggttagtcatttgaatagaccaataatatattaaacggttcaggttgaggaggggcggtcgagtcatccaatcgcacggaagaggtgaaaacatattagccaatccaaatatgtgggggcgggacgtaaggtggggcggtgaaagaagtttgctgacgaagatggcgactgaggcacagagtgaaggggaggtgccagcccgcgaatccggccggaggtgagctgagtttggtccagtttcctgggaaacgcggccttgggctggtagtcctgccgcctttgccttgggtcacggaggcgcacggttcgggcttt

SEQ ID NO: 5704 - DNA, 2300 bp, Homo sapien
aaagaaaagaaaaaagaaaaagaagagaagcaaaactatctctatttgtagatgacacgatcttctatatagaaaatcctaaggaatccacaaaaacaaggtgatgaaccttatgacaccctgtagaaatccagatttcgtagattagaaatccaatggctttgtttaaactgtctcttcctctgtttttacattttttcctccacacttgacaaaaacaaacccaactctttttaaaccaacttccctacctctttcctgcactcatcccttcctaaaggtttgctcctataattattatcgttggaactgcccaacaagaccctcgttttctatttatctggatctccaggctcatttctttctttgtatcctattttctatatcatgctcagaattttaaagttgcttccaggctgggcgcggtggctcatgtctgtaacgccagcatttcgggaggagggattgcttgagtccaggagtttgagaccggacgggccaacatggcgaaaccctgtatccactaaaaatacaaaaattagccaggtgtagtggcgcgtgcctattgtcccagctactcgggaggctgaggtgggaggatcacctgatcctgggaagtcaaggctgcaatcagccagatcacaccactgcactccagcctgggtgacagagtgaaattctgtcaaagaaagaaaagaaagagaaagaaaaggaagaaaggaaggaaggaagcgtatctccattttcatccaaacaggtatttttctctgctactacgtacctcctcagagcccatcccccctactggtctgaggcttttttttaaacaactttctggacatagcccctcttaagactaacaacctatagccaggcgtggtggctcacgcttgtaatcccaggattttgggaggccgaggcaggtggatcacctgaggtcgggagtaccagaccagcctgaccaatatggagaaaccccatctctgctaaaaacacaaaattaggctgggcatggcggcgcatgcctgtaatcccagcaactcgggaggctgaggcaggagaactgcttgaacccaggaggcggaagttgtggtgagcggagattgcgccattgtactccagcctgggcaacaagagcgaaactctgtctcaaaaaaacaaaacaaaacaaaaagagtagcaacctaggccgggcgcagtggctcacgcctgtaatcccagcactttgggaggctgaggcgggtggatcacctgaggtcaggagttcgagaccagcctggccaacatggtgaaaccccgtctctactaaaaatacaaaaattagccgggcgtggtggtgggcgcctgtaatcccagctactcggaaggctgaggcaggagaattgcttaaacgcaggaggcggaggttgtagtgagtggagatcgagccactgcactccagcctgggcgatagagcgagactccgtctcaaaaaaacaaacaaacaaataaacaaaaagactagcaacctcctctccagcaatgccaaccccagtccaggcccccatccgcccaggatctcgatcaaaaaacattaatctgtggcctttctttgccatttccaactctgccacctccatcgaacgacaaggtccccttcttcctttccattcccgtcagcttcatttccctaatctccgtacaaatccctagcctgactccctttcctttccatcctcaccagacgcccgcatgccggacctcaaaagcgcaaacgctaaaaaccggttgagttgacgcacggagagaaggggtgtgtgggtgggtgggtgtgtgttagtgtgcgtgcttgcttgtgtgtggaagaaaccaacagggttcacgctggtgcccatttctggaaatgccaatcgcgcccgactgcgggagccaggatcaggtccccagggcgcccttgcagacagcaccctgagcgaaggagctcagaaggcagtccggcttcacccagacccccaatcccacagaagcgccgtcccccagcggcacagcaccccctccccggcgcggtggtagggcccgacgtgacgtcacccattgtttacaaatcaacccgagccggcaggattccggctcccgcggctgcaggcgcgcggctagagtgcctggcgggctccggcttccgcgtccgccccggccccggtccagacttagtcttcagctccgcgcccgctccgccgcggcccaccgcgcccgccggcagccgagcccccagcgacgcccgcacagctccgggtgcccagacagggggccatgccgtgccg

SEQ ID NO: 5705 - DNA, 2300 bp, Homo sapien
gagactccaaatttagcatcgtgttagaaatttcaaagagattttaaaatttgcctacatgaaaatttggttttagtgggggaaaaaatgactgtacagagccaacaaaagcctggagacgtatttgcggcaaaatatgaaaagggttaacatttggtatgtaaaggagtcatgcaaatacgtaagaaacactccctaggaaaatcttattaggaaatagacaattcataagaaaggaagtacagtttgttaacaaacatttagaaaactgctctacctaactgaaatcaaagatatgcaaactgaagggagaaaatttccctatataatccgcaaaaaaaaaaaaattcaataatactcaaatactagtgaaggtgtaatgatgtatgctcaagcattaatgatggtagagtacatttacctaactcttggaaagacacttcctgaacatttatcagtaaaccttaaaatacccaactactgtgacttaaaattccactcctgggaatatgccctaaggaaagaatcatcaatatcttaaagtgtcgcgcacaaaaatgttagttacacacttaacgatggtgaaattaggcaaatgttaaaaacataggcacttgatggaaacttatgtaatcattaaaatgttttcaaagtgcatgcaataacacgaaaaacgtttatgatgtaaggcaaagtggaaaagtgtgtaacactgtatgcatgtgtttgtatactacactttcatagaacaaaggctaaaaaggaaaaaaatttaaatgtgaaccatgagagattttttccatcccttatatttttctttttttttttgagacggagtctcgctttgttgcccaggctggagtgcagtggcgtgatctcggctcactgcaacctccgcctccagggttcaaaccattctcctgcctcagtctcccgagtagctgggattacaggcgcccgccaccacgcccggctaatttttgtatttttagcagagatggggtttcaccatgttggccagactggtctggaactcctgacctcaggtgatccgcccgcctcggcctcccaaagtgttgggatcacaggcatgagccacccaccgctcctggccaatcccctatatttctatttgaaccttaaaaaaaaaaaaagacccttctttagccgagcggcggtgagtcctattctcatgatatgtccgggggcttgaagactgcgggagggaaagcctctgggacctcacctcagagcgattctgctctgcttcaaagcgtcccctcttaggccgggcgcggcggctgacgccagtaaccccaacactttcggaggccgaggagcgaggactccttgagcccaagagttcgagaccagcctgggcaatatagtgagaccccccccccccaccaccgtctctacaaaaaaaatttttttaattagccaggcgtggtggccgcgcctgtggtcccagctgctccggaggcttaaagtgggatgattacttaagccagagttcgaggctgcagtcagccgtgttcgcgccactatacttcagcctgggcgacagagaccttttctaaataataaataagtaaataagtaacgtgccgcctcttcactcccaattccctccgcctttccccgccccgcctcgtcgaagccggacccgcggcggcccgcccctcccccacgaccagggccgggaactgcgggtgcgcggggcgggagtcgggcgggcttaggcgcggccgacacgtggggagggaggccgcggcccaggaggcgggcccggagtgggtgtgggtgtgtccgtgcgtgggagaaaccaacctcagcctcctccgaggcgccacgtttcagcacggctcgttgggcccgggaggtcggaaatcagtccccacgccccggaccccctcctggagggacaacgaacacaggcgcgggacggcttcggtcaccgcccgcgccgccctttgcccccgtgcctgctcgcgcgtcacccccgccccggtgcggtggtagggcccggcgcgacgtcacccattgtttacaaatcaacccgagccggcaggattccggctccagcggctgcaggcgcgtggctcgagtgcctggcgggctccggcttccgcgtccgcccctgctccggcttcgcccgcagctccgcgcccgcgggcaaccaagcccccagcgaagcccgcacagctccgggtgccaggacggggggccatgccgtgccggagggaggaggaagaggaagccggcgaggaggcggagggggaggaagaggaggacgacag

SEQ ID NO: 5706 - DNA, 2300 bp, Homo sapien
ccggctgcagtggctcacacctgtaaccccaccactttgggaggccaaggcaggcagatcacttgagttcaggagtttgagaccagcctggccaacatggtgaaaccccatctctactaaaaatacaaaaattagctgggcgaggtggcaggtgcctgcaatcccagctactcgggaggctgaggcaggagaatcacttgaacctgggaggcggatgttgcagtgagccaagattgcaccactacactccagcctgggtaacagagcaagactctgtctcaaaaaaaagggatttatagaagcccttccaagagtggttggggaggccaggagcggtggctcacacctatattcctagcactttgggatgccaaggtgggtggatcacttgaggtcaggaattcgagaccagcctggccaacatggtgaagccccatctctactaaaaaatacaaaaattagccaggcatggtggtgcgcgcctgtagtcccagctgttcatgtggctgaggtgtgagaattgcttgaacctgggaggcggaggttgcagtgatccgagaccatgccattgcactccagccagggtgacagagcaagactctgtctcaaaaaaaaaaaaaaaaaagccaggcacagtggctcacacctgtaatcccagtactttgggaggccaaggtgggcggatcgcctgaggttgggagttcaagaccagcctggccagtatggtaaaaccctgtctgtactaaaaatacaaaaattagccaggcgtgatagcaggcacctgtaatcccagctattcaggaagctgaggcaggagaattgcttgaacccaggaggtggaggttgcagtgagctgagatcgtgccattgcactccagcctgggcaacagagcgagactccatctcaaaaaaaaggagtagacgtggaccctatcccctagccggtttgggagtcactggagataagaagatctgccacctgcacatgtaacccaaactgggccagatgaaggcttaagaggaatccagccagagcagaatgcagtgagatggaagggacataggggaccaagagaaatcttggggtgctaggggcaaagcgggagccgcagcattagatgagtctgggctgaactcccacctctatggccatttagcaaacactttatcctctgtgccgccgtgtcctcttctataaatagggggtgatagcatgtatctcaggggtagtccaaggattcaaggagaggatatatgtcaagtaccaagtgctgttgagaagactaaagctctcatcctgcgagggtgctcaggcctgtgtcctgaaggagggtgcaggggaaagatggggcctgcccacccgagggaagcatgactgggccagggtgtgggccaggagcagggccgcgctaaccctcccctcagctgggcttgatcatgctgcgtccctgggctggacagcagtaaagggggcgcagcatggaaggctcgcctccctgaaagcctggtgctctgtccggcagatggaagccattgggaagctttcagatgacatgcggcggcacttccgcatgaagcttcggaacctgttcaccaagttcatccgcaagtttgggtctgtgcactgagcaggggcgggggtagggcaagcgaggggccgaggatttccagtcctaccagggacactacatctgggtcgtgctgtctggccagtgcctctcaccagcccttccttgccacctccagatttgagctggtgaaaaggctgttgcccgaggagtaccacagagtcctggtcaacatccggaaagctgaggcccgggccaagaggcaccgagccctgagccaggctgccgtggaggaggaagaagaggaggaggaggaggaggagcccgcccagggcaaaggtgacaggtgagaccatgttagggccatgggacccggtgtccccccaacccaagggcctgcccaggcaatacccgctgacccccgcctctcctgggagcactctgactgggggctttttgtccttagcattgaggagattttagctgactcagaggacgaggaggacaatgaggaggaggaaagaagccgaggcaaggagcagcggaagctggcacgacagaggagccgggcatggctgaaagagggcggtggggacgagcccctcaacttcctggatcccaaggtggcccaacgagtcctgggtaagcacagggctggccagtgcactcagaaaacagacttgccatggtgccaggttctcaggtggtgggtagggggtggcatccatggca

SEQ ID NO: 5707 - DNA, 2300 bp, Homo sapien
ggcagtgactgtcatggacgtggcgcacctggccaaacatgtgcagctggtggtgagtgtccccgttccccttagcaggtagcagggtggcctctgagctgttggcatggacctggcaagcttcgaggccagcaagtttcaaactattttttttgtagccagaggtcattaaggagccctaaaagggaccataggggaatgcctgtcaggtggaggcgaggagggggcacactgcccaggtggctttcttcaccccagagccctacatggaaagcaacaggggctcttcagggcaaaggcccatgggcagggccactcctcattttacagatggagaaactgggccagagattttccagatcatgggactcagacgctgggctctccctccacaggaccccctcatcttgcctttttttttttcccatcttgcattttgaccttgctggttagaggccattcctttgggtcccctgctgggctgcagaaggatctgaagagccccttggtatagggtccctggccctctcctgcccaagagaagccttgcccaggctggcgtaggcttccagccaagctgtgcactgtacctactgcctcagtttcccatgtgtgactggcttgagtcacatcagacctctgggtccctcttgcatattttctttgggtctggccttgggttcaagataggaagggacagatgagaatcagcatgccctcccgctgccctcggagcctgcagcctactagggaccaaaggtggggagaacagctagagcagtgatccatcatggagttattcgaatttatacaagccctggccggctgcagtggctcacacctgtaaccccaccactttgggaggccaaggcaggcagatcacttgagttcaggagtttgagaccagcctggccaacatggtgaaaccccatctctactaaaaatacaaaaattagctgggcgaggtggcaggtgcctgcaatcccagctactcgggaggctgaggcaggagaatcacttgaacctgggaggcggatgttgcagtgagccaagattgcaccactacactccagcctgggtaacagagcaagactctgtctcaaaaaaaagggatttatagaagcccttccaagagtggttggggaggccaggagcggtggctcacacctatattcctagcactttgggatgccaaggtgggtggatcacttgaggtcaggaattcgagaccagcctggccaacatggtgaagccccatctctactaaaaaatacaaaaattagccaggcatggtggtgcgcgcctgtagtcccagctgttcatgtggctgaggtgtgagaattgcttgaacctgggaggcggaggttgcagtgatccgagaccatgccattgcactccagccagggtgacagagcaagactctgtctcaaaaaaaaaaaaaaaaaagccaggcacagtggctcacacctgtaatcccagtactttgggaggccaaggtgggcggatcgcctgaggttgggagttcaagaccagcctggccagtatggtaaaaccctgtctgtactaaaaatacaaaaattagccaggcgtgatagcaggcacctgtaatcccagctattcaggaagctgaggcaggagaattgcttgaacccaggaggtggaggttgcagtgagctgagatcgtgccattgcactccagcctgggcaacagagcgagactccatctcaaaaaaaaggagtagacgtggaccctatcccctagccggtttgggagtcactggagataagaagatctgccacctgcacatgtaacccaaactgggccagatgaaggcttaagaggaatccagccagagcagaatgcagtgagatggaagggacataggggaccaagagaaatcttggggtgctaggggcaaagcgggagccgcagcattagatgagtctgggctgaactcccacctctatggccatttagcaaacactttatcctctgtgccgccgtgtcctcttctataaatagggggtgatagcatgtatctcaggggtagtccaaggattcaaggagaggatatatgtcaagtaccaagtgctgttgagaagactaaagctctcatcctgcgagggtgctcaggcctgtgtcctgaaggagggtgcaggggaaagatggggcctgcccacccgagggaagcatgactgggccagggtgtgggccaggagcagggccgcgctaaccctcccctcagctgggcttgatcatgctgcgtccctgggctggacagcagtaaagggggcgcagc

SEQ ID NO: 5708 - DNA, 2300 bp, Homo sapien
ggtttgtcttctcagctaagggttccaacggcctgccctcacccaggcagcctgctgtcacccaggcgtgtgccaaacactgttcatctgtgtttcctttcactagtcacagcaaccccatgaggaagggtttagccccaatttataagccagaaacaaaggctctgtgagtgagctagtcacacagccctgatgagtaaggccaggtctctggcccaggtctgcccagcccacattctttttcctgcatcaaaccgcctttactgggaggtgtacaaaaatggcaaaatcaccccattcaccacttctcatgcttcagcccgcaggagcacacccacagttaggccccattgtgcgtcccgggatgcttatcatcgtactctaggtaacatataaaaactggaagcaagctaagtgtcccacagaggggtgaaatataaacaatgaagtactgtgcagccattagaaacaatcaaagtgggcctggcacagtggctcacgcttataatcccagcactttaggagaccgagatgggcagatcacttgaggccaggagtttgagactagcctggccaaaatggcgaaaccccatcttcactaaaaatacaaaaattatctgggtgtggtggtacacacctgtaatcccagctacttgggaggctgaggcacgagaatcgcttgaacctctggggtggaggttgcagtaaactgagatcgcaccactgttctccagcctgggtgacagggtgagaccctatctcaaaaaaaaaaaaaaatagaaacagtcaaagtggttgtatgtgcacttatatggaaagaactccaagatatattggagaaaaagcaagacatagaatagcaggtatgatgtgattgtttctctatgtatactctggaaccacattgctaagggtgtgaatcctgaccccattaccaagctgggtggccttgggcaagttatttgacttctctgtgtctttcctcatctataaaatggaaaaataataggatttatctcattagttgttacaaggtttaaatgaatgtatgttatatcagtgattggtatatgataagagttacataaatgctaccaggccaggtgcagtggcttatgcctgtaatcacagggctttaggaagccaaggcaggaggatcacttgaggccagaaggtcgagactagcctgggaaacacagtgagatcctgtctctacaaaaaataaaaagattagctgagcatggtggcatgtgcctgtagccccagctactcaggaggctgaggtgggaggatcacttgagcccaggagtttgagactccgtgagctatgattgtaccactgcaaaaaaaaaaaagttagcagaagttactgttttcatgtttgtgcattttagaacttctggaagggtatttaagaaacttaaccttgattttcccctggaagtacatataagggtcaggccagaagggtgagttagggaaggcatgcccttcattttacaccttgaagacctgtttgaattttctaccacatgtagttattacttgaacgatagtgcctttttaaaaaccacccaccagaagggccctacggagccctgcagatcactgggtttgtgactgttttcagagctgggccgtctcagccctgagccctggttgcccgggtccccagggctcaggccaggccccacagaaaccttttgtcttgacaggttgcagtgggacctggggctaggccacctccctcgcttttttggaactgcggtgacctgcctcctttccccacactcgcaagtgctgactgctgctacgcagagcctcaaggtactgcaactttagctgaggaagcagagagcacagggggttctatgggctgccctgtctttcccagcactggccccaggctaccagctcgggcccagagaggccgctctcaaaatgggagataggtttcttcgaagctttcttagactcccaggaaactgttgcctgggaggggagagtggtcctggggggctgccttgggcccagaaagcctgtggcctctcttcgcaggagatcctgaaggaatgcgtggctccccacatggctgacattggctccgtgacctcctcggcctcaggccctgcccaatctgttgccaagatgttcaggtgaggatatggggtccatgttaggaagggatggtggtaccttgaggaaagttctatataatacgaatgctccactctccacctactgtgggccaggcctgcagtggcagtgctttacgggattgcaggctgcttactgaacat

SEQ ID NO: 5709 - DNA, 2300 bp, Homo sapien
ctgaggtgggcagatcacctgaggtcaggagttcgagaccaaactggccaacatggtgaaaccccgtccctactaaaaacacaaaaattagctgggcatggtggcaggtgcctgtaattcagctactcgggaggctgaggcaggagaattgcttgaacccagtaggcagaggtagcagtgagctgagatcatgccattgcacttacagccctgtcaacagtgcaagactccgtctcaaaaaaaaaaaaatagaaagaaaatgaaatttgttttgagtaataaaaattaaaagtcatggctggacgcagtggctcatacctgtaatcccagcacttttggaggctgaggcaggaggattgcttgcggccaggagttggagaccagcctggccaacatggtgaaacccgatctctactaaaaatacaaaattagccaggtgtagtggtacatgcctgtaatcccagctacttgggaggctgaggcaggagaatcacttgaacacagaatgtggaggttgcattgagccaagatcaagccactgcagtccagcctgggcaacagagtgagactccatctcaataaataaataagtaataaagtaaaaaataaaaaaccttgattctttaagatgaaaaagttcttgagattggttgcacaacaatgtgagtatacttggctgggtgtggtgacacatacctataatcccagcactttgggaggctgaggcaggtggactgttgagcccaggagttcgaaaccagcctgggcaacatggcaaaaccttgtctctacaaaaaaatacaaaaatgagctaggcgtggtggcatgcacctgtagtcccaactacttgggaggtagaggttgcagtgagcctaattgtgccactacactccagcttgggtgacgagtgagaccctgtctccaaaaaaagaaaaaaaaaaaacccacaacatgaatatacttaacagtactgaatgatataccgaaaaatatcgttgaaatggtgtgttgtttttttcctttttgagacagagtctcgctctgttgcccaggctggagtgcagtggcgccacctcctcccactgcaactccacctcctgggttcacaccgttctcgtgcctcagcctgtcaagtagctgggactacaggcgcccgccaccacgtctggctaattgtttgtatttttagtagagaccgggtttcactgtgttagccaggatggtctcgatctcctgacctcatgatccacccgcctcggcctcccaaactgctgggattacaggcgtgagccactgcgtccggccgaaatgatgttttatcttatgtgtattttaccacaattagaaatttatttatttatttatttatttttgagacagagtttcgctcttgttgcccaggctagagtgcaatggtgcaatctcagctcaccacaccctccacctcccgggttcaagtgattctcctgccttggcctcccaagtagctgggattacaggcgggcgccatcacgcccagctaattttgtatttttagtagatacagggtttctccatgtttgtcaggctggtctcaaactcccgacctcaggttatctgcccaccttggcctcccatagtgctgggattacaggcgtgagccaccatgcctggccagaaattttaaaatacaatttaaaagatacttgtatatcaggtggcattctacaacataaggtcctgggtgactgggtcattataccagggagtgtgagtgttggcccccagaaggggcattcctggagcagtgagtggcagaagggagggaaggagtagttggccccaggctttctggagatgtgaactgccaggggaggtggagagaggattggtgtcctgagtttaggagtgggtagtgggaaggtgagagaggcagggatcccgggtggaaagcacactgagctggctgataaggtgggtgcctattctgactttgttgctcactttctgagtgactgtgccaccagcgccccttgccctgtcctccttagtaccacgaggggctgcaccagctgctcttcagggaccctctggggtgaccatctctgttctttcccacagtgttcccagccctgtgcttattaagaagttctctgatacctccaaagccttcatggatatcatgtcagctcaggccagcagcggctccacctctgtcctccgatgggttagtgtctggggtttagtttctcatctggcgactcccagagcctgtctgatttggtgatgcttagatgttccctgagaggggtttaggcacc

SEQ ID NO: 5710 - DNA, 2300 bp, Homo sapien
accttggcctcccaaaatgctgggattacaggcgtgagccaccacacccagccgcccattctttttttttttttttttaattttttttcttttttgagacagggtctcacactgtcacccaagctggggtgcagtggtgcaatcacggctcactgcagccttgactttctctgggctcccacctcagcctcctgagtagctggactacaggttcacaccaccatgctcagctaatttttgtatgttttgtagagactgggtctcatgatgttgctcaagctggtcttgaactcctgggctggagcaatccttcctcccctctactccctgccccccggcctcctacggtgttggaattccaggccaagcatcagccactgcacccacctgtcccttttgcccattctttttattggattgtctgccttgttcttattgattggtaggaattctttatatattatagatgtactttgttagttctatatatcttcttccaaagaatgctgctaaaggtttagaataaagctgctgggcaagagggaagagaaatgtgtcttttgtaaggtttgggatctggttgaaggattttaaggagggtctcaggggagtggggataaactggatcggttgctggttctgaggtggaattaggagaactgggaattggccggatgccaggtgcggtggctcatgcctgtaatcccagcactttgggaggtgggcagatcacctgaggaaaggagttcgagaccaacctggccaacatggtgaaactctgcgtgtactgaaaatacaaaaaaaaaaattagccgggcgcggtggtgcatgcttgtaatttcagctacttgggaggctgaggcaggagaactgcttgaacctgaaatgtggaggttgcagtgagccgagatcgtgccactgcactccagcctgggcaccagagcaagactctgtctcaaaaaaaaaaaaaaaaaagagagagagagagagaaattggagaaccagggattaattagggatggaatgctgtcataaggcaaggtggcttagcaactgagtatctccagtaataaatgaaaatagcaaagcttgtctagaacaccactgactgcttttttctcttttcaagtcaagctaattttcacactttcaagtctccataagttttgacttttcttttttttctttttttctttttttgagatggagtttcactcttgttgcccaggctggagtgcaatggcgtgatctcagctcaccgcaacctctgcctcccaggttcaagcgattcttctgcctcagcctccccagtagttgggattacaggcatgcgcgaccacgcccggcttattttgtatttttagtagagacagggtttctccatgttggtcaggctggtctcgaacatcgtgacctcaggtgatctgcccgcctcggcctcccagagtgctgggattacatatatacttttatatgaaggtatatgactttcatataaatgtgtttctatgcttaattttgaaaatagattttcaaatgtaatataaatgtactttttgttgttgtttaactgcaaaagaactccagttttttgtttgctttgttttgtttttttgagacagtcttactctgttgtccaggctggagtgccgaggcgtgatctcggcttactgcaaactccgcctcccgagttcaagtgattcttgtgcctcatcctcccgagtagttgggattacaggcgcgcgccaccaagcccagctaatttttttattttagtagagacggggtttcaccctggtgatcaggctggtctcaaactcctgacctcaaatgatccacccgcctcagcctcccaaagtattgggattacaggcatgagccaccacgctcagccaaactccagttttataaggcttacgcctgtggccctgaaacctggtcctggctggagtaagaaccccatagaacccttagcaacctaacttcctccctagcaacggatctccttggagctcctccccatccgaagccaggaggaggtgtaaaaccggatgttgactgttttaccatagtaatgcacacgaatccggaagtgacgccagaagaagaggaagtgaaggctacagggtatccacgtgggttctgagcgtgtttctacgtccctggaagccggtcatttaagctcattcctcgccacggcttagtcaacatgggtcgctcgggaaagttgccttctggtgtctcagctaagttgaagcgctggaagaaaggccacagcagcgacagcaaccccgccatct

SEQ ID NO: 5711 - DNA, 2300 bp, Homo sapien
tcacgttgttcccaaagtgccttttctctgcctctcaaatccttcccacacttcaaagtcaacaaatgccaaaaatacaacaaaaatgtggaggccatagacaatagtggagaaagagtatggtcttgggagccagcagcctgggcttgaatcctgatttctgtcaccttgggcaaatttcctcatctgcaagtgggaaaagatagaacctgcctcagagggtcattgtggagatacgaggattgagtgagttaatatttgcaaagcactcagaacactaactggcatgcagtaggtgctttactggtacatgatcgccgctcactgcaacctctgcctctcaggtttaagtgattctcctgcctcagcctcctgattacaggcacactccaccatgcccggctaatttttttgtacttttagtagagtggaggtttcaccatgttggtcaggctggtctcgaactcctgacctcaaatgatccgccagtcttggcctcccaaagtgctgggattacaggcgtgagccacccaatgttattgttggctactaatacatgggtcttatttgccctctgcttgcttgaaggacaggaaacacattcaacccatccttgagtctagtccactgcctggctcatgtttggtgctcattaaagtgtctagattgaaatcaaccaggagattggcctgccacagtggctcacacctgtcattccagtgttgctgtgaagttgctgcaggaggactgcttgaggccaggagtttgagaccagcccggtcaacatagtgagatctgtctctacagaaaaaaaaaaaaaaaaaaaaaaaattagccaggcctggtggcatgcctgtagtcccagctattcaagaggctgaagcaggaggatcacttgagtctaggatttcaaggctgctgcagtgagctatgatcatgctactgcactctgctttgggaacagggggaaactctgtttaaaaaagaaaaagaaggccgggcactgtggctcacgctggtaatcccagcactttgggaggccgaggccggtgtatcacttgtggtcaggagttcgataccagcctggacaacatggtgaaaccccgtctctactaaaagtacaaaaatcagccgggcgtggtggcggctgcctgtaatcccagctactcgggaggctgaggcagcagaattgcttaaacccgggaggcggaggttgcggtgagccgagatcgcaccactgcactccagtctgggagatagctccgtctcaaaaaaaaaaaaaaaattgtaataataaattgctgattggggctcggagaagaacaggcagtgactagaactcgccccttcctgaaatatttgaagggtcctagcgtttgctttcttgttggaggcccagaaagcactgacttaacgtgtgtgaaagattgtagacagagacgggataaagagccccgcgctggaaaaagagcaggctttggaaccagcagggtcacgggcagtttccttacgtgtaaactaggagtaaaaagatcagtgtcctgctgaaatgagagagtaatagtaaaaactactatttaccgagcacttccaggtacccggtatttatgatcacattttacagatgaggctgagaggtttcccgacctgcccaaagacacaaagcaagtagaatgtacgagtgaagactcgaacacaggtccgtgaatcaatctctgcgtggggatgggagcggttccagtgataagggccacttaatctggccgagctgctccggagcagcgcggcagccagcgaattggggccgcccccacaacccgccgcccgccgcccgccgccctccgccctccgccctccgccctccgccctccgccctccgccctccgccctccgccctccgccctccgccctccgccctccgcgtgcttacgtgcgctccgtgactgcggcgaccgacgcgggactggagagggaggacgcatgcgctctgccgtgccgaagcgcgccccctcctgtcgggggccgcagcgccaggatgcagcgcatgcgcacacctggagggcggagagcggtccagagcgagtggaaagatttgggcgagaacttgcgcgggagccggactgagcggtgcgagcgcgcaggcgcggccgacggggcgggctgctactccggaatctgctaatcccagtcggtgccgcatccccagcccgccgccatggccgcctacaaactggtgctgatccggcacggcgagagcgcatggaacctggagaaccgcttcagcggctggtacgacgccg

SEQ ID NO: 5712 - DNA, 2300 bp, Homo sapien
tgattagtctcaaacagagacaacatggtttaacgtggactagtcattgggaaactaccacggactgatacagttcttcctgccacagagctaaagaaaatggcctcctttaccagcactttccatttcccagcctctcctaaaagatgaggtcacaccaggccatctcaaacaatcactcccctgcccaccccaccccgcagaggtttacatttaccagactgtcctgcgttttgcttcatttgagaaggatggtacagtgaaggcaagaagctaggagagcaatctgaggccaaatacctgtgcctcatcaatgacccttgtgaatggctgcttctttgtccagaggttagaagggagcaaaggaggatctgcccctatcatcagcggaagcacctcttcagtccagggattcttggccgtgccggcagcagggaatgcttccttattagcattccaacaccacaaagagcagactggggcgggagcaagcctggataggcaagcattatctcacagccacttccacctttgcccagcgtccttagccaaaagcctaccagttcctcacacctacctgttacttcacccaggactagggcgaggacactggactaggaatcagatatgaccttggacaagtcatctttccaaatactcacttttcccaactataaaggggccttggaaagatgagaaagataaaatcttatctactttattgggtagaaggagcaactcgaatcattcattcattcactcaagttacatctacagatgcgttttggacacactatttgtggaatgctactgaacagcaaagacctgcacaaccacgcggatttcttggtgttctgaggcttgttaggcacccccagggcctccacctactgctggggacgaggctgtgtggcgtgtcgatccgctaggatccgtagccgcctcttgagaggccttggttacagctgctttaaggcacagggcgtcctccaggagcaccagactgtaccaaccgcttctggcgctaagggaacctgaaaaagacctggccgccatagatggttccattagggcaaactgtccacgacttattattattattttttttttctggacagagtttcgctcttgttgcccaggctggagtgcaatggcgcgatctcggctcattgcaacctccgcctcccgggttcaagcgattctcctgcttcagcctcccgagtagctgggattacaggcgtgcgccaccacggccggctaattttgtattttcaatagagacggggtttcaccacgttgataaggctggtctcgaacatcctgaccgcaagtgatccacccgcctcggcctccccacatgctgggattacaggcgtgagccaccacgcccggcctgtccccgacatattaaatgttcagactagaaagggaaaactgcgaagtggtgtcgtggggagcgcaaagggttgcggggcgaccgccctgggtcctccccctggcacagcccctcatgctccacggcgtgaccttgaacaagtagactctaccctctgcactcatcttctcaactacacactaaactgttaagagagatgctgcccaaggtgccggccctctccgagagggcgcagacgccagccaggcggcctccgaggccggacacccggcccttcgcagcccacacccggcccctccgcacctcgtagcgcctgcccgccgcgcttcgcctcctcgtggcccgccgggctcaggtcggcgtcgtaccagccgctgaagcggttctccaggttccatgcgctctcgccgtgccggatcagcaccagtttgtaggcggccatggcggcgggctggggatgcggcaccgactgggattagcagattccggagtagcagcccgccccgtcggccgcgcctgcgcgctcgcaccgctcagtccggctcccgcgcaagttctcgcccaaatctttccactcgctctggaccgctctccgccctccaggtgtgcgcatgcgctgcatcctggcgctgcggcccccgacaggagggggcgcgcttcggcacggcagagcgcatgcgtcctccctctccagtcccgcgtcggtcgccgcagtcacggagcgcacgtaagcacgcggagggcggagggcggagggcggagggcggagggcggagggcggagggcggagggcggagggcggagggcggagggcggagggcggcgggcggcgggcggcgggttgtgggggcggccccaattcgctggctgccgcgctgctccggagcagctcggccagattaag

SEQ ID NO: 5713 - DNA, 2300 bp, Homo sapien
ctgggattacaggtgtgagccactgcgccctgccgacaatttactctttcctccaaagttatactgcttccttctgtttcttattttattgcacaggctgaaatttccacaaaaatgttacataatagcggctatgcttgttttcttctattttaagtgaatacttgcagagttttctctttgagcatggtattggctgttggtataagacagatattttgagcctcatcttttatcaatctctccgttgctcacaatgcttcagctctcctggccttctttcagtttccccaacttactaaattcttcccactttcagatctctcttcaacctattctttctgccagagctgcactctctccacccacctgactcttacctactctttagatgattcagcttaaatgtcacttctgctgactaggatgggtttgcctgttacatgttctcaaggtgccctgtaatattctttcaaagcaccaccacatatgtaaccatatgctcatttgagcatttatttgtttacaatttgtgtctgtgtcctttgatagcagaaaccaagtcagcgctgtgcctgacacatgaaaatactcaagtgatatctatgaaatgaacaaactcaggactgttaagaacattcccaacaatgactgaatagaaagccccttgaatcagacagcttaagttacttactcaaagcagaatcaaagtcaagttagccagaacgtaactgttctaattctgaatcctctttctattgtgctccttcaaatattgcttatatgatcctgagctaatcctggatctatctctgaaactagaaaggtaggtattactcacacattcaacatttattgaggagctgccttgtgctatatacggatggtatggtggtagggcctgctttcacggacttagatttaagcaggggagaagtctagtaggaaacatatacctgagtgtctcatcatatgctgacatagtgcttggaagaaaaggaacagagttttttgtgagtctttaacaaaacaaacaaaaacaaaacaccccacaaaactcctttcctcaattagtgggtccagaaggacttctctgaggtgatagtagagaagctatctaaaggaggtaggaattaaataggcctaggaagatagaagcgttccagatagatggcatgttacaaaggctctgtagcaggagaaagcttggcgcattaccgacactgaaagaagctagtatgttataaaaaatttttaaagggcaagcagagactgtgattataacttttaaacacagaaaagacagtatgactagattgcgtcagtgaggtggagatagtggcgctagataaagtcggaaaggtaagcaacattcatacagtatgcaactcactgctgggctgagctgggctgggatgggatactgagttcgcatctgcttttgtcccaacttccctccccgagggtcagcagcacaaccaagcgagatcaacacaactagtgtgtggtggctaagtgcaccacagcggcgatacggctagaagaaactaagagaccaacattgtaccactgaggcactaaagacgcgtccgcagtgcccatgcctaaggactggaactcaagggcagcctaagggaaaaacagaggggagatggcatgccgcttcctttaccgcgccattctcgctgctcttcatcagacagccggcaagcgacgaaaagatgtagccgtggcgggtgtaggtgccgctgcccgggctgccctcctccaagttacacagacgttcgcctgcagaaaaaatgctgcatcggtcacgggcccccagaagctgtaggccgtttagccttcttgcttcagcccctatccaggactctgtacgggaagcgctcacttaccggggatgcagtatctcacaggtggcgccatgattgccgctgtcccaaaaccaggatgaaaacgaagtcgatttctcattggccaaacccaggcacagttccgcagtaagacacgtgtcaattggtactctttatccttgcgagtaaactccatttcccaggttaccccgggacaaatccgggggcggaacttcagaggtccacgctggcgcctgcgcgtgtggttgaggatgggctggcggcgggtccgggtccgctgcctggcgctgcgggcggcgggccatggtggtttggattgagccgggcccggccggggcgccgagtcggagggggtggcagtgagcggcggcagaggctacggggctcggtttggctgactggggagtcggcaggcggcaggtaagg

SEQ ID NO: 5714 - DNA, 2300 bp, Homo sapien
ccagaaatcagcccaaccgtgtaaacagaaagctcctagacgcacagatacagatttgggtgaacaaagtctgaggctagggcctctctccattagctaatggggtatgggatgccaggaaaattacatatgtagtaagtgggccgcaactgaacacacagacttttctttttttttttttttgagatggagtttcactcttgttgcccaggctggagtgcaatggcacaatctgggctcaccacaacctccgcctcctgggttcaagcaattctcctgcctcagcctcctgagtggctgggattccaggcatgtgccaccacgcctggctaattttgtatttttttagtagagaccgggtttctccatgttggtcaggctggtctcaaactcccgacctcaggtgatgtgcttgcctcagcctcccaaagtgctgggattgcaggcgtgagccaccgcacctggcccagacttttcatctcaagaaatagaagtaaagcaaaattcaaaaagatgtgtgtaggggagaaggggctaatctcagtgaacgggaggaaacagagcaaagcgcagctttactaccaccccaagcacaagcccgagtactctgatccttcagtaatagtcacaggccatactggtcatctgccaccagactggaggagattgctggccacaacactcccctcttcccatggctttaagtcacatctgtttcccaatgggaaagtcgactgaggggacagggaaggacagacggcaaagccatcagaagtcaggtgaactgagatcaaagtcgtggcgaatgtcatctggacaaagacgctgctctcaggatgtttgcaatctcaagtaggagatacccaacatcaataaagagtagcattttattcatgtgcagacctcccttctgggctaacacgctgagaagaaaaagagtaacaactttattttggggctgcttatcttttgatgacgggcccacacaaccagagttcggctttttcaaccagagaaagcttactgaagtggggatgaggggccgcgaagaggatcggaccgcaggactggaagctgcagtttaaaaaaccgggaaaaggccggaggcagtggctcatgcctgtactccctgcactttggaaggccgaggcgggcggatcaagagatcaagaccatcctggctaacatggtgaaaccccgtcactactaaaactacaaaaattagctgggcgtggtggcgcgcgcctgtaagtcccagctgcgcgggaggctgaggcaggagaatcgcttgatgccgggaggcggaggttgcagtgaacagagatcgctccactgcactccagcctggcgacagagcgagactcctcaaaaacaaaacaaaaaaaccgggaaaaggttttatttctcaatgacagccgcgaggtgaaactgcgatggactggaagtcaaaaaccgtgggttccagtttgggctctatcttaactatcttgatcattttggacaagtcaaaccctgtctctgaatctgaggttccatatctgtgaaacagacgagttgggtcgcttgacctccttccctcctgctctgagcgtaacgattgctcggaaggtgcgctcgggctgaggagggcacggccccgcagggcggggcgaggagagagcaggaacccgcactcaagacaaggccccagggcagtgccctacccagaaaaagggactaggatggggagcaagggccgaggcttcgcccttacctgccgcctgccgactccccagtcagccaaaccgagccccgtagcctctgccgccgctcactgccaccccctccgactcggcgccccggccgggcccggctcaatccaaaccaccatggcccgccgcccgcagcgccaggcagcggacccggacccgccgccagcccatcctcaaccacacgcgcaggcgccagcgtggacctctgaagttccgcccccggatttgtcccggggtaacctgggaaatggagtttactcgcaaggataaagagtaccaattgacacgtgtcttactgcggaactgtgcctgggtttggccaatgagaaatcgacttcgttttcatcctggttttgggacagcggcaatcatggcgccacctgtgagatactgcatccccggtaagtgagcgcttcccgtacagagtcctggataggggctgaagcaagaaggctaaacggcctacagcttctgggggcccgtgaccgatgcagcattttttctgcaggcgaacgtctgtgtaacttggaggagggcagcccgggcagc

SEQ ID NO: 5715 - DNA, 2300 bp, Homo sapien
tagcaccatggactatgagggtgggaagccagggccagtggttcttagccgcagatgtgcttaagaattacctgtagagcattttaaaatataccttgacttcccagatgggaacctgaatggaaatgattactggcacatatgtgccaaattaatatttgttcaatgcatgaatgatcagggcatgtcccattgacgtggtgatcctaattcaaaccctaggttgaaaagcacgtctgtggaggagagggctgctttagaatcctagctccttggtcatacctagtactctgcccccaggttagctgcccagagtgtgacacacattgtgcccctcttcttggatggcaacgtgtcctttctgcctgaaaacagcttcccgagcagattccagccattccaggtaacagtcttagaacttacatccttcaagctggtttttttttagggctaatctggaatgggtagaggggcagacaagcttattgctggcaggcttgatcgggctctccttcctttataggatggctcctcagggcagaggcggctgattgcactgcttatggcctttgtctgctccctgcctcgaaatgtaagtgagcacatttgggaagtactgttatttaaccttgacaaggtgactccgggctgaaatttgccacaggctaagctgatcttttacttcccccaccagagaagttagttctcatccgtcccggtccctgctgccactatgtactggttctcttggagttcaagtgttctctgggtccattacatggccaggttttctgtaggtggaaatccctcagctgaaccaactcatgcgggagcttttggaactgagctgctgccacagctgccccttttcttccaccgctgctgccaagtgctttgcaggactcctcaacaagcaccctgcaggtactgagatcagactatgtaaggagcctcccagaatcaactacccatgaaatcttatagctcagtactcattctctttttaaaaggagcttgctaataacattaacagggcttcaactgctcaagcactgtcctgggactgcccgtgggaaaagcgtcaagaccacagttgggcagagctttatagtacctaagaagagaagggagcacaaagagtctagttctgccgtcctactccctacagtggggctagtgtggataattctttattggaagtagatgaccctctcttttcaaatggcagcacctctgtattatgagaataccaggctcttatgcaggtgtccaatcattttgtccacaggcaaaaatgatattttccctttctaacagcttctcagggagctctgcacttaaagtgatttgcatttcattgctaaagggaaaatgtgtagcctttatgtcagcatttcctctctcctttttagggcagcagctggatgaattcctacagctagctgtggacaaagtggaggctggcctgggctctgggccctgtcgtagtcaggccttcactcttcttctctgggtaaggagttggagtggagtctggttagccagagaggcaattatgtctggttaaataaaatgtccctgtttgaccctaaaccataaacatctatgtctcagggttctcgggtttgagtgtcattccccaattgctctctctgtctccaattacaggtaacaaaggccctagtgctcagataccatcctctcagctcctgccttacagcccgggtacgtcctttctggagacagaagaacccaggacctaaacaaactttctggttgctcctattcctcccaaggacttccatcctcccctgtgtgttttttgttttcttttcttttttctttttggagacagggtcttactctgtcacccaggctggagtacagtagtgcaatcacagctcactccagcctcaacctccgtaggctcaagtgatcctcccacttcagcctcgcaagtagctgggactacaggggcaccccaccacacccaactaatgtttgtattttttgtaagaactgggtttggccatgttgcccagactcctagactcaagcagtccacctgccttggcctcccaaagtgctaggattacaggcatgagccaccacacccggccccatccttatctttggcacttaagattcttcttccctgatgtacctcaaaggctcttttttctccagctcatgggcctcctgagtgacccagaattaggtccagcagcagctgatggcttctctctgctcatgtctgactgcactgatgtgctgactcgtgctggccatgccgaagtgcg

SEQ ID NO: 5716 - DNA, 2300 bp, Homo sapien
tataccttgcctgcttgccttggctgtgcaggcctctatgccaggtaactttccacctctccttcctggcctttgggaactttgccctctgctggtgttgaacagcaccaccctctgggtattggtggtactgtattttgtaccatcagaggtttattttcaatcctttgtcctcagagtgagatttcacttcatagcaaagggtgccaccctgaccagtggcaggaaccaaaatccactagtgttagcaacattcaaaagaatgcacaccttttccccatgaagtgctatgtgattagtttacttagaattggactctggagtcaagcccacctggttgggttttatcctcaactctaccacttgctaacttaggtgaagatattcagcctttccacgcttcaatttcctcacttgtaagatggagataaagagtaccgtctaggctggcgccatggttcacacctgtaatcccagcacttcaggaggccaagatgggaggatcacttgagtccaggagtttgagaccagcctgggcaacacaggggaccctgtttctacaaatagtcagacatagtggtgcacacctatagtcccagctgctcaagaggctgaggtgggaggatcacctgagcccaggagttcaaggctgcagtgaggcatgattgtgcctctgcactcgagcctgggtgacagagcgagatcctgttcctgtctcaaaaaaaaaaaaaaaaaaaactgtttcacagggtagttggtaaggattaaataagttagtgtatagtacctgccacataggaagtactcagtgtatgatagttgctataaataataaggacccatgaagataaatctatgtttttaattttttcagagaccaacattactatttttttttccttgcatctccagggacaccagggacaacatttctatttcttatgttaagaatgttcatcttagctatccctctttcccactgttggcctagtctaaagactgtgcagagttctcaggagcgctctgtggccccaggtcagaccactcctgtttctggtgccctgattctcaggactatagcactaccagagaccagattaagaactgctgtcgtggctagagtcaagccccagagtcagtgatgctgacagaacccaatcattcatttcttgaacccgtcatggtcttgtgattgtgtgcatgtgtgtgtgttttgcagagaaggagccctcagttctgagaaaagtactattggaggatgaggtgttggctgccatggtgtctgtcattggcactgctacaacccacctgagccctgagtaagtataatcatggatgtggcttgaacccagggagaaggatagcattcttaggaagaagcaacaggtagctgccttgtcagctgtccttttacctatatgtaaatgtggtgcagttaatcgtcttgtaagttttgttgacaaaacaaaaggaaggggctcttagcaccatggactatgagggtgggaagccagggccagtggttcttagccgcagatgtgcttaagaattacctgtagagcattttaaaatataccttgacttcccagatgggaacctgaatggaaatgattactggcacatatgtgccaaattaatatttgttcaatgcatgaatgatcagggcatgtcccattgacgtggtgatcctaattcaaaccctaggttgaaaagcacgtctgtggaggagagggctgctttagaatcctagctccttggtcatacctagtactctgcccccaggttagctgcccagagtgtgacacacattgtgcccctcttcttggatggcaacgtgtcctttctgcctgaaaacagcttcccgagcagattccagccattccaggtaacagtcttagaacttacatccttcaagctggtttttttttagggctaatctggaatgggtagaggggcagacaagcttattgctggcaggcttgatcgggctctccttcctttataggatggctcctcagggcagaggcggctgattgcactgcttatggcctttgtctgctccctgcctcgaaatgtaagtgagcacatttgggaagtactgttatttaaccttgacaaggtgactccgggctgaaatttgccacaggctaagctgatcttttacttcccccaccagagaagttagttctcatccgtcccggtccctgctgccactatgtactggttctcttggagttcaagtgttctctgggtccattacatggccaggttttctgtaggtggaaatccctcagctgaac

SEQ ID NO: 5717 - DNA, 2300 bp, Homo sapien
tcatgcctgtaatcccagcactttaggagaccaaggcaggacaatcacttgaggctaggatttaaagaccagcttgggcaacaagacaagaccacatctctacaaaaaaaaaaaaaaaaaattagctggataaggtggcacgcatctgtagtcccagctactcaagaggctgaggcgagagaatcacttgaacctaggaggtcggggctgcagggagctataatcatgctactgtattccagcctggctgtggcatagcaaaacccccatctcttggaagaaagaaagaattttccctatatccagagtagcaggattgaaatcctttaaaatattctttgactctagtaccccttgaaacgttacagagcagccagcggcggacaatccttgaaatgctcctgggtttcttgaagctgcagcagaaatggagctatgaagacaaaggtgaggttgccttccattgcagtgctctggggactgttgaacacttcagcctataaaggatagcagggcaaagagtgctgtggaaaagtagtctagaacagtggtcctattctgaggttgtagcacaagagaacacttaacagatgagatggatgagatctgtttatttttctcagtgtgctttctggatacccaatggattaagctctttaaatctgccccaggaggcggggcatggtggctcacacctataatcccagcactttggtaggctaaggcaggcggaaaacttgaggttaggagttcgagaccagcctggccaatatggtgaaaccctgtctctactaaaaatacaaaaattagccaggcctgttggcacatgcctgtaattccagctactcgggaggctgaggcaggagaatggcttgaacctgggaggcagaggctgcagtgatccgagattacgccactgcactccagcctgggcaacagaggccttgtctcaaaaaaaaaatctaccccaggttggctgtgtatcacagcttagtcagggatatggaatgcagtggcttccttctaacctggcctctgtctcttccctagatcaaaggcctctgaatggcttcaaggaccagctgtgctcactggtattcatggctctaacagaccccagcacccagcttcagcttgttggcatccgtacactgacagtcttgggtgcccagccaggtacatcttaagggaaagagaagaggaaaatattggtccttttcttgtaagactgccttggtgaaaagcagccttactatcctcttcttactgcaactctggatgatttgggatttctaataagagcttagaagggttgtgatggctgcaggggaagaaagatgagattcatgttcccttctaactacagatctcctatcttatgaggacttggagctggcagtgggtcacctgtacagactgagcttcctgaaggaggattcccagagttggtgagaatttaaagcaatgagatagagcaagctgttccctgcctctgtattggcagcaaaagatcaagctaggaccagggctctgtgcttctgacccttggctctccttaggggaggtgagctctgtgttagactctggctgctaaccagttggagagatgtaggactgctctcttcttaggctttaagaagccctgtccaactcagtggtgtaggtacttgagttctgctctttagcaaggaggcgttgggagctcacactcctgaatctgcctaatatcagacgtaggcaagagagctgtgagcccaggctcagccaatgcttatctgctctgcgcctccagcagggtggcagcactggaagcatcaggaaccctggctgctctctaccctgtggccttcagcagccacctcgtacccaagctcgctgaggagctgcgtgtaggtatgtgtctctaatcctctgtggcccatccctttccagcaaggctttggggccttcgtgcttcctatcacacagtaaacctttgtctcatgggttgctttcaggggagtcaaatttgactaacggagatgagcccacccaatgctcccggcatctgtgctgtctgcaagccttgtcagctgtatcaacacatcccagcatcgtcaaggagacactgcctctgctgctgcagcatctctggcaagtgaacagaggtaactactaggaataaccaccaacggactgggctgaatagggagctgtagtctctaaggcagtggttctagctgtagctatacataagagtaacagaatcaactcttttaaaagaaaaaaaaaatactgatgcctgcgtccaactgaatcag

SEQ ID NO: 5718 - DNA, 2300 bp, Homo sapien
ctcactactgttaactttcaattgtcaggcatgaggggaaataatacatcctgtccttttccctctgtcatccccagggccaagatataatgcctggttattcaggaggcaagtagggggacataattctagttgaatgacaagagagagagtccctatgtgacggtcagctgcttggtaagagcagctgatcacctttgcacattacccacttcttgtccttctgtggcaaggagtgcaggtcatggtgcctttggcaccatggtgaatagaaaggtgagcagagccactgctcagagttggctttttgtttctcagaaagtatgtgtctctgtcctgagtgtgactaaggacttggtaagaacacaccaattgagaagacactcagttggggtgttaatttccatttctgtgtcctagaggttctcactcccctctccaacaaggaaataggcagtggattggtggggtctcatctggtgcaggctcacctcagtagccatgggatccctccctgacaggtgttccagacggcaagtgagcgggtggaggcagagggcctggcggccctccactccctgactgcgtgtttgtctcgctctgtgctgagggctgatgctgaggacctccttgactccttccttagcaacattctacagggtaatggggccgtggcagccaggaaggggagtgagcacaatagaaacgacattccttgcctgggtgcggtggctcacgcctgtaatccctgcactttaggaggccgaggcgggtggatcacctgaggtcaggagttaaagaccagcctggccaacatggtgaaacctcgtctctactaaaaatacaaaaattagccgggcgtggtggtggacgcctgtaatcccagctactcgggaggctgaggcaggagaatcgcttgaaaaggcagaggttgcggtgagctgagattgcgccactgcactccagcttgggcaacgagagcaaaactccatctctaaaaaaaaaacaaatgacattccttaagggccagtgacctttattgtttagtcccaacatatttggtgatttgggggcgatagccctactttgaattgaaaacaatttgagtgttaactgcttgcaaactgtcatgggtctcagtctccaacctctgtggactgtaggggagtcaggcaccatttggcctcctccccagctctgtgatgtgctgcttctctagactgcaggcaccacctgtgtgaaccggacatgaaactggtgtggcctagtgccaagctgttgcaggcagctgcaggtgcatctgcccgggcctgtgactctgtcaccagcaatgtactgcctttactgctggaacagttccacaagcacagtcaggtaagggagcagaatctttgggggaaatgatgggacctgtgtgctaggttccctttctcagagagtgagctaagttttagcttgggccaacatagtagaccttgggttttgctcccattagctgctgctgctgcttcccttactcactttttccctgtctcatacataaaaggatcattctcccaagacaggaggatagcttgaagccaggagttcaagatcagcctgggcaacaaagtgagatcccatctctaaaaaaaaaaaaattttttttaaattagccaagcaggacatgctggttcatgcctgtaatcccagcactttaggagaccaaggcaggacaatcacttgaggctaggatttaaagaccagcttgggcaacaagacaagaccacatctctacaaaaaaaaaaaaaaaaaattagctggataaggtggcacgcatctgtagtcccagctactcaagaggctgaggcgagagaatcacttgaacctaggaggtcggggctgcagggagctataatcatgctactgtattccagcctggctgtggcatagcaaaacccccatctcttggaagaaagaaagaattttccctatatccagagtagcaggattgaaatcctttaaaatattctttgactctagtaccccttgaaacgttacagagcagccagcggcggacaatccttgaaatgctcctgggtttcttgaagctgcagcagaaatggagctatgaagacaaaggtgaggttgccttccattgcagtgctctggggactgttgaacacttcagcctataaaggatagcagggcaaagagtgctgtggaaaagtagtctagaacagtggtcctattctgaggttgtagcacaagagaacacttaacagatgagatggatgagatctgtttatttttctcagtgt

SEQ ID NO: 5719 - DNA, 2300 bp, Homo sapien
actagcacatagtaacaatatatatcagcgaagaaaggaatacaccagaaagttaagcatgcttatttctgagtggtgaaatgatagaaaatgtgtaatcagattttttaaaatgcctaaagacaaaagttcccaaggagtacctaagatcaagcaagtcttcttgctggggcctcattatcttactatcttccctgattgggtatgagtatcaccctgttctgcagggttaccaggttcgagcctgtgttcaaggtggtctgaaatgttacacaaacccacagcccttctcccttttccagccacctaatgatccccatggtatccagagagaagacctcatcctgagtcttcgcgctgtgctggcttctacaccacgatttgctgaggtgggtctagccaaggttagggtatatagcctctgcccatagatggctctgaagaaagagcagtaaaagcatggagaaaaaaatatctggtatacattttagggcatgacaccctgcaagtgtcttgtgtggcaggtatcttcagaccttcgatgtagaaaactttaccatctcttcataatccagagctggattcagtggcacacacctatagttccagctactcaggaggagtctgagtggaaaggatcacttaaacccaggagttcaaatccagcctgggcaacatagggagacctcgtctccgctacacaaaaaaataaataaacccaatccctatatggtgctgtcttttaaaatcctgtaactttgtcaacttgcctgtttttgaggtagtggggctctggtcactgcttggcaggaaggttagcttacattcatagctcctgacttgagtacagctccttgatgtagtacctgcttttagggactgatggcaaggacagggttgaccttgatgtgactgacacaccacccatctcaggcttaagatcttccttctgtcccacagtttctgctgcccctgttgattgagaaagtggattctgaggttctgagtgccaagttggattctctacagactctggtgagtgatttttctccttgcaggacccagctaccttttgacaagttaggggtcctaaaggatatagattctaggatagccaaggaacagttcatgggcctcagaagaggatacccaggatttgggcctttgtgtcgacctgaagcccccagctgcatatcgtcgtgtcccatcccccatcccatagtaactgaggaaaggctgaccaggactccctctttaggcttctattttatcaaccagggttatctcctacttctctgttcccttagtaggactgttaaaaatcttaactggtttttctgctgagaccagggctccttcaggtgccattatgctgaggtacctgcacatcctagggtgtctgagtgtgtacataactgatagcagcggtttccttggcagaatgcttgctgtgctgtgtatggacagaaggaactgaaggacttcctccccagcctttgggcttctatccgcagagaggtgagtgtcactcagataaactcactactgttaactttcaattgtcaggcatgaggggaaataatacatcctgtccttttccctctgtcatccccagggccaagatataatgcctggttattcaggaggcaagtagggggacataattctagttgaatgacaagagagagagtccctatgtgacggtcagctgcttggtaagagcagctgatcacctttgcacattacccacttcttgtccttctgtggcaaggagtgcaggtcatggtgcctttggcaccatggtgaatagaaaggtgagcagagccactgctcagagttggctttttgtttctcagaaagtatgtgtctctgtcctgagtgtgactaaggacttggtaagaacacaccaattgagaagacactcagttggggtgttaatttccatttctgtgtcctagaggttctcactcccctctccaacaaggaaataggcagtggattggtggggtctcatctggtgcaggctcacctcagtagccatgggatccctccctgacaggtgttccagacggcaagtgagcgggtggaggcagagggcctggcggccctccactccctgactgcgtgtttgtctcgctctgtgctgagggctgatgctgaggacctccttgactccttccttagcaacattctacagggtaatggggccgtggcagccaggaaggggagtgagcacaatagaaacgacattccttgcctgggtgcggtggctcacgcctgtaatccctgcactttaggag

SEQ ID NO: 5720 - DNA, 2300 bp, Homo sapien
cacttgaggccaggagtttgaggctgtagtgcactatgattgcacctgagaaagaggccaggtgcagtaactgacgcttgtaatcccgctactttgggaggctgaggcaggtggattgcttgagctcaggagttcaagaccagcccgggcaccatggcaaaaccttgtctataagaaatacaaaaattaactgggcgtggtggtcgagtctgtagcccctgctactcgggaggtggaggtgggaggatggcttgggctggggaggcagaggttgcattgagccaagatcatgcctctgcactccagcctggaagacagagccagactcagtcaccaaaaaaccaaaaacaaaaacaaaaaaaaaatggaaattattttctcctaagattttgaaggcattgctacatttaaatctagttattggctgggcgtggtggctcatgcctgtaatctcaacacttcgaaaggccaaggcaggcggatcacctgaggtcaggagttcaagaccagcctggctaacatggtgaaaccccatttctactaaaaatacaaaaaaattagccgggcatggtggcgtgagcctgtaatcccagccactcgggagacaggcaggagaatcgcttgaatcctggaggcagaggctgcagtgagccaagatcgtgccattgcactccagcttgtgtaacaagagcaaaactccatctcaaataaataaataagcctagttatctagttttcatttgctgtggagaagtctgaatttcttctgtttcataaacttttgtatttaccatttttttcttcctctctataaactgatgtttggttcaccccgatacattgaaacttcacagtgatgtgccttagtattggtctatttcatgtactgtgttgggtacttagtaggccctgtcaatctggtaacccgtgtccattagtcctgtaaatttttcttgaattctttaattgatgatttcttcctctctcttttctctgttccttcattttggaactctcattaatcttctgttggacctctgattttctgaccttttgttttctattttgtacctctgtctttttgttactttataagagaattccacagttttatcttttctatcaaagtccagtcatgaaaacagaaaccaggccaggttcggtggcttacgcctgtaatcccagcacttcgggaggctgaggtgggtggatcattcgaggtcaggagttccagaccagcctggccaacatgatgaaaccccatgtctacaaaaaatatataaaaattagccaggtgtgttggtgcgcctgtaaccccagctacttgggaggttgagacatgagaatcacttgaacctaggaggtggaggttgcactgagctaggatcaagccactgcaatccagcatgggtgacagagtgagactctgtctcaaaaaaaaataataataataatagtaaatcccttcttttactatgtttttggtggagtttgcaaagaggaaaaggaaaacctgatatatgttttcagtctgtcgtcttggtacagaaaccatcaaggctttctgttttcagaattacagctttttataagggtgaaaaaaatggaaatgtccatcaacaaggaattatctagataaactggtacaaccacaaaatgaaatcatagccactaaaactaatgctatgaaagaataataccataaaaatgttcttaatatgttaagtgaaaaaaattaaaaaccacatgtacaaaatgatttttaagtatatatatattttatatggaaacagtatatactagcacatagtaacaatatatatcagcgaagaaaggaatacaccagaaagttaagcatgcttatttctgagtggtgaaatgatagaaaatgtgtaatcagattttttaaaatgcctaaagacaaaagttcccaaggagtacctaagatcaagcaagtcttcttgctggggcctcattatcttactatcttccctgattgggtatgagtatcaccctgttctgcagggttaccaggttcgagcctgtgttcaaggtggtctgaaatgttacacaaacccacagcccttctcccttttccagccacctaatgatccccatggtatccagagagaagacctcatcctgagtcttcgcgctgtgctggcttctacaccacgatttgctgaggtgggtctagccaaggttagggtatatagcctctgcccatagatggctctgaagaaagagcagtaaaagcatggagaaaaaaatatctggtatacattttagggcatgacacc

SEQ ID NO: 5721 - DNA, 2300 bp, Homo sapien
acccagtttctaatggatttcatttgcatatcaaaggttgcggcctggcactaagagccagggctttacaggaaacttttctggagatgcttttaaaaacaaaaacttcccaaggaccccttttcctctctatttgcctaaaataatttctttcttttttttttttcttaactgttcaaggtttattgggggttttagttggtataacacttggatagttggttgcattgtttatatgtagatgtttttacattatatggtaatgtacactactgatatagttcacaaaataagatcctttggaagaattatgcacaagacatatgatattagatttatacactggatcccaggatgtgactgattgggaaaaaatgttggactaggcatgttcagtgaaggagccaggaagttatataacacacagtaaacatccacctggctcaaggggcaaatgcagcacgtaataatttcttaataactcctacaacattcccccctgtagagatgccacactaactgctgttacggggtttggggtgatgactcctggctacttcctactgaaaaggggcgtcgaatggggaacagcagcaagggctcctcctggggttgatctaagggtcctcacaagaatggcgtgtcaatgtgaggttcagtttacagtaccatttggagtttgattgcttcagtctgatgaacgaatttcctttcccagccaacacaccaaaatgatacggctccaatgagtggaggaacaccagggttcttggtcctcatgctggtttagataaaacgacaccgacacacatgaagtggttttaagtagcggagagtttaataggcaagaaggggcaagaaggaagggagaaggaagaatcttccctgtatagaggcagagggagggagggctccaaagccaagagagggaaccccttttatttgttttttggagacagggtctcactgtgttgctcagggtggccttaaacctctgggcttaaatgatcgtcccacctcagcctccctataggcaagcaccacatgcccaacctacagcctgtttgggggtatatgtgtgtgggtatttgtgtttagtataatatcatctatataaatttaaaaatagatacacagaaaaaataatttatgtcacacattaaaaaaaacacatcatacacctgtttttataaacttttattggaacatagctacactcatttatttccctgttgtctatgctacttttttgttaaaacagcagagttgagtagttgggatagagaccataccctgtaagcctatatttactgtctgaccctttaggaaaaaatttgtgaactctagttctgtagaaaggcagttttgggctgagaatgggttttactgtggacctgtatgagaatggatattaagaaatgttcccctattttcccgactgatcaggtgtctaccttcaaatgggaaggcacaggacatgtctcttggtgaaagagaaaatttgtagtggaacccaaacagaaacaactgttatagacttagggaaggaacaaagctcttgggcccttctcgtgcctatgtcaactaatggctgaatctggtttgtgcagtggtacacctgatactgttctatgagaaccggctgaaggaccatcatcttgtgatcccatctgtcctgcagggtttgaaggcacttgtgagttttccttcatttcattacataactttgttcaagggagcccttgtctagttctctccttgcgctttgggtgtgatggttcacatgctgaggagcaggtgcccaagtgtgggactaaattagtgttaccagctctacttccgttttccctctagagagtaaaagtgtactttgggggactggaaaccagagccatctggaaagagctgcagagaactcatcagcttgagaaagagtctcactattagtgcttcttcctcaaccaggatgctgtgattcttacagtagctaattaggcctgtcgtagggttgtgtcttggaggccatgctgcaattccttcggtattcacgtaccttctcctctcccccagagcctgtgtgtggccctgcccccagggctggctgtttctgtgcttaaagccatcttccaggaagtgcatgtacaggtgagggataacagtcatgttggtattctcctctgtctctaccccttgacataactgggattcaatagcaaaaattattgccttctaagttctgaattcttttggatcttgtgaatgtttttatgctcttcttcagtatgtttatatgctcatct

SEQ ID NO: 5722 - DNA, 2300 bp, Homo sapien
gtgacagagagaccctgtctcagaaaaaaacaaacaaacaaaaaacaccaagtggtaagatttctttctttcttatagctgaatagtattctgttgtatatgtgtacacacacgtcacattttctttattgatttatctgttgacacttaggttgctaccagatcttggctactgtgaataatgctgcagtgaacatgggagtacagacatctctacagatactgatttcatttcctttggatatgtacctagtagtgggattgttgggtcatatagtagttctatttttaattttttaagaaacctccatgctgttttccataatggctgtactaatttacattcccaccaacagtgtacaaaggttaccttttctctctctcttcaccagcacttgttatctcttgtctttttgataatagccatcctagcaggtatgaagtgatatctcactagtgctttaaaattttcatcgtctaggtgcggtggcttatgcctgtaatcccagcaatttgggaggcagaggcgggtggatcacctgaggtcaggagttcaacaccagcctggccaacattgtaaagccctatctctactaaaaatacaaaaattagggccaggtgcagtggctcatgcctgtaatcccagcactttgggaggccaaggcgggcggatcacgaggtcaggagttcaaaaccagcctggccaacatggcaaaaccccatctctactgaaaatacaaaaattagccaggcgtggtggtgggcacctgtaatcccagctacttgggagactgaggcagaagaattgcttgaacccgggaggcggaggttgcagtgagccaagatcataccattgcactccagcctgggtaacgagagcaagactccatctcaaaaaaagaagaaaaagaaaagaaaatacaaaaattagccaggcgtggtggcaggcacctgtaattccaggtactcgggaggctgaggcaggagaatcgcttgaacccaggaggtggaggttgcagcaagccgagatcacaccattgcactctagcctgggtgacaaaggcgaactccatctcaaaaataaataaataaataaaataaagttttcatcattcagattttcacattttttattaagtttatgtctaggtcgcacgcagtggctcacatctgtaatcccagcactttgggagactgagatgggaggatcatttgagcccatgagttcaagaccagcaacatggtgaaacccatctctacaaagaaatacaaaatacttagccaggggtagtggcacatgcctttggtcccagctactggggaggctgaggtgggaggatcacctgagcctgggaggctgtgattataccactgcactccagggttcaagtgattctcctgcctcagccttctgagtagctgggaccacaggcacatgccaccacgcctggctaattttttgtatttttaatagagacagggtttcaccgtgttagccaggatggtctcgatctcctgacctcgtgatctgcccacctcgcctcccaaagtgctgggattacagacatgagccaccacacccggccaaaacaaaagtttttatgtagtgtattttaccatgatttttaaaaatgagtgaaaaagtttatatccaggtatttttttggtttttcttttttcgctattataaacagggtctttttccttatatcattttacaggctattgtgtatatgtatatatatgaaggttttaaatttcataatattttgtatccagctaatttaacaaattattttgtttgtgatttttttatttctcttggattttcaggatatacgctcatgtcattcacaaatgatatatttattttcttttcaatttttatacaaagctgcatatttgaagtgttacagcaatgctgcttctcatctaggagggctcttggcaaatatagtgggcccccaggtacaaagcctagggcaggcaggaaacattataattagtgttattcaaccctttggtaggttttttttttatttttcatatttatttattttatttcctgcagatgtgaaatctggcaactatacagtgttacaagttgtggaagcccttgggtaagagcctctgctatagaatgttcttctccaaccctgactgtgtattctgaaaagttacttttgcgcattgctgctttcctggagcctgaatttgtcttgtagcccagcagcccccttccatattagtacctcagtctaagcctatatgtttgaattgtttctcctgaaaaaagtttc

SEQ ID NO: 5723 - DNA, 2300 bp, Homo sapien
atgttaatggtaggatagatcctaagtgatgtgctccttataaaattctttatacttggctggatattcgaaaattttcataataaaatatgagggaaaatgacattggtaagacactgtacttgtaaattgtaaacactgataacacactacatttcataaaattgtaagatgttaagtttggtggcagcaccaggtatttgctccttgatgcttccaaactacgctgcacacacctcttacagaatggttgcctctcccagcatactataagttcctggtgggcacagatctaacctaatttgtatttatattcctattgctttgcatcatgtttggggaataatatgtattcaacaatagtggcatgattgaattaaagtggaatactgctaacgaacaaagtattatatttctagcagattcactattcttttcttacatattctaaaggttaatacgctcaatatccaagagaaatgtgtccttacttctctccaagcatacgaaatttccaaagtttttttaaaaaaactactcattagataattttatattgttacttaaacccaagatctgaaggcctcctaacattcaataactttttagtagttttttttttttcctagaagagcaaagtctcagaactccacggaagcctggaaatcgttttattctaattttagataagctgtctgaactaagagatctctgaactggtcaaaagcaggaaagtgggggtctgggaagaagacaaaaacaaacgccacataaaacgtcatggagcaaactaatcaagaactttagcaagaaacggagagaaagtcttaaggaggacacccagaacatctccagctcctcctggcccgtctcctcaactcctcttaattccagccagtcagagcgcggggccatctgccactcccaggatgccacgcgacgggagcggacgctgcgaggatgcacctccacacgtcaacctcccacaaacagcatggcttcgtggcgtgagcacccggttcggacctgaacgcctgggtccgagtcccacctccccctcctgcctggtctgcagccctgcgcaagtcctcttgccctcgctgagcctcagtttcctcatctgtaaaatgtaatgattccctataattggctacagggagatgagaagtgtaaatggttttaaggaagacacaggcaactctctaacttgttacggctctgaacctcgcggtgctcactaaccagccttgagaccaatctctcaaagtcaccccgctcctcccttcccgcccggcgcctgtactgaggccgctccctcctgttggcccccatgcggaaggcgcgcggcgccgtctgccgtacctgcagccacctggtcagcggggccctcttgctgacccacgacgaagtcgtgcacgaggccccatagggcacccataggcgccgccgcctccacagccgcggcagcggccataacgcgaactagagaccgtgggaggggatatgggcggtggctcgagacgggctctccgcgcatgcgcctcccgagccaatctccggggaagcgcaagggggcggggcgccggggtcacgtgcctgccggcttctgcctaggcagttccagggaggggcggggcctgaaatggggcggtggcaccgagagggaaggcggctgctgggcacgcagccggaggcgattgagggcgaataattcccagcccggctccccgggagacgggctgcggggcgggcacctggctgggtggggagaggggcggtacgcaccacgggggaagccaatgagaaaatcaggcccagccctagggggcggtgctgtcggtcacatgcgcacctggggcgggtggtggcggcggcgcgggcaccgcgagccggcggaagggagaggggccggcctggggcggggttaggcaggtgagtgacaggctccagggggccggcccctgcctggtgccccgagcgagccgggagtagctgcggcggtgcccgccccctctctccgcccctccagcggagctggtctccggccgggcaccgtcgcgggcccccctggcccggccacctgggaccgtgctggggagtctgccacttccctctctcccctggcccgcaaagttttggcggagccatcgctggggctgagcgcgcccccggggggagatcggggagcgcccgatgccgggcggccggagccattgacccgggacgccgccgtccgctgagcagccgaccaccccgccgcctccggtgcatggggactggctgaggagccagcatgggca

SEQ ID NO: 5724 - DNA, 2300 bp, Homo sapien
ttcaagagagaagagctgaagtttaagcataggggtattcccaatggacaaagagttgtgggactgaacaagatttctctgggagagagtgtaatgagagaaaaaacagaatgtcaaacttaagcaccagcgtgcccccaagctagaaggtgatggtggaaaggggtgttcagaaaggaaaaccaagacagtctgatgccaagaaaggaagggggggaatgtctcgtaggagagagttgtcaacagcaaaaaatgctgcaaaatcaattatggggcctgaacacatatttgttgaacaaatgaatgaatgaaagcaagccagcccttggttttgagagtcatctctcctcagccagaagaatggccagagttaccttcagacaagagaatttcaataagttttactgcatccttcccataaaaacacatttctgcctccacaagtcatcctgtccaccatgcagacatccttccctgcttcccctggttcccccatcttccttcccagtttccgcaacccaagcaacacaccttcggtgtcaagggagacaggaaactccaactagagtttccacttcattaacaactctgcctgtggctcctcttacataaggggatatgtggcaatggggtgggagaggaggctgagttctagccccaggtgagctcctaactagctgtgtgactttggacaaggtgttcaacctctcaggatctgggctttgacacagagtaggagatgggtccatctggaatccagacaagtttgagctctcaagtctacgatattattcccagcgggtccttgcaacaccctcaaagaaggaagtgagtgtaagacccagaaaaatgaccgacagacctcttcccggggcgaaatgccagggcaggcggggtgtaccatgaaagtgagaaagcgttgcgcgggcctggaggatcaccagcgagcgatctcactcccaaagctgggaaggatcccaacaatcccaagggtgactctcaccccgcaccccatcttttatagactcccagacggccgagaggctctaaaaacccctgcgggaaaaataaagatttctttcccagagtcctgcgctgctttgcaagtcggattcccgcagacacgatctgcagctcgataatgacacagtctttggaaggagcgactgttctcgcctcgctcgctccgagttctggggacgcctggctgcccgcgccgtgccccgacgggccggcgtccgaccccggccggagctgccaggccagcggcgccctcgcccccggcctcctcccgatccgtcggccccgctgcggtctgcaaacatttcctgcccccacccccaccaggagctacccagttggagagagttggtcgcgcagccggctcagtgctcgcagttgccccaactcagctcccccggccgcccggcgctggggagcggccccctctggctgcggagcagcccatcggggaaacccaagcgccagcaccagtggggagtccatcggtaagcccaggactcgggcgaggagggggacaactggcgggatgcccgaggccctgctcccttccccatcgttacctgctcgcttgcgggggtgtcccggggctgccggcctctcccggcgctgtctccccacgcagttgcccatgctggctcctcagccagtccccatgcaccggaggcggcggggtggtcggctgctcagcggacggcggcgtcccgggtcaatggctccggccgcccggcatcgggcgctccccgatctccccccgggggcgcgctcagccccagcgatggctccgccaaaactttgcgggccaggggagagagggaagtggcagactccccagcacggtcccaggtggccgggccaggggggcccgcgacggtgcccggccggagaccagctccgctggaggggcggagagagggggcgggcaccgccgcagctactcccggctcgctcggggcaccaggcaggggccggccccctggagcctgtcactcacctgcctaaccccgccccaggccggcccctctcccttccgccggctcgcggtgcccgcgccgccgccaccacccgccccaggtgcgcatgtgaccgacagcaccgccccctagggctgggcctgattttctcattggcttcccccgtggtgcgtaccgcccctctccccacccagccaggtgcccgccccgcagcccgtctcccggggagccgggctgggaattattcgccctcaatcgcctccggctgcgtgcccagcagccgccttccctctcggtgccaccgcc

SEQ ID NO: 5725 - DNA, 2300 bp, Homo sapien
cccgacacagtggggcagctcaagaggcagctgcacgcccaggagggcatcgagccatcgtggcagcggtggttcttctccgggaagctgctcacagaccgcacacggctccaggagaccaagatccagaaagattttgtcatccaggtcatcatcaaccagcccccaccaccccaggactgatgggcccacggacccctgggaagaggccccgcctggagcactaggcccccaccctgctgctgccttccagtgctgtcattttcttcaggggccctcccctcggtgtggctggtgggtgagccgtgaagggaccctgcctttcagggcactacgcgccaccagttcccggtacccagggagcaggcagccacacacgggccttgcaaccttgtcagagaaaaggcgaacagggccctcaccctgcctgtctcccgaagcaggttcgagccacaagggccaaccaggaggcccctggagcccagatctgtcatctggtgctgccagctgtgctcactctggttttctgctcagggtctgaagcagctgctgtctccctcctctgcccccatcccctggctctcccctgggcacagtgccactcccttggaagggagggaaccacccgtgagccccagggcttgggaagcctgaggcgggcctctgcctctccctgcccccagcacaattggcagagatgaggcgggtggtggacagctgggctgtcgtggcagggtctgcacagggccatgtcctggctgtaacccaggcagtgggaggtctgcagcctggtcatggcctccacagcaggtccctgtggacagacatatctgcatatttatcaataaagccttttgctccttctcgcttgcctggcatttgactgaattctcctgcagctctgtggggcccctggagctgttctggtatgggaacaggtggatgcctggcctccccagctgctctgggcatgcaatctccagcagagtgagcctggaactgccagtcttctgggccctgatcccagctcccctggtgtcctcatgagtcctcaggaaaagccactctttgcttttctttaaagcagagccatgctgcctgccctgcctcctccatcagttgctgggaggattaagcaggaagacagatgtgaaagtgcttgcaaggcgaagacagcacctcaggaaggtggtctgctcctgcagcaagaggggctaacttccggccctggagacgctgtagccatcgtgatgttaaagcaaaatctctgacagatttagatcgtgtgtcagaggtttgtgtcagcttcccagcaagggaaccagaaaggaaaaggaaccggttcctcatgcttcctaggggaatgcatgcatatctgaagagaagggaatcttatataaggctgtttagctaagggcagccaccagccaggtgagccttacagaagcacagggctgggtgtctgcagttccctagcagattaacctgggtcacagtgactcagagctccagcatgcgagttccaggtgtggaactgagcaagtacagatctgcttttgctccacttgggagtatttttccttcttagtgagcatgggcagcctcctggccagggaagtctggcactgtctgggcctgacagggaaaccctgggagggtagaaggatccagagtagctgctgttcctcgctagctgggcttagtgctttccggagacccctttcttgaagcaagactctgtaagccctgcagaggtcccctgagcacttaccaagagaggagacagattggataaggtttgttcatgactaaaagtcacccagccaaatgcagtgatgcttaacggggaagcatgtgggaccccggagagccgaaggccagcgtgagctgtgatcagagagggagacagctgcccttcctgctaccacggccctggcctggacaagtagagtgtgaccctcctcacagccagcagggcctgtctgcaggacagcctgggagtacagaactgtcctgggtcccccgtttggttttcaggccctcttcctggagctggctgagcagggtttccaggcatccagcaggtggcactgtcatctgggctggagcatgcagccagcagttcccttttgcaactcagttgccttggctaaggcccaaccagtcccaagtgctcaggacagaggctggacgggctccttcctgcacccctgctcttgggacacagtgccctccggctctaataggccaggagttgggggggcaactggctctgctccctggccctggctccccctgct

SEQ ID NO: 5726 - DNA, 2300 bp, Homo sapien
ggattaagctggagttaggacagcccccgccttcccaggggtaccacagttcaggccccgtcaactagcagttcctgattcctcccacccagctgctgagcaccccgctgcacgtggcagtccggacagggcaggtggagattgtggagcactttctatccctgggcctggaaatcaatgccagagacagggtgagtgctagcctgtccgctgctcacccgccatgggtgtgtgggcagcctgcgggcccctacaggtggtgtccttcctcctggggccttcaggacttggctcctgagcagggtctccagcccacctcccatcacccttgcctcctcccactgcccacaagggccatagtgagtgccacactgactctaggaaggggatactgccctgcatgacgctgtgaggctcaaccgctacaaaatcatcaaactgctgctcctgcatggggctgacatgatgaccaagaacctggtaagctcattccctccttgattcagtcactggcgtgagcactcatacagtggaggtgctgtcctggtccctggagcagcccccgcctagggacatgtatcattggctctggccagcaccatagtacataaacttgtcctcttccagagcaccattccaactgtccgccccattctctatgtgtgtctatgtccagagtgcaagtgcagagagacagcaggaggggcagcaagaggacttcccaaagacccccaagtaggccagagggggtcctcaagtactggcccaaggaggccagaatcatgaaaggccagagctggaagggaccgagcactcagctggcatgacagttcctagcaccccatgtcagctcctgtggtctttgagttttcttaggatctaggcaggaagtccttggaaggggaaggtgcccagggaacaccttggactagggaacacttagtccaagttcttctttggggcccagagcattcacaaaaggaggccatgggagagtccctcgggctcaagaaaggctaaagggataatgagaaaagcaggaaaatatggagaaggtataaatgaggggttttcaccctcagcattattgacatttagggctgggtgattgtttgttgtaggggaccatcctatgccttgtaggatatttaagcaacattcttggcctctgcccactagatgccagtagtacccatcccctagtgtgacaaccaaaagtatcttcacacaatgccagttgcccccatttgagaagcactggtggtgtcaatgagggtaccttctgtgaaagccttcaggacagttaacagattttctcttgccaacccccacgccccgtcccgccccctccaggcaggaaagaccccgacggacctggtgcagctctggcaggctgatacccggcacgccctggagcatcctgagccgggggctgagcataacgggctggaggggcctaatgatagtgggcgagagacccctcagcctgtgccagcccagtgaatgcgtgccccagcccagccagctacccagcccctctctgtgtgcagccggagggtcctaagaatggctcccggagctaactgagggcccagccttttttctgcatgatccaggagcacataccacaaactaccacaataaaaaagctgtttttgctaattgcgatgttcatttccacttgtgtctgaaatctttgggaatgaaggaagactgggggcaaatgctggtttggggaggagggaaactgggagccggttggccctctgagccagccctgcagcttctttactgtggtctcttttcctttcctccctgccactcaacttttcctgccccttctcacatctccagggccaggcttggcccctgcatggattgacttggtaatacactcatcctggcccccttcctggtgcctgctgtcctgtggggctgtgagtggctagcacaggcttgtcacgtggctgccttggcaggaggagcctggtaagggagcggggcaggggatggacagcctgtcacaggcagcttcttgcccagccttgccacacctcccacagggcaggacctgctcagccaatcagctccaccaacctcagaactgcccgtggaaacctggctgggcttctggcttcagagctgggaattgtgggaggagggcccagatcccactggagataccgaaggagatactctttagtattgggatcccagaaaccagtcctatatctggccagagggacactgggttgtggcatctctctagctgctacccagaaggaacagggccccctggg

SEQ ID NO: 5727 - DNA, 2300 bp, Homo sapien
aagacacaaacaactttagctctgaaatctgtgtttctcttgccctgtcctggcccctgaggtagactttgcagcccaacactcaggctgaggagggaacgtatcacattgtaagggcctcctgcagccagttaaaggtcctctgaagaggagatgagggccaggcacagtggcttactcctgtaatcccagcactttgggaggccaaggcaggaggatctcttgagaccaggagttggagaccagcctggccaacatagtgagaccctgtctctattaaaacaaataaataggaggtggaaagctgccctggatgaatcagtgaagagttagagattcttctggaaagcactccctgaaactgtgtagcttttttttttgagacagagtcttgctctgtcgctcaggctggagtgcagtggcatgatttgcctcactgaaacctccgcttcctgggttcaagcgattctcatgcctcagcctcctgagtagctgggattacaggtgcctgccaccacgcctggctaatttttgtatttttagtagagatggggtttcaccatgttggccaagctggtcttgaactcctgacctcacggtccgccggcctcggcctcccaaagtgctgggattacaggcgtgagccaccgcgctgggcctcttatttatttatttatttttaagatggggtctcagtctgccacccaggctggactgcagtggcacgatctcggctcactgcaacctctgcctcctgggactaaagcaatctgcccatctcagcctcccgagtagctgggaccaaaggtgcacaccactatacccggctaattttttgtatttttagtagagatgggattttgccgtgttgcccaggctgatctcgaattcctgagctcaagtgatctgcctgcctctgcctcccaaaatgctgggattacaggcatgagccaccatgcccggccccgtgtagctctttttaaaaaatctttttagcattgctaatttgtactgattatttgaatagagagtattctttttgttttttctttcttttttttttttttttgtgatggagtcttgctctgtctcccaggctgcagtgcagtggcacgatctcggcttactgcaagctctgccttccaggttcacgccattttcctgcctcagcctcctgagtagctgggactacaggctcccaccaccatgcacggctaattttttgtgtgtgtgtgtgtatttttagtagagatggggtttcaccgtgttagccaggatggtctcaatctcctgacctcgtgatcgtccgcctcggcctcccaaagtgttgggattacaggcgtgagccacagcgcccagccaagagtattctttttaaataaaaattatgaccagagactagaggaaggggtcattacagaagggctctatggccctgaactcacacccataaacaccctcaaagatggactttgaattgttatttccaaatgaggttagccaaccacagaactagtccagcaggactgggaagatgaggttctccataaaacacttgtgtcctattccttccatacatagagtggaccatgctttcttgcaaagatataatattttgtatatattaaaaccattactctgttaaagaaaatattttgtttaaagcatcacaatgtttacaaccccattttggcatttcttatttttttttaaatgggctagatgcttttgaggggaaaaaaaaatacagtggcccaggcctgtttataccctgagaggccttggagattaattaggcttttagttgtctgcacctatggaaagcctggccagccagcccacctgctcacaacccgaaccatgcctatttatgggggggcaaattctgggtttgtaggtgcctcactaaggcaagaggtagcagctaccatcccggagtggccccagggatctagacccgatgaagtctcctgtccactctgccttctcagcccactgcttgcctctccaccctcagcccattgtgacctcatgttagttactccagaatgagctccttcctgggttcttttccctctgaactctgccctgtagtgaggcgaggggctgcaaatgaggatggaatatgccaggctggcagcagacatgggcactggatggaggtgcactggtctcagatggctaggaatggataccagcccagtcaaggggatcattctgtcatggccagcctgacccagcatactttgccccctgggggccaccagatggggagagagagaaaccaaagactggaagat

SEQ ID NO: 5728 - DNA, 2300 bp, Homo sapien
ttagccaggcgtggtggcgcatgcctgtaatcccagctacttgggaggctgaggcggaggttggagtgagcaaagatcgcgccattgcactccagcctggggaagaataacagtgaaactccgtctcaaaaacaaaacaaaacaaaaaacactgatgctcacaccagtaatcccagctacttgggaagctgatgaggaagaatcacttgaggccaggagttcgggaccagtctaggcaccatagcgatacccatctcaacaaaaaatttgaaaagtagctgggtgtgttggcacacacctctagtcccagctactggagaggatgaagcgggaggatcactttagcccagaagtttgagactgcagtgagctctaatcacaatcacactactgcattccaggctgggtaactgagtgagaccccatctcttaaaacaaaacaaataaacaacactgatggaacacagtaagaggtcagtaaatgttagcttctgttataaaggtatttcagacagcttctctggggttagtgcaattgattattagagagggttgtgccacctgaattgaaatataaataatctagcactgtccaccatgacaatgtggagaaagcaaatttaacatatgggttgttttagttgaacatttaaagcatcacttttgcataaaatataccagaccccttttgtgctatgaaactatggaacccactctttggaactccatcttgactggatgaggttttggcttccctgggacttgaaggaaaaggaagctagctgttggcgccaggcccccgagatttaagaatcccatcttgcggccaggcacggtggctcatgcctgtaatcccagcactttgggaggccaaggcgggcggatcacgaggtcaggagattgagaccatcctggctaacacggtgaaactccatctctactaaaaaatacaaaaagttagtggggcgtcgtggtgggcacctgtagtcccagctactcgggaggctgaggcaggagaatggcatgaacccgggaggcagagcttgcagtcagccgagatcatgccactgcactccagcctgggcaacagagtgagactctgtctcaaaaaaagaaaaaaaaaaaaaaagaatcccgtcttgttttgagctgggagcagtggcatgcacctgtagttccagctactcagaagtctaagaggggattggaggatctcttgaacctaggagttcaagtccagcctgggtaacataatgagaccctgtctctaaaagaaaaaagaattctttcctgtttctccaccaggtctggccccagtactctgaggagaatgtgtccttgtcctgttggaactcagtcagatgcctgagggtcagactctaggttacttattaatcagaggggactttttttttggagggggacagggtctcgctctgtcacccaggctgtagtggcactgtcatgacttactgcagcctcagactcctgggctcaagcaattgtccctgctcagcctcccaaagtgctggaattacaggcatgagccaccatgcttggttgatagaggacttttcaatagtgatttatagttcagagaacttttcacacacagtatttccatttattgtagcagtaggccacaagctttgaagtaaggatctaatgatgtgcttattaaaactgcaggttcccaggctctgactacagaatctgattcagtaagtctgagtttgggcctaggaatctgcattgtcaaaattactggagaaaacattgtattgcttagatctggaaaagatgaggaggtagctagatgtggtagtgtgcgcctgtagtcccagctactcaggagactgaggtgacgggatgccttgaatccaggagtttgaggttacagtgagctatgatcgtgccaccgtgctctagcctgggtgacagagcaagaccctgtctctaaaaaataaataaataaataaataaataaataaataaataaatgaaagatgaagggatgaatgaagagacctagggaattaaaaaagaaatagggcttgtattttttagtctatcaaatgacgtactatttgcctctgtttatatttaatgattttggggggtatcttaattccctcttcttcttcttccgtttttttttttttttttgagacagggtctccctctgtcgcccaggctggagtgtcgtggcgtgatcttggctcactgcacttctgcctcctgggttcaagcgatccttccacctcagcctcccaagtagctgggactacaggaacgcacca

SEQ ID NO: 5729 - DNA, 2300 bp, Homo sapien
ctggcaccacaggcacttgtcaccacactcagctaattataaaggccataagagtaacaatcatggcttttcaagcctgacagaacctagcatcatgctgtactcacattgtttaagaaataaacatatggatacacagattgatgtgagtggtatttgggaagatttgctccaatcttggcactatattttatttatttatttatttatctagtgaaccagaaataaaattataagccccccaatcaaatgaatggcctcctcttctgggccaagggcattcctaaattaacctgaaaaactatttgaggccatgatgagaagtgggagtcagacatgcctcattattttctcctgcttttggaattcaggaccagcatttaacattaaagcagagatcttaaggttgacacagcagactctttgtagcaatgataccaacattgacagatagcaggccccatctgtcatgatagcaggcaaaggtgtcttttatggtgaaaatctacattctgtagaaaatccccttccctttccaggtctttttcctgatccaggggagaactaactaagagtctgatacctttctaaatctgataataaacactggccagccttggtggctcacacgtgtaatcctagcactttgggaggcagagatgggaggatcacttgagcccaggagttcaataccagcctgggcaacatgacaaaacaccatctctacaaaaaatacaaaaataagccaggcatagtggaatgaaccagtagtctcagctacttaggaggctgaggtgggaggataacttgagcctgggaggtcaaggctgcagtaagccgtgatccagctactgcactccagactgggtgacagagggagaccctgtctcaaaacaaaaaaaaaaataaagaaacatttacaatctatgctctctggagcctgctacctgtagccttctctgcataataaaaaccttgatttccacaattccttgtgtgtgtgtgtgtgtgtgtgtgtgtgtgtgtgtgcgtgcatatcttagtaacaattccttaacttaacccagacattcccttctgtgggttccaggtctttaaactctttcaaccaattgtcaatcaggacatctttgaatccacctacatcctggaacttgccacccccacccccactttcgggaccaagccaatgtatattttacatgtattgattgatgtcttacgtctccctaaaatgtataaaatcaagtggtgtcccgactattttggacacacattcttaggaccttctaaggctgtgtcacgggcatgtccttaacattggcaaaataaactcctaaattgattgagacctgtctcagatactttttggtttgcaatttatttatttgagacagggtcttgctaggtcgcccaggctggggtacagtggcagaatcatggcttattgcagcctcaacctcctgggctcaagggatcctcccacctcagcctcctgagtagctgtgactacaggcacccaccactaggctgggtaatttttttcttctgtagatacggagtctccctgcgttgcccaggctgatctagaactcttgggctcaagcctcccgcactcctgagctcaagccgcggcctcccgaagtgctgggattacagatgtgagccactgcgcctggccaggtactatattttaaacaaaaaggatctagataatgacaaggacagcacaaattcctataatgaatgcaaaagtgtcttgatatcacaatgtctagcacagagttattggaggctatcctgcctagcgcgttacaatttacaaagctgcctctctgaagctggatttaggatctgccttaaactccgcggcggggcccttgacagcagtggggactggagcaagatcagagccgctcgcgttgatggtcactgttgcttcgggcgcaggtttggttttctttggggttgccatttcaactagacggcctctgggtaggccagatctggatcctctgtctttatctgcgttgcagaggtgggaccacccctctttcacatagtcagcccgggttcgcaaacactcggccccgcacaaagatggcgtggagccgggctgggccaatgcggagtggcgttgctcccggttgcctaggtaacagccaatgggcagcgggaattgtacccagtgcggtcgcccaggatggcggcgtcaagtggggcaatcgctggtggaggtggcggagagcaaggtggcagccgggagcccatcagaggaaaagtccgaggcgctggaaccc

SEQ ID NO: 5730 - DNA, 2300 bp, Homo sapien
cctcccaaagtgctgggattacaggcatgagccaccacacccggcctagacattgttttaaatgcattacatggattaactcatggaaccagctttatagtatcctgtgatgttggaaacccagacccagggaggtaaaggtaatgtgcccatggtcattcagctggtaaatggcagagccggatccaaatccaggcagactgtttccatgctcttaacactatgttgattcttattaaatatccctatgaaatatgtctcatatttaccccctttctttcatctccactgatgctacatgaaacttccaggatgtgttagttgcattattacaataacttctgagtttgttactttgcttccaatctctcactggtcatctctgagtgtcactgtcagattaattttcataaaatactgcttgtagtgtgtcattcccctggccaagaaactacattttatttatttatttatttatttatttatttatttatttatttatttatgttttgagacagggtctctgttaaccaggctcaagcagttctcttgccttaacctcccgagtgctggcaccacaggcacttgtcaccacactcagctaattataaaggccataagagtaacaatcatggcttttcaagcctgacagaacctagcatcatgctgtactcacattgtttaagaaataaacatatggatacacagattgatgtgagtggtatttgggaagatttgctccaatcttggcactatattttatttatttatttatttatctagtgaaccagaaataaaattataagccccccaatcaaatgaatggcctcctcttctgggccaagggcattcctaaattaacctgaaaaactatttgaggccatgatgagaagtgggagtcagacatgcctcattattttctcctgcttttggaattcaggaccagcatttaacattaaagcagagatcttaaggttgacacagcagactctttgtagcaatgataccaacattgacagatagcaggccccatctgtcatgatagcaggcaaaggtgtcttttatggtgaaaatctacattctgtagaaaatccccttccctttccaggtctttttcctgatccaggggagaactaactaagagtctgatacctttctaaatctgataataaacactggccagccttggtggctcacacgtgtaatcctagcactttgggaggcagagatgggaggatcacttgagcccaggagttcaataccagcctgggcaacatgacaaaacaccatctctacaaaaaatacaaaaataagccaggcatagtggaatgaaccagtagtctcagctacttaggaggctgaggtgggaggataacttgagcctgggaggtcaaggctgcagtaagccgtgatccagctactgcactccagactgggtgacagagggagaccctgtctcaaaacaaaaaaaaaaataaagaaacatttacaatctatgctctctggagcctgctacctgtagccttctctgcataataaaaaccttgatttccacaattccttgtgtgtgtgtgtgtgtgtgtgtgtgtgtgtgtgtgcgtgcatatcttagtaacaattccttaacttaacccagacattcccttctgtgggttccaggtctttaaactctttcaaccaattgtcaatcaggacatctttgaatccacctacatcctggaacttgccacccccacccccactttcgggaccaagccaatgtatattttacatgtattgattgatgtcttacgtctccctaaaatgtataaaatcaagtggtgtcccgactattttggacacacattcttaggaccttctaaggctgtgtcacgggcatgtccttaacattggcaaaataaactcctaaattgattgagacctgtctcagatactttttggtttgcaatttatttatttgagacagggtcttgctaggtcgcccaggctggggtacagtggcagaatcatggcttattgcagcctcaacctcctgggctcaagggatcctcccacctcagcctcctgagtagctgtgactacaggcacccaccactaggctgggtaatttttttcttctgtagatacggagtctccctgcgttgcccaggctgatctagaactcttgggctcaagcctcccgcactcctgagctcaagccgcggcctcccgaagtgctgggattacagatgtgagccactgcgcctggccaggtactatattttaaacaaaaaggatctagataatgacaaggacagcac

SEQ ID NO: 5731 - DNA, 2300 bp, Homo sapien
cctttgctgagcctgcagcctgcctcagttaattggtgaactgttacggagttttgagctcattttgcttttttttctcctactgcctcagaaagccacatgccttcagcttgagggcagggactctatcttccttccctttctcatgaataataatgtactgagcacctactgtgtctagacactgagatttaacagtgtgagtaaaagcaatggactcttacctcgtggtaagaacttcttaggctcatgggaccatatttttcttcaattaacaaataagcattgagcagctgggccaggcacagtgtaagatattaattggctatgtattattctttgtatcacaagtttgtatcttcacaggaacttgaagataatgggtgaggcagcgagtcaggaataaaatgtcttaacaattgcccctgggttttcctaggaactccttaaaaaaattaatttttaaaaaatagatggagtcttgctatgttgcccaggctggccttgaattcctataaggttgagaaggaaagatagcttagagcagtctgagctctgtgtgatgtatgcacagtctattggctcaaagacatgagtatgggacttcagtcatgccttccacacccacactctggggcaatggtttctttctttctttctttcctttctttccttccctttcttttctttatttcttcctgcccctctccctctccctttctttctttctctttctctctttttctttctttcttgacagagtttctcactgcaacctctgcctcctgggttcaagcgattctcctgcctcagcttcccgagtagctgagattataggcatgtgccaccatgcccggctaattttgtatttttagtagagacagggtttcttcatgttggtcaggctggtcttgaactcccgacctcaggtgatccgcctgcctcagcctcccaaagtgctgggattacaggcgtgagccactgtgcctggcgggtttttttcttttaaaaattttttattttttggctgcactgtgggtggttcacacctgtaatcccccagcactctgggagactgagggaggaggatcgcctgaggccaggagttcaagaccagcccaggcaacatagagataacctaactctaaaaaaataataataatattttaaaaagaaatcttcagggcttcctaggaaaacctggaggcaattgttaagacattttatcctgactggctacttcacccattaccttcaagttcctgcgaacttgaagtgtaacctgacattgttacatctacattggaagtatgttaggtcaactgagatacgaatttgggatacaaagtacaatgtatagccaatctataacttgttattttaatgtaaattcttggtaaacaagttaggaactgcctcttttcctttaaaaacctacttccaggccaagcgcagtggctcacacctgtaatcccagcactttgggaggtcgaggtgggcagatcacttgacctctgtcgttttttttttggagactgatcactctgtctcaaaaaaaaaaaaaaaacaaacccaaaaaacaaaccccccgccccaaaaaaaacgtttcatcgaggtagagcagcagctttgtttctttgcttcactgctgtctccctagcacttagaacatagtacgtgctcaataaatgaatgagtgcctgactgaatgaatgaggatacatagatgagattcctccaatctcacagccggttcagagtaggcactcaatgagtgactgacaggatagttgctgttttgaaagcgcccaagtccagtaagccaattggaagctaagcgtggcgctggtatagtaggggcagggggcgtgcctgacccaaggttgggtcctggagcatgcgcagtcttcacagaaggtgacggggagaaaaatgcggaggcagcgattgcgtaggagcaggttctgattggctactgttcgcgcgcgaggggccgtgcctattcgtagccaagtaaacagggcaggttagaggcggggccaaggaggcgtcgcgacctggttggccggccggggcctgggggatgtcacggattggtcgcggccgcgagcgcagtggtgtggagcgcgccgggtcccggagccggctgtctgagggatggacgagacgagcccactagtgtcccccgagcgggcccaacccccggactacaccttcccgtcgggctcgggcgctcactttccgcaggtgcccgggggcgcggtccgagtggcggcggcggccggctcgggcccctctcc

SEQ ID NO: 5732 - DNA, 2300 bp, Homo sapien
tctcagctactcgggaggctaaggcaggagaatcgcttgaacccagggggcagaagatgcagtgaactgagatggtgccactgcacaccagcttgggcaacagagtgagactctgtctcaaaaatacaaaacaaaaaacccttttagccacagcacaacaacacttacgctgtttttgtgcagaaggacagagagaggaactggagatcatggggtgaggacaaatagctcccaagcatccccttcacgctgcaacaaggaattcacaaagccccatgtgctggctcttccccttcccacccacaacttttacagaagaaaaatcaagcttaaatggataagaggtcagctatgaagtaaaaaggaagtcagggagacccaggagcctttcctgagcattgctgaacaagtgcacaaacacttcatcttccaaggacaaaacaagcatttatcagaggcctactggacaccctgcctccactcctgccccctccaatccaagttccaaactgcagccagagtgaccttctaaaaacacaaacttgtcatgatgatgaaatttgcaaagtgctgactgacactactggtacgtggtaagtactataaaatgcccgttacataaacacagtacatataatgccattccttgtttaaacccctccaaggatcacatgcaaccttctctgcctgcctctgccttctacttcccaccgtgctctctcttgctagccttactccgggtcgcatttaattcctccggagccaagctacctcctggcccaaccaaatgcctttccctctttccttaaagcagtctccccagatccactcctcttcatttgaccagtttcaactccttctttatatctcagcttaaatgctgcttcttcagccctcctgaacctcccagaggaagcttaggttcctccatatttatcctcttatagccataacattgatcacaactgtaatcacatactccatgttttaggttgtttaatgcctgcctcccttactaggctgtagactccccaggacaagggctataggtctttccgtctctcttgtttacggcctatcaaggaactcggacagcataggtcactaatgaacatttccgaatgcatacaaactttaaaatacggtcttgtttaggtaaccggcccaaagtcgcacaaatgacccaatatttgaacccacgacattctggctttgaagcccaaggtctgactccagcagactgccccctcctctccctcaaagccggagccaaacggtgggctgggaggggacttgagcggcagagtctgaggatctgcagagggccacgcgctgcaaggcagtcagtgccgcgcgcgctggcctcgggcccaggagaaggggcatccgtcacgtgtacccggcagggccagctttcgccgcaccctggggcaggaatgcagccccgcccagctcccgcgccagcaaaaccgcgctggccctggggactgacgtcaatgaagggggcgcctcgggcgccgcgcgggggcggagagggcggtgggcagggcccgggcagacacgccccctcaccgccgctccgccgccgattaggtttgaggaagcttcgcactccgctttcgaggccagcggaggcggggggcggggatggacacgccccctccctgtctcccaccgatgattggcgcacggaactccgccttgggtttggaaggctcgcctgggagctcatacctggctagggccgaggattggctgttccggggctagggagcgctttctcccgggaaccgcggctgtgacccaagtggcccggaccagtttggggctgcgtgcggcctgcctcaagcaaccaggtacgtaggtcggcggcccagctcggcgctgcggtgggagccggagggcgacagtcagagccggggtgccagcgggacgcgaccgccagatccacttaggaccccgtcgttctgcgaagcggccacgtctgagtcccggggcctcctcgtgctgcagatgtcgccttaggacctcggccaggataccctctgccatgctcttgtgctgcccgtgatcaccgactggcccttgtaagcaccttcgcagagctgcgcctgccctttctgaaggctgtggaagaggttggagtgggcgcatcttagcttgccccatccccatttgaggtctgtcggagctgcccttcagtgtggtgagtacctgctccaattctccaccgggcagtggagtgcagagggtacagaggctagcttgggagtcctgactttggatccctccctgctcct

SEQ ID NO: 5733 - DNA, 2300 bp, Homo sapien
ccccagggcttgaggaaaagtgaagagaagccactgtaaaaacctttttaacgggccgggcgctgtggctcacgcctgtaatcccagcactttgggaggctgaggccggaggatcacgaggtcaattgatcgagaccatcctggccaacatggtgaaaccccatctctactaaaaatacaaaaattagccgggcatggtggcctgcacgtataatcccagctactcgggaggctgaggcaggagaatcgcttgaacccgggaggcagaggttgcggtgagccgagatcgtgccactgcattccagcctgacgacagagtgcgcctccgtctcaaaaaaagcaaacaaacaaacaaaaaaaccttttagcggccgggcatggtggcttacgcctgtaatcccagcactttgggaggccgaggcaggtggattacctgaggtcaggagttcaagaccggtctggccaacatggtgaaactgcatctctactaaaaaatacaaaaattagccaggtgtggtggtacgtgcctgtagtctcagctactcgggaggctaaggcaggagaatcgcttgaacccagggggcagaagatgcagtgaactgagatggtgccactgcacaccagcttgggcaacagagtgagactctgtctcaaaaatacaaaacaaaaaacccttttagccacagcacaacaacacttacgctgtttttgtgcagaaggacagagagaggaactggagatcatggggtgaggacaaatagctcccaagcatccccttcacgctgcaacaaggaattcacaaagccccatgtgctggctcttccccttcccacccacaacttttacagaagaaaaatcaagcttaaatggataagaggtcagctatgaagtaaaaaggaagtcagggagacccaggagcctttcctgagcattgctgaacaagtgcacaaacacttcatcttccaaggacaaaacaagcatttatcagaggcctactggacaccctgcctccactcctgccccctccaatccaagttccaaactgcagccagagtgaccttctaaaaacacaaacttgtcatgatgatgaaatttgcaaagtgctgactgacactactggtacgtggtaagtactataaaatgcccgttacataaacacagtacatataatgccattccttgtttaaacccctccaaggatcacatgcaaccttctctgcctgcctctgccttctacttcccaccgtgctctctcttgctagccttactccgggtcgcatttaattcctccggagccaagctacctcctggcccaaccaaatgcctttccctctttccttaaagcagtctccccagatccactcctcttcatttgaccagtttcaactccttctttatatctcagcttaaatgctgcttcttcagccctcctgaacctcccagaggaagcttaggttcctccatatttatcctcttatagccataacattgatcacaactgtaatcacatactccatgttttaggttgtttaatgcctgcctcccttactaggctgtagactccccaggacaagggctataggtctttccgtctctcttgtttacggcctatcaaggaactcggacagcataggtcactaatgaacatttccgaatgcatacaaactttaaaatacggtcttgtttaggtaaccggcccaaagtcgcacaaatgacccaatatttgaacccacgacattctggctttgaagcccaaggtctgactccagcagactgccccctcctctccctcaaagccggagccaaacggtgggctgggaggggacttgagcggcagagtctgaggatctgcagagggccacgcgctgcaaggcagtcagtgccgcgcgcgctggcctcgggcccaggagaaggggcatccgtcacgtgtacccggcagggccagctttcgccgcaccctggggcaggaatgcagccccgcccagctcccgcgccagcaaaaccgcgctggccctggggactgacgtcaatgaagggggcgcctcgggcgccgcgcgggggcggagagggcggtgggcagggcccgggcagacacgccccctcaccgccgctccgccgccgattaggtttgaggaagcttcgcactccgctttcgaggccagcggaggcggggggcggggatggacacgccccctccctgtctcccaccgatgattggcgcacggaactccgccttgggtttggaaggctcgcctgggagctcatacctggctagggccgaggattggctgttccggggc

SEQ ID NO: 5734 - DNA, 2300 bp, Homo sapien
aggtgcagtggctcatgcctataatcttaacactttaggaggccgaggagggaggatcatttgagcccaggagtttgaaaccagcctgggcaagatggcaagattccgtctctatttttttttaatacattcagagccttctccaagtgggctgagttggcagtgagagcattacccgctgagaagccacatagcttttctctcccaaggggagccagcctgctggaagaggacctgctcagccaggccaaaggccagaggactcatcttatgaccgggagatgaagactagctctgcagcgtggggtcagctgtaggtctgaggcatgcactgtccccagggtaagaggggcaccctcagttccattgctgcccctgcagccactcagtcatctgctccacgtattttactcagggtctcctatgagccaggcacaggcaaagatggataagacatgatatccaatagttatgatgtagccgactcaacactgctgcagagggatggtccaactgggggcctagaagagcagcctcagaggctggaccaaaaggaagcagcatttaaactgagccttgaaggataaataggagttttgctgtcaagtggggtgtgggaatgagggcattctgagcttacttgggaaatttggaaaggattagtgggttgtatgctgggtgacagcatgggacagggaaggaagtggcaagccaggaagttggaaattggttggggacaaattgtgaaataggccacacagaagagacagcttctgtcctgtctcagtaggggaagcagtgtaacaaacatcaggtctgtcttttagaaagatgtcatgacctggcttggtggttcacgcctgtaatcccagcactttgggagccaagggggacagatcacttgaggtcaggagctcgagaccagcctggccaacatggcaaagccctgtctctactaaaaaaaatacaaaaattagctgggtgtggtggcactcgcgactgtagtcccagctacttgggagaccgaggcaggagaatcacttgaggccgggaggcggaggttgcagtgagcagagattgctccactgccctccaacctggacgacagaacagtactctaccccaccgccccccacccccccccccacaaaaaaaaggaaaaagaaaaaagaaagatgccatgggcacaaaggttgagcatgaaggagagaagagagactggtggtagttaccagcttcctggtctgaacccaggtaggcttcattcctcctcagcaaaatgaggggagttgcgtgtatctctgtggttgttttgagggttaaatgagaactcaggtaaagcggtggcacggaataataataatgtaaagcatcgttagcctccatcacaggcagttcggcctagtagttaagtccgtgggctttgcttcctcttggccctgggtttgtgtcccagccatgttaggtagcgtattttgaatgtgggcaagacagaaggatggcaaggaagggttggataaaagagggtgtggacaataagcttgtgccgagtggaacgagtggcggtgcctctggtgggtgatggactcttactccgacatgggtaactcggacagctttggacaggacgaggcgggccctggcaggagactgcggatgtccaggtgacagtggatgccagttcaaaaccagcactgctctcctcccgcgcccaggaagagcccagaggcccggggtgggcgctatggcaggaaagagggaaaaggaggaggcagggcgggcaggggcggccccagatgtggcaaacttggcgcagcagcgcacgggcggacagggcggaaggcccgcgtcgggctgggagatgcgccctgccctggcccgaggacgaaggaatccgagctgggggcctggcgcagaggggaaaggggggcgccagggtggtgagcgagatggaaagagagatggcaggaagccgggaggagcgcgcgggggaggagacagccgaggggaaggggaagggaaaggggcgggtgggaagggtggagagctggagacagaaggcgaggagggccgaggggaggagagaggagaggaagggtggggaaaggaggagaggaagagaggactaagaggggagcaaggcgaggaggccgcggcgggcgcagcgggcacctgggccgtgctgcccccgcgagcaaggcgccgccattccgctgctcggggcgccgccgccgccgccaccgcgcccaggggccatgctcccgccgcccccgcgccagccgccgccccaggcgcgtgcg

SEQ ID NO: 5735 - DNA, 2300 bp, Homo sapien
taagcttgtgccgagtggaacgagtggcggtgcctctggtgggtgatggactcttactccgacatgggtaactcggacagctttggacaggacgaggcgggccctggcaggagactgcggatgtccaggtgacagtggatgccagttcaaaaccagcactgctctcctcccgcgcccaggaagagcccagaggcccggggtgggcgctatggcaggaaagagggaaaaggaggaggcagggcgggcaggggcggccccagatgtggcaaacttggcgcagcagcgcacgggcggacagggcggaaggcccgcgtcgggctgggagatgcgccctgccctggcccgaggacgaaggaatccgagctgggggcctggcgcagaggggaaaggggggcgccagggtggtgagcgagatggaaagagagatggcaggaagccgggaggagcgcgcgggggaggagacagccgaggggaaggggaagggaaaggggcgggtgggaagggtggagagctggagacagaaggcgaggagggccgaggggaggagagaggagaggaagggtggggaaaggaggagaggaagagaggactaagaggggagcaaggcgaggaggccgcggcgggcgcagcgggcacctgggccgtgctgcccccgcgagcaaggcgccgccattccgctgctcggggcgccgccgccgccgccaccgcgcccaggggccatgctcccgccgcccccgcgccagccgccgccccaggcgcgtgcggcccgcggcgcggtgcgcctgcagcggcccttcctgcgcagcccgctgggcgtgttgcggctgctgcagctgctggccggcgctgccttctggatcactatcgccaccagcaagtaccagggccccgtgcacttcgcgctcttcgtgtccgtgctcttctggctgctcaccctgggcctctacttcctcacgctgctgggcaagcacgagctggtccccgtgctgggctcgcgctggctcatggtcaacgtggcgcacgatgtgctggcggccgcgctctacggcgccgccaccggcatcatgagcgaccagatgcagcgccacagctactgcaacctcaaggattacccgctcccctgcgcctaccacgccttcctggcggccgccgtctgcggcggcgtctgccacggcctctacctgctttcggcgctctatggctgcgggcgtcgctgccagggcaagcaggaggtggcgtgaggccgcccgcgcccgccgcggccccgatcggggcgggggaatccccggagaccagcctccttaatcccttcccccgccgccgccccgcgcgggtgcgccctggcaccctctccctgccctccagcgtttccactgtcgcccgcgcccgggaaccctgacgctcagctcccgcccgacggcagcgccgccgccgcccagaatcccagcccagaatcccgaccgccgcgccggacgcgccgtctcccgggacaagcgcaggctgcgatccgaggggctgacacacactcgcagacgagccgccccgaggcgaaacctcgcggttcctcttcccttccctgctgagactaagacgtggacaggggccgcgcagatccgggggaggctcccaaattggaaccaggcttctggctgcccccttccctcccgccccgtggtcggaagagcactcccttccctggcccctcatccagcctccggtgctgtaaaacgcaggcgctgggccgcgggcggagctgaggacaggccttggctggtcccaggatgagcgacgagtttggttttagctggggattgtgctggcatcctgcgaagctcctcccagccggtctctctgtgctcggttgtcttggggtggggcccatccgccgaggtggggaccgataggagaagccggtgggttgtacccttacacttgtggagtctcctcttgcctctacctactccgcctttgtccttaaggtttttgcaggccagtgccaaacacacactaactgtcctggcctctccgtgacacaagtctcttcccagccttcctcacaggcttctgccgcccccctcatctccaccctcccccatatctgtttgcattaggagttccacgaccatggtggaatgttaaggtgaaccccaccccttcttacagatggggacccagagcctgctcttgggaacagccagagtaagattggaacccagacttgcagtccagcgctgtttgcattaaaagggtgggtgagtcaggacccctggctcaggagccgcctctcctaaaagagggtt

SEQ ID NO: 5736 - DNA, 2300 bp, Homo sapien
cagatgggcctggaccaccacaaagctcagtccatttctctaaggggtggtgagtggatttctgtatatggcttagtgatatgtgtgggaattggatctttctacattttggcctttcgtggattcttgtctgatttttgggctaggggtggtggtggtagggctttgagtaaaaataaaaatcacaatgattgctaacgatttttgaacacttataacatgtcaggaatttacatactttagctcatttaattctcatcacagccccacactgagggtaccactatggttatccccattttacagctggaaaaaccaaccaagcaattcatctgaggagaagccctcctaccttacttatgttgggactggcgcatgccgggtaattgacaaagtcaactaaagcagggagctttgagaaaaatacctacacagggtaagcatttacttttgggacaatcgtcaatttatacatagttataagaactaacacagggtgatcccacagactaccccccaatggtaacatcttgcaacccttcttaacagaatgcctactatgtgccaggtactgctttaggtgctggagacatagacacgggaaacgaaacattagctgacagaagccacaagagtgaatgagatcctcacggagtgccttgagtcagaagaaagaagggtagcaaaaggagccccagcatttgaggggtaggaagaaaagccctaaggagaccttgaaggtcggaaagagaggagagggtggtgtcatggaagctaaggtggacaatggtgccaaaaaggaaagagattccagtgcttctgaggtcatctgcaaggaggactgggaagtgtccattggatttagcagccaggatgtcacaggtgagcaggcaggtagcccagaaatatggaggggagcaggaccacagtgcagtgaggagtgaattgggcgaggaagcagcggtagagagcacttcacagtgagtcttccaactcatgtaggaaagagggggtaaagttaggctaaaggagaaattttccatgaattttgtctctagaatgatgattaagagttagcgagagtcaagatttcaggcctgttagagcaaagccctaaggaaataagagttggaccctggagcacagctaagtcctggctggagggatgggcctgtctttctgaaaggagataatggaggaagagatgcagttaaagctctgtggctacttgaagagggaagtgattacttccagctggggcactcaaggaagggatacagacatttgagtgccaggggcatttgagggtaacagtggaggggttcagttggccaaagttaaaggcagctgaaagatggcaggagacaagaccaggaaatgcagaccaaggtgggtggtggtatggttggggcgttggggtcagatgacacataagcttcaaattccagctcccatttgcttcttagctgtgactctaaagaagttccttaacacgtctgagattccccatctgtaaaatggcgacaaccctaatagggtcgttggaggagaactagataatgtctaaaaagagctcagtccggttcagtgcttggctcctctgtacctgagcgctaagtcactaatataaagccatcggatgtgtgctttaagggaaattaactgggccacacggtgtgaagtgaactgagctgggagaggcctgcacaggaccttgtacacactagctactccggaaacaactgcatgctctgctgggcatctcatacaggatacggtgtctttccggggctcacacacagtccccagttcagttccaaagttggaaggaaagaggatgaagacgtaaattcttcatttaagcctctcgccaactgttccctgcggcaaggcagggcaacgagctgcagggtcgccaagcacgtgcttccaagggtcctcaaggctttgtgaacggcggccggccaaggacagaattaactccagcctggagcgcgcgggaaagacgcgcaggcgcactgctggcaagggtgcttgcctgtgctggggtgggcggagctaaacccggagcgggatgacgtcatgaggacgcagccgcagagcgattcgcgtcccggaagcggcggtggcggccgcggcgtaggcggaggagattttcggacctgcgacttccgaacaaccctggcaggaggagcggcgttcagccgggggaggcctgaagaaacgctccggggcccagtggctctacccctgctcctgcccgaccctgccgcctccctcacggagccagcggccgggta

SEQ ID NO: 5737 - DNA, 2300 bp, Homo sapien
catacagcacatttttacctcaaagtcacacgtcccttggggatctaacattcctaggtgttcattctgtgtgttggcactgtgcagggggctttctttccattcaccttatttgcttctcacagtaactgctgaagaaattccattttacaaagaaggaaatgaggttaagtacttgcccaaggtcatacagctaatatgtggccaggatctgaacctggctccatcgtctgcagagcccaggctctcgcaccattgctacactgcactgcctggccctgcagagaccagtccttcaccttctgagtggccatctgcataacctcttcatgctgggggctgggagagggagaggggaaaagaaggccaaagtttactctacctggaccccactaggtcatcctggacatcaaacacggcttgtcccacccttggggctcagtgagatgaggcttctcctgcctcctctgcctgccttgtatctttttcttacaactagatcagaaggaacagagccatgtcttttgcacctctgtgtccccatgcataccctaccccatgccttgcagatagtaggtactctatgcattttctgtgaatattaaggagtggcccctcacccctctccactaccactgcaaggacagacccagaggaagacaggagccctggaaacatccattagtgggactaaggggaggagcagagggggaaagtgcccagtactcctgccttccagcagagccagcccccagctccccacgccctcctaggagacacctccccaaggtaccctccccaccaaagactgggaggtcaggtgtcaggctaggctctcaggaaggaattcccctcccttcaagcctccagtccaaattcctctcaagggagagccaatgaaaggcaggactcagacaggagagaaagacaccaagcatggggctcctgaaggtcccctcccctctgatgcttgcctgggtgccctgctcagacacaccatcaattccccctcttcccactgtgttccctaccatgggttggaagttatcttaccacagagtggttaagccctggcctttgtagcccaacatctggattcaaatcctagctccttcacatatgagctgtgtggccaagggccagttactccacttctctgaactccctatccccttggtcattaggcctacagactcagaatccaggcctcctggttgtttctgggctctgactctcgaaaaagactatctgggttcaaatcccagctctaatctgtgcttaacctctctgccgcaggatctttatctgtaaggtggggacaataatagtacctacccaccatctagccttattgtgagaattagctgagggagtttatgcaatgtgctcagatcagacttggcacacaattagcacccactaagtattggctatcattagcaatagctgataagcttggaacgtaccttgcaccgcaccttgcaccgcaccttgcaccttgcaccgtccctggcaggtagtaagagctcactaaatagaagctatgattaccttcacccccactagactatcctggccctggaggtgggttctgggtcatatccatctttgattccccagcagccagcatggggcctggcaccaagctcaatgaagacctgccaggaggaccagaagatccagggtgtggggtggcacgagcctcccaccagggagaagaggaaccgaggtgtcggggaagagaaaacagagcagagggagaaaagccaaggcagagagataagcaagtgaagtgagtgagaaaaggaacaggagaggctgtggcggagagagataaggaggaaggatggagaaggcgagggtcgaggaaaatgcccagggaggcagggagccctggggagaaacgctgggcgaggccagggctgcggcaggggagccgagccgggagaggggcgcaagacctggcgctgggcgggacgctcgggcagggtgcgggaggggctgagggccgcccccactgcctccccgccttggagctggggccaggcggccggagattggctggggcgcacggcgaggcccgggctggagccccgaggtgggaggcgccaggatcagtcggggcgcccgcagcgcaggctgccacccacctgggcgacctccgcggcggcggcggcggcggctgggtagagtcagggccgggggcgcacgccggaacacctgggccgccgggcaccgagcgtcggggggctgcgcggcgcgcacctggagagggcgcagccatgcgggcggcggcggcg

SEQ ID NO: 5738 - DNA, 2300 bp, Homo sapien
gatggcatagtttattgtactattctttcaacattttggtatgtttaaaaatgtcaaaataaaaggttggagaaaaaacaaaaggtcctagaaacagtctagtgaaatccaacactcacattttacagaaagagaaccataagctcagaaaacaagacagttgctcgaggttatacagctggaaaagcctgggccaggtctcttggccgccaggttctccctgtgtgtgggcttcagactctcaggcagcagtgagctgcagaggagcacaccccaccacccctcaaagagaccaaggggtattatgggtatgtaaaaaggcacttgtgttggtgtttccttttttttatgtctattttatttatttatttatttatttattttttgagacagagtttcgctcttgtcgcccaggctggagtgcaatggtgtgatctcagttcactgtaacctttgcctcccgggttcaagcaattctcctgcttcagcctcctgagtacctgggactacaggcgggtgccaccatgcctggctaatttttttttgtatttttggtggagatggggtttcagcatgttggccaggctggtcttgaacttctgccctcaggtgatccacccgtctcggcctcccaaagtgctgggattacaggtatgagccactgcttccggccttatttttatttttttaagagacaggctcttgctctattgcccaggctggagtacagtggcacaatcatggctagctgcagccttgaactcttggattcaagtgattctcctgccttagccttctgagtagctgggaccacaggcacacatcacaacgcccggctaatgttttcattttttgtgcagacagggtcttgcccaggctggtcttgaactcctgggctcaagcaatcctcccacctcagcctcccaaagtgttgggattacaggtgtgagccactgcacctggtctcctttttattaaacaaatagatcatttagttggaatttatgatgtcaaaagtgcgaaggtggcaccagagccagacctgccatccttggagagtgagcataccggtttggcaccatctgcttgtggtttttgagtggtggtggtagtggtggtgcgtgtatgtaaactcgggttgcagaggagagagggaagagtaaagggtggggaccaggtccaggaagagcagcaaggagagactggcttcaattctggagctgcctgaaagaagggaccccaggctatggctgagaacgaaatgtgggcacgtatttaaagaaaggaaatgattctctgcggtcggcaggatctttgtctagctagtggggttccaggaagtgcaaaggagaggggaaaagaggggccgtccgtgcaagcctgactgtgtgtatatggggggggggcacacagagaggaaaagggagagaaagaaaagaaattattctaaagaggaagctgggggcggggcgagggaggggtagagccggggcactgggggtggctggaaaggtagagaggcctcacctgcgggcctgcgagcggctcgggagcggtcagccttgcaggctgaagcgtcttgccccggaaaaattcctgccccactgtccttcaggctggatgtcccgggggccacggaagcgagcgcagagctccggggctctcacgagggggagggcaggaaggggaggcggggcctcgcgcggggcggtagccgagcctgtggcccgggcggggctcctctccggcggcgccggagtctgggggccgcggcttccccctcccggccagcggcggctcctggcccctcctcccccggccgcccccatccccgccgccgccgccgccaaagctaaacccggccgttgcctgcaggagccgcggcagcgggcgatcgggccgtgaggagcctcgggcgcggcctcgcctcccgggcccggcgcctgcctcagcacagcggacagcgccgcgccccttgcctggacccagccgcccgcccgcccccggcccacctgagcccgggcccgcggcgcccgcatcagcactgcggacagcgccccgggccccagctcgccgccaccgccgccgcccacctgctcccggggtcagcaccgcggagacccccctcgcccggccccgcgacagcctccgagcgcccccggatcatggccaccgaggtaggggcgagcgccccacccgcaggcagtgcccgattgccgcgggaccaaatgccctaggggtgggctgggcaggagtgggaggcgggagttgggggtgggatggggtgattccccaggtca

SEQ ID NO: 5739 - DNA, 2300 bp, Homo sapien
acaaatacagccatcttacaaggtgcagtagtgatggaaaagcagaagaccccaaggcttgcaagactcgtgttcagccctcacaggcacttcctgtccccaagcactggagccagctgctgacagtgctggaacccaagtacctgtctctcctgcctagacacgtctccataggtcatgccacgccctggacatgcagccctcagacactcttcatcaaggtgtctaaggcatgaccttccatcaccgggcgctgactcagcccccagggagctccatctctcctttcacaccctatgggtgcccgaaggtgcccagccagctgctcagcatcccccaaacctcactggcttctgcatcttgggatgatgcagcgggccagactggatttgtttcaggaaagaaagacgtgatttctctcaaagaccttagaaagctcttcctgccctccctgggtgttaccagctgggaaccctctggaggcagtatctgcatttccctcgggatgtgcacattcaggctgaaacacaggaagaggtgggggaccctgtggatggggtctgttccattctttgggagaacctggcaagctggtgctcccagtgggcaggaagaggcctcagacattcatttctgtgctgcctggggtgtgaccttgggcacaccgacttcctgcagggcccttgttttctccatatgggagggtgatgtgaagaaacagaccatgggacacctgagcttttatgattcagacatgagctctgagctttcattcattcaatcagctagcaaatatttattgagcacctattgtatactaggcatggttctaggcactggggaacaaaacagacaagaagttctgccttcatgaggcagacattctagtgggaccagacagagaaggaagaggtaaatgagaatatggaattgtcagctgttggtcagagctgtgggaagagagcattagtgagagatagagaacagggtggtggtgcagtggcgggggtggttgctaattttgggagcatgggcaggcaagccctcactgagaaggaacaggggagcaaaggtttaaaggagatgaaggagggagccagcggtgtggatgtctggaggaacagcatcctgggcagagaacagcaagtgcaaagtccctgaggcaagaaagtgcctggggcttcagtgcagcgaggagggagttgcaggcgcaggagagtgagacagagtagagataagtagtgatgccttttaaccttttctcttgatttcttagaaaaagatccagcaggtctgtctaataactttagacgtgttcatgttctcccatctgagatgcaaacttcatccttttgtttaaatgcagggactttgtcgagagagttgttcaaacctcaacaacaaagcctcctgctcctccagggctcattcacacagggactcaggactcgggatagtagaaagcaccttggttcaactcccagcacctgacacttcctaggccgtgttaccttggaaagggcattcagcctctctgagcctcagtttccctgataaacctcatcagttgcctcatccataaaatgggttactaatacatgcctacctctcttgattgttaaatttaaattaatgagatcataaatgtgaaagtgccttttgcattgaaatgggcaagatgagcatcaggaagttctttgttttcttcagtgaagcctgtgggaacgggctgtccatggctcccactcccctctgccaccctgctgcttatatggtgtcccacatggcccctgctgactctcactgcgcccgggcgcaaaatctgattcagggacactcatccaacactcagggttccatgaggcaaggctggccgtgttccctgggaacactccaggtctgacttgccccatggcgtgtccgggaggactcccagcccgttgctctggttggatgggactgggtgggcccagcggctcctccccagcatcccctccccattcctcctccaggtacaatggacccaacctggttctgaagtatgaccgggcccagaagcggctggtgaacatcgcggtcgatgagcgcagctcaccctactacgcgctgcgggaccggcaggggaacgccatcggggtcacagcctgcgacatcgacggggacggccgggaggagatctacttcctcaacaccaataatgccttctcgggtaagggctggggctcaggcctcttcctgcttcccatcttctccctcccagtagcaacttggggagggccatgggaaccctggcccttcct

SEQ ID NO: 5740 - DNA, 2300 bp, Homo sapien
aataggcaaatactctttggaaactctccaatccatctataatctgaatctgggaggtctcaccagcagtggtgtgactgcaagcagagagaccccacgccaacattccttggcgctccagacctgggttccaagaccacagtgagggactcggcacttctgactcctaaatgcacagactgaaacctggacttgcatggcttttgcttaaaacaccacttggaataatgagacgagattgtagaggcagggaaagaataattaggaatttctatgacctgtgtatgtccatgacaagaactgtattttctcctcacctcctcactctgaaaaacagattcaaaatagaatctccccaactgtatgggatgtattaatttaccaaagcctggtcagtcaataactatgagtgcctactgtatagagaaagtatgtccatctttatagtgaagaggaagcaggccgctggagtggaaacagctctgaatcgagcagtgggaatcctagggcctagttccatgtcttccaccaaatagccatgtgaccttggctttatccagcttcagttttctcatctgtaaattaaatgtgcatgtgagtgttgggatggaatggggttggatgagatgctctccaaggctccttgcttctggctctaatgttctggaactccatgaacccttaaagagttcaaagaacacagcggcaccaagcacaaaggaatgatccccgagagagggtggggctgtgtaccagctctgtctccttggaatgttgtgcttgcacctgccccatagcacccgaggtcacaggaccacctgaagcccaggaagcatgtggtagaaggattccaagtacgatggtggtggttgaaggctgtagcctgagctgccttaaagcattaagttgctacagccagtaaagggcaagaagtgagaaagtcagtggtcctgagccaggtacctttggcgccccctactggacaccaaggagtctgctccacctttaggcttccaccgcctcagcacggaagcaagggagcgcttgagcatgagaggctgtcacaagctgtttagtaggactgccttcccggttggtggtattctttctatagaagtctattgcactccctagaattacacaggccattggtccacagatttacaggggcacccctgcgcagccataggacgtcttaaccaaacatcaaggtaccaaggaataaacaccagggttcagaacaccaggtgcagcccagatggagaagggaagaaagagcaacaagcaggtatttcgctgcacaaatccccagtggagagaaggtcttgggaaatgcagcagaaaaatgttgactgcagcagacaacgatggagctgggggttgggatatagattgatagcacccataaaatatctccaggctgaagcaggtaccctaggagtttgaacatccacctacattcagggatgggataaggtggaggattcaggctcaaatgagcagccacagagcaggttccccagactccctacacaccgtttcgaccttttccagagtccattagtacccaccggaaatggaaatgttctaattgtggtcctctgtgccatcatcaagaccctcaactcccttcattacctcttaaattgactttaggacctactgccagaaggatgttcttaaccaagtcagagagagagagagaacattttctcaagaaccatgctggaacagccaccatgttcccacttttccagcctccacctctcccccatggctgagggtgaggtactctgtgactctcaatgagctctaattcagtcttggacatctccagccccaagtcgtctgggttccaaatctccgtcaatcgcttatctcttcccacatgagttctcccctgactcaagaaaacactatagaactgtcccctgtcctgggaccctcttcccttcttttccacttggcttcacgtggaaagtcctgcacccatcccagaagacacctcaagtgcaactcaagaatgtgtcctgtcaggagaacggaagcatctcctgggatgtgcagaagccacactgggtgcacccaccagcagcagcagcggcggcggcggcggcggcggcggcggcggcggcggcagcagcagcaatattcattagtcattcctggaggaagcccccccagctctcaaccctaggagaatttccccgccactctgggaggcttccatccaggctgggatgactttggattcttgagttgctttctgcagaagcgggactaaccagggctcccaacta

SEQ ID NO: 5741 - DNA, 2300 bp, Homo sapien
ggctgctgtgcacagcttcaccggagaagagagaggtgagaacaaaaaccaagaaaggtgtgctcagatgtttgggattgagtgaaactggttaattaccagtcacttgctgtctccctgagttggagtttctggctaaggaatgctcatagatcagacataatatgacaacctgcaacttatttccacattaagagggtggcggggaccaagatgcagagaaagtgtggagacagtctctcaggtgccagagccttggccagatgactcagatgccctcagaacaaggtggtggcatgttccagcagggtgcagagccaactggactccttatgcagagagctggggatcagatatggccttgggggcagagtctatttgccgatagatgaaggttcttaatcagggccctagattaagttttaatgatccacgaaccctcctaaagttgcatgtcaacatgtgtgtatgtgagtgagcatttttataagcaacagatccataacatttatgagattcttgaaaggttctaaagggtctgtgatccccaaaaggagggtgattataaactactgtcctagacccctgaagaaacaggttgacattggaccgagccccaagagactcagggttcctaatgatcctgaaagtatactcaaggtgtgtgtgtgtgtgtgtgtgtgtgtgtgtgtgtgtgtgtgtgtaaatgtgtgtgtttgtatatttttctagaaaaatgattcagtaatttttgccagattttcaaaggggcccacaaccttacaggcttgatgggggctcaaaaagccagaaagtttgtctgtgcctagctatttcttttcagaggaagatcacagagacctgaaaacagagcccagactaggtcctggtagttctgctcaaaatctgtggataacaggggccagaggctggatgtgtggccctctataaaagaacacattcaaatcattctaagagtcaagggcccagaagccagactagtgggtgatggtcacaaaagcgtcaacggatgggaaaacagtcctagctccttccctctccgatggtggattcccaagtctttctcttctgtggcccctttacctggctttcagaaacccaaagacctcactcatggaagctcagaattcattcaataaacactgagcgcctactatgtgccaggctctattctaggcgtaaaataaaggatttgccttcagagtgtgacccaccaaggccagtttcctgcctgaacaggggtattttgagcattgctgatcaagtgtgtttttctggcgcttagcacccccattcccctggtccagagaggcagaaaccatccccccaccaccaccaaggcagcgggttgggggcgaggagaggcgggcagtacctgtgatcaaagcggtgagggaggctagtaggacgcaggcggcaggagcgggtgggccaggcccgactcggccactgctggggtagggactaggtgggatggggtgggggcactgctggtggggacggggtggggtagaagcggcgctgcccgcagccgcctgggcctctgcgcgcctgatctccgagctgcgctcgcccgctccccgcctgcgggggccgtcgcggagccctgctctccatactgagcagtccccgggaggtgctcggacacgtccccaggctggataaagatcggctcggctctagctccgtagtcgaaatctcgccatcagcgcggctcgctcggccgctttggcccggcccggcgacgccagatcgctatcctggggggaaatgggaaggcagtgcagccgctcccgcctccaccctcggtcctgcgcgcaggggtggccgcggggtcctggggctcgccgccctcccctcccccttcgcgttccttccctgcgctgcctcccgagggaccctcgcttccctccggcctggggcccccagcgcccagccaggcgccctctcccctcctcgccaggcctcgctgccgcctgaaggttacgcgacgcagtggcggggcgcggggggcgcccgccctcgccgccgccttcgccgccgcccaccccagtggccgccgcgccgcgccgggccagcctggctgccggctgctgccaccgcaatcccggctcctaaatcagcgcggggaggcgctccctccccacgcccggctctccgggctctcggggccgcgattggccgcgccggcgccccccaccccgggcccccggctccagctgccgcgccattggctgcgggcctccgccagcctttacataagaccgggcgcgctcgag

SEQ ID NO: 5742 - DNA, 2300 bp, Homo sapien
ggctcaagtaatcctcccacctcagcctccccagttgctgggattacaggcatgagccaccacagtgggcctcctcgggaattttttaaaaaatgcccatgtccacctaccctacagtaagatttcctataaatcttctttcactgaacctcccaaccacaatactggattctgattgcctggtgagtttttcctgcccactgcacagacaaaaccaattcactgagaccatggcagagcagtaaagaatttaattgatgacagagttatcttaaatcaaactccctgaaggttcagaggttagggtttttatggacattttggtgggcagggggctagggaatgggtgctgctgatgggttgggaatgaaatcataggggtgtggaaaacagtcctcatgctctgagtccacctctgggtggggccacaggagcagctgagtcatgagttaggagtcctgaagaaggaacagattcaaggagtacttgggagatagtgagagaagaaagagaccctctcatattgttttatattgttttatactcagtacctgttttaagaaaaaaaacaaggaagtgaaaccaaaggcaggcagcccagcaccaggcaccagacccaaaaccagacctgaaaccaggcctgggcctgcctggcctaaacctagtagttaaaaatcaactcatgacttagcatagattccaggcattgtatggaagaacattgtactctgttctgtttcactctgactaccactgcatgaagcccctgtcacatacaccccagattgctcaatcaatcacgaccctttcatgtgaaatctttagtgtggtgagcccttaaaagggacagaaattgtgcactcggggagcttggattttaggacagtagcttgccgatgctcccagctgaataaagcccttcgttctacaacttggtgtctgagaggttttgtctgcggctcgtcctgctacaatagaatctccaagatttggtgaccatttgaatattggaggaagaggaagtgagaaaggaggaatcaggttaaagagtgaatattaatgagtagggaggaggggtagtagtttacttttctttttttgggggacggagtctccctgtgttgcccaggctggagtgcagtggtgcaattttggcttactgcaacctccgcctcccgggttcaagcgattctccttcaagcaattctcctgcctcggcctcctgggtagctgggattacaggtgcccaccaccacgcacagctaatttctgtacttttagtagagacagggtttcaccatgttggtcaggctggtctcgaactcctgaccgcaggtgatccacctgccttggcctcccaaagtgctgggattacaggcatgagccactgttcctggccccagtagttcacttttcaaggacactggagatgcctgtgggcatggatgaggagaggtcttgtctaggaagttgggaatacaaacaatgagctcaggtgagaagggactggagtgtcccctctcccaccccaattttaagaactctggaaaacaccaatattttagaggtaagttagaggaaacaaagtagaatgaattcagagaaggaaaacctggatagtgtcatagaaaataagtgataatgcccaatagcgtcaaatgactaaagcttgagttagatgagtccggaaatacctccaatgagtttggcaacaaggacacttatgacaacaaggcattttccatgggggcggaagctgcgatgaggagtgaacacagatgagcaagtagagacagtgtagattatctttttcaaaaaacttggctgtgaacggaggaagtgagatggtataattgagtggaatgtaaggagatttgcgcacgtatatagccgagaggaatgaggaagggttgaagggacaggagcagaaatgctctccggcactcgccattttgccagcttctcccctacgtgacctgaactcagtgggcgcggccgggcctcgcggaaactacaacccccagaaggccccacggcgttgggggcggagccgaggcctgacgcgcgccccagcggcgcgagcggaagagatagagcttcgcggagacggcggaagcggagagcaacagcgcgccggtaacaaccagccccgtatcccctccctctgtacctcaagctaggatttttaatccccacttctcccttcacagcccgggacaagacttccattccgtcgtttgttgctggtattttttttcctcatgtgacgcgaggggccgccccctgcctggggcggaggt

SEQ ID NO: 5743 - DNA, 2300 bp, Homo sapien
ctttgtcctggacaaacttatccctacttcatagcattattttgaaaattaaaagaataattcaatatgaaattccctagcacattttcttgtattttagtagatagtagataaagatttttttaacttttgttatatttcttcttgttaaattccattgagcaaccatggtggaggttgtcagggagttactagagtgaattgtctcatcacagtttccttggtcttctatcctccttcatcctagccagatctgttttattactgctggaagcaagggaaattgatagcaagtcacttgactaaatggtattaatagaataatacttttctctttttcactactttctcttttctaagatatcttagatcaaaagcagcatcttctagaaagcattctctgataagtcatttcattttctagccaacattcaagttactctcagaaatcactttatgtgtatgtatatttatgttgaacaacaacaacaaaaaaattaaagaaaaaaaaaaaggccgggcacagtggttcatgcctgtcatcccagcactttgggagacaaaggtgggtagattgccttaagctcagcctgggcttgagaccagcctaggcaacatgatgaaacccggtctctaccagaaatacaaaaacaaacaaacaaaaccacaaagccaggcatggtggcatgtgtctggtcctagctactcaggaggcagaggtggaaggatcgcttgagcctggaagggcagaggttacagtgagctgagatcgctccactgtactctagcctgggtgacagtgtgagactctgtcccaaaaagaaaaaagaaaatattttggttcaatacattgtaattagtgtctaataattaaatcattcttctcttgcagattgtggtggtgccatgcagcaagaatcagagagatgcagagttagagccagaaggcctgacatggcactttatgtacctaaagctcgtaggggtgcagtactccttaagacaggtgatgaagaagaaagctgtggttcacctaactctgtggtgaaagaaaagcaaaaagaaagttctctctcccaaaaagaagtctttaaagacaaaccggaggctcgaagactaaatatcaatcctgatagaaaggagcataattgtagagaagaaaagaaatcttcaacaaaattaagaatggacacatgccttcaaaaaacaaatagagtttgttctaagagaggaaccactgaatccaaagaagtattatcccaaggacaacagcagggagccccaaatgctggggttataactaatgcacctttgcagagacattttaaaccaaagaaggtggagtgtttggaagttgaaactacggatgtgacaggacatgagaggatacttctttcacaggcctgtttagaaatcagcgaggctcaagttccaagcaaaccattccaaaatgtggaattctgtgacttcagtaggcatgaacctgatggggaagcatttgaagacaaagatttggaaggcagaattgaaactgataccaaggttttggagatactatatgagtttcctagagtttttagttctgtcatgaaacctgagaatatgattgtaccaataaaactaagctctgattctgaaattgtacaacaaagcatgcaaacatcagatggaatattgaatcccagcagcggaggcatcaccactacttctgttcctggaagtccagatggtgtctttgatcaaacttgcgtagattttgaagttgagagtgtaggtggtatagccaatagtacaggtttcatcttagatcaaaaagatacagattccattcctgcaactatgggtcacatctctctgtcagagagcacaaatgacactgttagtccagtaatgattagagaatgtgagaagaatgacagcactgctgatgagttacatgtaaagcacgaacctcctgatacagctgtccttgctcatgaaacacatagagatagtggatttaagaatgtaggtgacattaccaataaagcatgtatgatggacactacaggtatgtcctgtagtgatcatgtaactgttgatagcccttatgtagttgcagttagaatagctgatgagacctctattaatacacgaagtttctcaaagtttgtaggaatgagtgcagatgcaacccctcttcatgtagctagaagtgggaatgacactgaagatttcagcaacccttctgcttgctcagatatttatggtgagagtatttcatctcattttacagagtcaacaggaaagttgatagagag

SEQ ID NO: 5744 - DNA, 2300 bp, Homo sapien
gtgatttttgcacattgattttgtatcctgagatttgctgaagttgcctgtcaacttaaggagattttgggctgagacagtggggttttctagatatacaatcatgtcatctgcaaacagggacaatttgacttcctcttttcctaattgattaccctttatttctttctcctgcctgattgccctagccagaacttccaacactatgttgaatgggagtggtgagagagggcatccctgtcttgtgccagttttcaaagggaatgcttccagtttttgcccattcagtatgatattggctgtgggtttgtcataaatggctcttattattttgagatacgtcccatcaatacctaatttattgagagtttttagcatgaagggttgttgaattttgtcaaagaccttttctgcatctattgagataatcatgtagtttttgttgttggttctgtttatatgctggattacatttattgatttgcgtatgttgaatcagccttgcatcccagggatgaagccaacttgatcatggtggataagctttttgatgtgctgctgcattcggtttgccagtattttattgaggatttttgcatcaatgttcatcagggatattggtctgaaattctctttttttgttgtgtctctgccaggctttggtatcaggatgatgctggcctcataaaatgagttatggaggattccctctttttctattgattggaatagtttcagaaggaatggtatcagctcctccttgtacctctggtagaattcagctgtgaatccgtctggtcctggactttttttggttggtaagctattaattattgcctcaatttcagatcctgttattggtctattcagagattcaacttcttcctggtttagtcttgggagagtgtatgtgtcgaggaatttatccatttcttctagattttccagtttatttgcgtagaggtgtttatagtattctctgatggtagtttgtatttctgtgggatcggtggtgatatcccctttatcattttttttgcgtctatttgattcttctctcttctttgttaatcttgctagtggtctatcaattttgttgatcttttcagaaaaccagctcctggattcattgatttttttgaagggttttttgtgtctctgtctccttcagttctgctctgatcttagttatttcttgccttctgctagcttttgaatgtgtttgttcttgcttctctagttcttttaattgtgatgttagggtgtcaattttagatctttcctgctttctcttatgggcatttagtgctataaatttccctctacgcaaacagtgtctaggttttataacaggtgaatgacagaatgactgtcatggctttgctgccgctttccactttcccgttttgtttcttttgcttccagtgtgaagttcagctttttttataggacggtagaattttaatttgttacctcttttattaattccttcactagcctgctatatgcacattccttaaggtaggtctcatgctaaggacattaagtataactacttgtaccacttaatttgtcttaacaaatgcctttgtaagctgtctcctcaccctttaatacattcaacaaaaagtgaagtaaaaaagtttttttgaattttatttaaaaactttttttcatttttgttcacttccagaaaagaaactatgagcctggtcagtaagctcaattaaaacaaatattattaattaatctcttcagctattatctaagcttcattttccaagatgtgccatttataactcacaacagtattcagtctgtgttttctcgtgtgctggttagagatgcaagttgagtttcatgcattgcctgtctgctggaatttcaacactttttcaacagttccatatgtatagtataaactgggcgataagcacctgatcattattgtatctgtgagtagaattaatacagagactatgccaaaggttgaggaatgggaacatgtagagaaagggaggaggattgtttatatataggaatatattttacaataaccaggtttaatgtaaccggcacttaacgtgcttcttcctttctagttatcagggaataccaagagcagagagagcatccaggaacctagatctgattactacaatcatgaagttcctgatattgacctcagtgattgtgaattcccacatgtcattgaaatttatgactttccccaagaatttcatactgaagaccttctacgggttttctgcagttatcagtgagtatgcaaatgattgtgg

SEQ ID NO: 5745 - DNA, 2300 bp, Homo sapien
tattttttgaaaacctaaatgatcttttgcctccttgactgaaatttgtcaatagttcccagaagcccacgggataaaatccattatcttagaactatcacaaccctccctgcaaaaagctctagtacttagtaagtttgaagtatacagccccattttacaaaacagaaaactcaggtcgtgatttcctcactgtcctccagctagaaagtggtgggactggattcgggtgacgccttccaaagcccagtcctgtgctctttctctactcctcccatgtttgactttggctcctccttcaaacctcagatcaaatactacttctgtgaagcttgtgctagcccccaacaggttgctttctgtctgtgcttgctcagcattcagtccacacattagtagtattggggctatttgcatgtgtgcataccctatctgacacttacattcccagtttctggggcacagcgttcaacacaatagtgagccttagtaaatgtttgttgactaaatgaacaactctgccccatcccaccgcacatatgcaagtatgagtgaatgcatatcccatagcaaatatgggcatttttaacccttgaagatagagggagtctttactgacagaacagcccctcttctctgcccccactggatcatgatgcttcctttgactgatgctaccaatcctgtaagtggctctgttttccatggtccccttcttgcaagcagtgatcacagctggagacagcaacacagagcaagaggactacttttgcctgtgaggaccctaaccctaacttctatatgaaagagaaaggaaaaataatggacttgaaaatcctgacatggcttgaggtgacaggaaagattctagaacagattggaaactgagtttacaatcaaacagccttaagtgcaaacagggatgtagaagatgtagttattgggtgaagccgatggtctgaccagttctagaagtctgccttgtaagatgtcaaaggaaatgcatctctgttccatccatagccttttgcacaccacacacatacaagtcacacgctggagtgtgggagcagagggtacatttacagtgttccagctccctgagcctatagatggctgattccacagtggctcggagttacctgtgtggcagttgtgcagccagacccggtgcccatcatacttgcagcggcactgcagcatattgttggagaaatctgactctgccacttcatagtgggggttcacaatcacctagagtgaaagaggggacaactgaaaatgggtgatttggtttctgaatgagttgactgtggctgtgataatccttacatgtgtttctatttgcttcattaattcttaacaattacccaggaggtaggtactgatgttcccattttacagatagggactgagaagtcccaactgagaaactgatttatccagtgttcactgaatcaatactcaaacacaggttcattggacccagcttgactgttacttccctaacaggacagctcctttaagtgacaggcctgtcggaaaccctgtatgggaaattcttcccttcatttgccctcagggaaagttgtggaacatctggaggaaatcaggctctgtggggaatcccccagccgccttacctggaagatataattcccggggcccacatctgtgatatccacccactggcaatcaatgtcatgccggtaggtgtcccagcagcctacagtcactccctgttctccaaagttggcacatgcgtagcgccgctgcagtcctgtaaggaaggggacagacaggttttgaggcaggacgaagcactctgctaggtcttttatttcctttaccagttcagtgtcatcatgcccagttcacagattaaggaccgtcagagctagaatcctgctgtgaatccagcaccatagcaaaccacattgtgacaaagataggatttgtttgactgctccagtgcaaatccctgttgaactaggaactgtggttgggagattccaacgctcccgtgctaatttacttgtgcatccgcctatccatccttccaaacctctaaagattcagtgtttaccatgcagttcctaagggttagggactgtgggtgtgcagacaggaagcaggcaatgcttgccctcggagagctcagcagagataggacaggtctgcaactcttctccaagatggaaagtgctgagtgttttaaaagaagaacaatgcgtggggaattcagaggaagtaaaaacctcctgcgtaagatttcagaaggtaagaaattgccttgaatg

SEQ ID NO: 5746 - DNA, 2300 bp, Homo sapien
cccatccacctgagtgaggtgcgctgcaggggatatgagcggaccctcagcgactgccctgccctggaagggtcccagaatggttgccaacatgagaatgatgctgctgtcaggtgcaatgtccctaacatgggctttcagaatcaggtgagtttgggtctgagcatggcctcaggctgggggccgggaaaccctggggagtccccaggacaccacatcgagctagcggggagaggtccaggaggagcggctagcgcttctgctttgggcaccagtctgccttcccttagagccgacctggctgcagcccctccgaaatgtcagaggccacaggggctctgcagatggatgtgctctcccatacccgtctcgggtcccctgtgaagctgagaaagaaggtgcctgggaaagagggccacagggctgtcggcacgagggagtctgtgtgggatgctcagggcaaagtgtcagtgctaacatggactgtgagcaagtcactggtgccactgtaaaatggggttcacgctctcagggggtcactgtgaatgaggcaagggacatgaaagccctttgcaaattgccagttgtcgttaatggtggagggcaagtgccagagcaggaggagcccctggtccaggcactttgagtcagatttctctagcaggcagggacattagagactacctgctacactgtcctcaccttacagagaaggagaccaaggcagagaaggggactgtcttgtctagggtgacacagtgagctggcttgggcagacctccaggctcgcagccctgagctcttccctgcaaggctaccccactcctcacacacccctcgccattgcaggtgcgcttggctggtgggcgtatccctgaggaggggctattggaggtgcaggtggaggtgaacggggtcccacgctgggggagcgtgtgcagtgaaaactgggggctcaccgaagccatggtggcctgccgacagctcggcctgggttttgccatccatgcctacaaggtaggtccctctgttgtttcttccgtatgacctctcaccctcctgttctgaggcccaaaacttcctgtgctaaagctgctgcctctttgcccatttggcaattcattactgagtgaaactatgagccgacatgatgctgagtgctgggaacagtgtggtaaacaagaagacatagtcctaatgaaatcgtcaatgagggacacatttgcatctgcaggaaagatgaatagaaattagtcagacaaggtggaggaggaatgaatagcttatgcaaaagccctgtggccagagaaagcttgattcagctgaggaaatcagggccagggattgtagtgtggctctctctcgagagtgctgtcaaacatgagggcagaggaggcaggggcaagatcactcaaagcttgcaatccacatgtttgaaagatttcttcctttgctgtttggaaaacgttgggtggagattaacatgaatgcaaggaaacacactcaggaggctattgtagtagcccaggtgagaaatgaggctggactggaccaggtagtccaggagaaataagtggatagatctaaaatacatcaaaaaataaaatcaagaggacttaggcatgaccgcaacagagaaacctctgcacttgcacccacactggctgccgcacagtgtggactgggcaaccctgagcacaactgacgatctgggccgcttgaggagcagctggggaaatgtgagcacagcccccagggagaggggcggggaacaggaccctcctctgccatctggaagagagaggggtgtagggccagtagtggaagccacggtgggtggatttttacctccatatgtggtggggatttctaacatcagaagggtccaaatgtgtcatggactgccccagggaattcgggttctcatcactgaagattttcaggcccaggctggacacaacccggtgggggtggtatgactgaggccacacctcagatgggagtcaggaggtgactccaaaggcacgctgactgggtgacgctggctgtcttcttaggaaacctggttctggtcggggacgccaagggcccaggaggtggtgatgagtggggtgcgctgctcaggcacagagctggccctgcagcagtgccagaggcacgggccggtgcactgctcccacggtggcgggcgcttcctggctggagtctcctgcatggacagtgagtgacggagggctcacagggctggggacaggtaggcctgtgctccccttcagggagggccctgcatgctggtccca

SEQ ID NO: 5747 - DNA, 2300 bp, Homo sapien
cccctgcctggtaattgcacacctgggtctcgctgacttgcctgccacccatgaggagggcaggcctgatggtagcctgggtgtctctgggcgggccgcccccaccagcaaggccttcacctcccacctgtccccagagggccccttctcttgggccctccctaaatgctccccttcctctggacttcggagagggcaagcctgatccacctgcccccactctaggactggccgagggaccttgcttgccttccttgtaaaatggttatttgtgaggtggccaccccgtcagggctgctgtgaagctcagcattgaaatcagattagtgaataagtttacaaaatgtaaagtcctgtgcaaacttaaggacaactatgaggaaccaggtggcagggggtgggacttccacaccccttccacctcctatctgttttctcccataacaggaaagtctgggatctgaagatgagggaccctaagtctaggtgaggagcagcaccctagagggaggaggcaaaggggtgtggcatgaagggcctctatcccatcccctaccctccccttccctcctttctaccttggcctcccttagtcctgaagctcttccctcagcccttcctccaccctcagtctcccttgtcctctaggctgaagagcctgacgaataagaactccttctggatccaccaggtcacctgcctggggacagagccccacatggccaactgccaggtgcaggtggctccagcccggggcaagctgcggccagcctgcccaggtggcatgcacgctgtggtcagctgtgtggcagggcctcacttccgcccaccgaagacaaagccacaacgcaaagggtcctgggcagaggtgagccctgggcatcctgcactcacaccacagcttggaggcacgggcgggacactgcctggtggggggtgcggggaggtccaggacacgcaggagagaggaaccagactgggaggaggagagtgaatcacagaactgtagaaccttggaatgtatttaaaagggatcatttatagccctaccataaatggaaagctgacatcacccgccttgaatagaaggtgaccgtaaaaacagtaattaaatcctaactacattccactgagggctggtactgatcctgagcctgctcctgagcctgctcctttgttttaaagaggagatgagcaagtgcttatgaggtggtagagacgcctcagtgccaaactgagatgccctcatgaggtggtacagatgccgtgaggtggtacagatgcctcagcgccacactgagatggcctcgtgaggtggtacagacaccttagtgccacactgagatggcctcgtgaggtggtacagataccttagtgccacactgagatagcctcgtgaggtggtacagacaccttagtgccacactgagatggccttgtgaggtggtacagatgccttagcgccacacttgagacggcatccttgatgaggctgtgggggtgattggtcattgaagaaatggagatcaagaaaaacagcttattcagggtgacagctatgggaagtcagaagcaggactggaactccccatccttggctctggccaccgccatggaacttgaaggagccccgttggggatcccgctgtgggggctcagcccctgctggtgcctcctcctcagccgtccctgaagcaggtttctcccagcaggagccgagggtgcgcctgcgctccggggcccaggtgggcgagggccgggtggaagtgctcatgaaccgccagtggggcacggtctgtgaccacaggtggaacctcatctctgccagtgtcgtgtgtcgtcagctgggctttggctctgctcgggaggccctctttggggcccggctgggccaaggtgagtgagacagcctgggaggggttagaaggcctggatatgccactggtccatgtcttgaaggccctggggtgacagggccaggacagaaagttatccccctctgtgaaggggaagccacaagtgtggggttacggagatggagcctcgcacacagcacctctctccccatctagggctagggcccatccacctgagtgaggtgcgctgcaggggatatgagcggaccctcagcgactgccctgccctggaagggtcccagaatggttgccaacatgagaatgatgctgctgtcaggtgcaatgtccctaacatgggctttcagaatcaggtgagtttgggtctgagcatggcctcaggctgggggccgggaaaccctggggagtccccaggacaccacatcg

SEQ ID NO: 5748 - DNA, 2300 bp, Homo sapien
gtatcaccttggggaccagaaactggcacgcaccgctaggtccatttattcaatccgtgagcacttctggagcacttgctatgtgtcaagctctgtgacaggatctgggtttagagataaataagaagctcgggggtgggtgggggtgtccagagttaaggcagacacagaccattatataaagagtatggagagggtcacaggcgctgggctgaggccgggtgaacatagccaggcaggagggaagaagagggctttctcaatcaaatgaaagctgattgagatgaatccagtggtcccatctgacccctacagcaatcacatttaaggatgaggagatgacaactcagccgagaaaatcccactgttagtacgccatgggctggggctgggaccagagcccctcacttctcagggttgggggctcacagcgcatgccttagagatccccacttccactgcttcccagccttggcctctgcccagagttgtgcaaattaaaggacttccgggcaacatccattcattccctggtctctatcctccgcccgcccctgcgctccagggtatttttagttctgggcagccaggcctggtgagtgattggcagcaggcagagcccacgtttccgaaccctctgtgttgcttctggctcagcatgagaggtggctgggccctaggagagggcttaggcatacctggcacccaagcccacagctgcctcattgtccctgggggaggagctgggctgctgccactgacccgaggctgggagcattctttcctgctgattcatcatggggaatgttttgggcccagctggggtggggcaggggcactggggggacatcttggacacgggcagccaggagtggatggcaggtccctggcagcagggtcattaagacctggctgtcacccaggatcgaaaaggtccatcttgacatcctagctctatcacactctgcctgtccaggcttattcttacttgcacatctgcctcccccaccagactgggaaggccccctccagcgtctagcactccagcaccctgtctagcatgtaggagaaaatcaataaaggcttgtgggatgaatgaacctttggaaggacgtttaggcaaggtgggggcaagagggggaaccaggttgggcagctgtgggcctagggaggaaaccgggaggctggaaccctctgcccattttacagatggggccagtgaggctaagggcaggaccaggtctaggggaaagaaactgggggcttggactggggttcaggcacctaggtgctcagttcagctgatgggactcctctctgtcagccatgtccacatttctttaattctacagtccctgctccctgcactaacaccctcctcccgtgagtctgacaagggccaggactgcatcattcagctctgtgaaggggttctcccattcactgtgtattgcctggaggagcaagttatgtcgcctggggctcagtgttcccagctgcacaatgggcagcgcagagtttcacacggagggcgggggggggggggggggcggtattcagtaaactctgggtgactcgcctgttcctgcaggagagcaccgctgcaccgcgccacctcgacctctctgaactgagccccggcctcccagaaagggcgtctacattgtcctaagtgaccgagctcgtgagattcggcccctgtgacagccgggcgctcccgtgcgaagggtgctgtgccgggggccctggcacccaccaggactcacagactgggactctaggtgggcgtcattaccttgttctgcaaaagaggaaactgcctgggagagggactcccgaggccgccgcggccctccctgcaaaacagccgcgggcccagcgccgccctttcccgagagctccgctccccgcgaccccccgccgcccccccgctccccccgccccccgggacttcccggccccgccggctgcggctgggcgcccccgccacctggcctgtgtcccgacggggggcgccgcgcggaaggccgggcggggcgcccgcggactccaggcccgcccggggcggggcctgcggggcctcctccgcggccagctcggggctggggggccgcgggcgggaggcggataaaaaggccccagggcgcccggggagggagcccgttagcgctgctccgccgcggcgcccgcccagccccggactgtccgcgctccatctggtgagcccccgcctggccgcgcgtctgcctcttggtctgcctcttgctgtcccatctgtccttctgtctctctgtgagtct

SEQ ID NO: 5749 - DNA, 2300 bp, Homo sapien
gtgctggggatacggtagtgagcggagcagatgtcctgatgggtgagagacacagagcgagtgatgatgatgaagtggcgtgagtgtgatgctaggaggagcagccgggacacagcctggtctagggtcagagaagcctctacatggaagaggtgtttgatctgagacccaaaggacaaagaggagttaacaaaacataagatgagggagggaggggcttcaggccgacagaacagcaggggaaatgctggggttgagagaacgtgtgatccacccaggaaatcgagaggttctgttagttaggaggatgggatatggatagggggacaggatgagggatgaggctggagtgcctgctagaagactggccattatcctaagagcagtgccaagccggggaggcttggaatggtgataagtgagtggcaggagcagagctgggctttaagatagggctccaggatatatgtggacaagacctgcaggagagaaagtgtgggagagggggtccaatgaggggcactactgcagcagcataaggaagagaagagaggctgagaggtgggatgaccttgaaagccctttggaggctgagttggtgttgctttgtggatgtagatggggaaggatggtagcggtcaaggctgacacctggatttctgtcggaaacagaacctcctgttgaaaggtgccgttcactgggatgggaaagattgaaggggaagcagctggagaatggggaaaaggtggtgggtttaagatgctgccaagaaagggtccaaagggagatatctgtgggtagctggacaccggagctggagctcaggagagggctggagctgcaggtttgggcatcgttgccttctttgtggtaataagctatgcacatagacacacttgttagggagagggtgtagagaaggcaaagggctcttacaagaacttgagctcattgaaggctgctgggagagggctggatggtggcagggaagggctgaagatcaagatggaaaggaatagttgcacctggaactctggggagatgagatcccacctccaggatctgagtcggatggtctgtccacaggtatgtgctgctgcaccatgtgatggggggcctggagggaatgcagggggcctggggctacgtccaggggggcatgggtgccctctctgatgcgatcgcaagctcagccaccacacatggagcaagcatcttcactgaaaaggtgaacggcccctctaccccaccccaattattagtaaggatcccaggacagaacaaagtctcagatttggaaggtcccttgttttaccaatgaacagaggggccatgaggggatgggttgcagaatcaagagattaaggtcatgcagtctgttagtggctaaccacccccttggaattccctggtcactgaactgagactgagtgtttcatggagaagctgaggcttcatggagaagctgcagaacttggtgggatgggtttgggatgaagaagttgtgaatgcctaggagcagcacagaccatggaaatcccggaagatctaacatggatttcccttcctgcggtttctggggccttgttctggtgggctctagacagtggcgaaggtgcaggtgaacagtgaaggctgtgttcaaggagttgtgctggaagatggcacagaggtgagaagcaaaatggtgctgtccaacacatcaccgcagatcaccttcctgaagctgacgccacaggtgaggctgtgggcaggagggtggagcttagatgtctgccaaaacaggggttagaaatcgtggggattgagggagccaggattgcatcagggtgtgagatgcaaaagccaagtctctgcatttgggaaacaggggggtaagggcaggtagcaaacggggaagaagcctcacaggtggggagaaggggccagagaggtgaagtgaccaagattccggccattggcagagccagagctagaacccaggtctgactttcaatctagagttatttccacaactttcctactttcctgatttctcccctctcaccgctctaattccattgtctttgtcaatgatctgttatattatccatgattattaattaatcaattaacaaagagccacaatacttctgggcatacaacaagaaatactggcacccagaactggagacttcagttgatcttggtggatttcagctgcttaaggcttgctcatgcgtctgcagttggctgtgggtcagcttgccggctgctgatcttggcgggactccttcatgtgcctgggagctggctggtg

SEQ ID NO: 5750 - DNA, 2300 bp, Homo sapien
tagaaaagcacgaggaaaccaaaaacaggcttttccaacaattaccgctggagttgctccacactggagatgctccaggcgggcaggctcgccgcagctctggacactctgtggaggagatttccgatgctggcgggggccggggccaggagacggctggggtccctcctatccctaagatggagacattctttattctaagctagagaaacttccagcttcgttcttcttaatgtagtaaactcactcatacccaggaggcatccttagtctctctcctggtcatccttgacatcccatccgctgcctccagaatctgtgcgcgtctctccaagccgccattttgggaaccgctgcagcggcggcctagtgctccacatgcgaccccctcctgtttcctccgagtcctcaccagccagcaggtgggctgacctttgtaaagtcacaaatcctagcagtgaacttcctgatcacacacctcactggcttctcgctgcacttggataaaatgcagtcctgcccctcccacccccatctggtgctctctgcctgtctgctctgtccacactgacctgccctctgctcacgcctgcctgggtgggtccttctcttcttccctctgactggagactgcttagatgtccacatggctgctgctggtgacctcttggtacctgaataccagctcaaatgtcacctccttgaggaagatgtccttcctggtcaccatctaggctggaatctccactctctttctctaatgctgccttcttttcttttcttcttggcactctccctgaagttctctgcctaagagcagtgtccttgccttcctagttcactgccgtacacccaagggcttctctcagtgcctggcacatagcaggtgctcagaaacatggactgaatgaacgaataaaccctccaaatcagggacctaagaggaatccaaaagttattttaagtataactaattgactatgaatcacttttcatttgattcataatgaaacctaaatggaggctcttctaaatggaggctctgtcattcttaatggtgttaaatcaaatttagcttaaagctgcctccttaaatactttaagctcaacctaaaggtttctctgttcctagtgaactataacctagaaggaggcgtaaacagactgtaacctacttctgtgtcaatcgccgagttttggccaatcaaaggggaccaactgtttaaactgcgttcaaataaggcaaacactgagctgtaaccaatccagctgtttctgtacctcaattccattttctgtacatcacttttcactttctgtctataaatcttcttctaccatggagctgtgctggagactgtgagcatactccagctcgggagcctgattcatttatgaatcattctttgcccaattaaactctattaaatttaatttagtgaaggtttttcttttaacaataggtttaattatgtggagtctgaatgagaaggggaatgttaaataaccatcagattatatccacaagatttgttcggattatgaagcttttttcttaaaaaacagaaaaaaaacccaaaaaaacaaaatgaaagcaaacccttcttttatttaccccatgagagttctcagcatgcacagtcatcctgggtggaaattgttggaaagggtgtgtgtgtgtgaagggtgtatctgtgtgtgtgtctaaaggaccagagatacaagagatttaaagggtgtggttctcaaagttatgttctgggggcctcctctttcagaatgacctgagaatgccataaaaacgaccgtttctgggccccaccactgccacagaatcagactcgtgagcaagaacccctggggtttccccagcagtttccccagcagtttcccaggtcatactttgtggccctgcaaattagagccctaccttagagagatttccaggagaaaagcaagagcaaaatgaataaggctgagtgagacccagaaggtcagtgagggaggggagggaggatgggattgcctctggcagtgaggtcaaggctggcccagggggagatggggaaggtggcttatggctgaaggggatgaaaagcccccctccacacccccttctccaccagtgcaaaggctctgcccttccagcctggattccatcatccagcgcagggccgctgcaaaagcaaactcatttactaggtggatggaaccgggaggtgatccaagtcagtgctcgcattgacagctgtggaaactaacacccaggaaggggaggcaggccctggtggggaccacag

SEQ ID NO: 5751 - DNA, 2300 bp, Homo sapien
caaataaagatacaatactctcaatttaaatgcagtctacccgagtgattcttaccaaaggctttctttgatttttgccaaactcagtagccaacctatagttgcaaatgacaaatgagggtagctccaaagagaacggtgctccatattttctgtaaagagtaggatgatcgtgaaacaaatgaaacaacaaagatttatgtcccaaccttactcctttattttttaaaatttatttttattttatttatttattcatttattgagatggagtcttgctctgttgcccaggctggagtgcagcggcgcaatctcggctcactgcaacctccgcctcctgggttcaagcgattctcttgcctcagcctcccgagtagctgggactacaggcgcccaccaccacgcccggctaatttttgtatttttagtagagacggggtttcaccatgttggcgaggctgatctcaaactcctggccttgtgatccacctgcctcagcctcccaaagggctgggattacaggtgtgagccactgcgcccggcctccttctttaaatgacaggaatgatgttactcaaataagataatattgttctaatactagaatatttccttcaatttttgtgctatttattcatgctataacagctaacactgttaggtttaatctgcattattagcattttcccatcactttcttaagcctgaccacaaaaaataaattcagcccttctgtgtaatatttgctgatgacagtggtgtaaatactcccaccatagccttttctgttaccaagatgaggttgctcaatgtgatttaggagagatacccagtagcacatcattgtatagtgtgtccaccatgcagatatgtacatagaggccagtgactgccagggcatgggcaacagtcaaatgtagtaaaacaaataggaggtagtgtgttttgagtatttattacctttgtttttaatttatttaattgtaagcttatataatttagtttatatcaatggctgtttgacagccggctcacaaactccccgggctggtgggagccatctccagcacctcacttagcctcagagaagccccctgcctccttccgtgctcagccacagctcaccctgctgtctcctaatggggaaggttgactttaggtcaccagctgccttggtgacttgcctacaagtgcgagtgagtctcagtgtgtgagcttttccttgacatgatttctttagttgctaaacataccataaagcctggtttaaaggcatcttgggcctcagtgaggaacagaacggcatcttctgagacaagggttacctctgagtccctgaaggcacactggcacctggccgccaccttgaagatgaatctcatttagtcatttgactaaatgtgcctgagagtgactgagggggcttgttaaaatggagattcctggccccatacctggtgacgagcattctgagggcgggaggtgtctcccagaggtcagcacatccacccaaccaacactgcctgatgcaggcagctgcagagcccacgcccagagcagctcctcaagggcccaggcgcctgctatggggcccctgaggcaggtctggggattagcagagcccgcagctgaagtcctcttcaagggaacagaggtgtcaccagaagccaaggagggctcagccaggacttgagggtggtcactgggagggggtcttgtgctttggatccttgaccttactcatttgaggtctgccatgattgaactggacccagttgcctggaagactatgagttttccaagatcgatcatcagcaccaattaaaagacaaatagctcccatttatctcatccttgccacactgcagggtccctggcaccctctgttccccatgtgaagaaactcaaggctcagggcagctgatgactctctgaggtcatgccctggcaaatagcagaggctgggctgagcccaggactgtctgcctttagtttgctgcatgtctttgagagacagattccatctgttcatgagtcccactggcggattgtttaaactttcttatgaacattttcaaaagcccatacaaataaagagtatgtcaaccagcactttttaagatgaactgtaaccaactagcttctcacatgcttctcatatggtaagagttaattttagctcatgaaacttttggttctgtgaaacacctgctgaacagactcctgggaagggggtctgtgggagtcgacatttatacaaccttccaggtgattctgagcttatcagagctggagaggca

SEQ ID NO: 5752 - DNA, 2300 bp, Homo sapien
tttatcctgggagatggggaggaagccccatctctgctgttccctgcgtggaggaagcccacccagcaagctctctcctaccccaggtaaaaggtgctcctttgcctgggtttgaattccagcgctgccacttcctctctgcacctcctggcaagtttcttctattccccacgtttaaagcgatggcacctccgtcccagggtggtgtgaggattacccagtgtggtaggtgctcaataaatgttggtcattgttatcactgaagcccaacatgctagtgcttctagacccttctgtcagtgctgataagcccttgctaagtcccagccccttcatgcttggctggcgtctgccctagggctggggttctcaagcccctggccctggcccagagatttggattcccttggcggccgtggagcccagcctttgatgtctttcaaagcttctgtggtgcgccctggattgagaaccaccacccgaggggtacagcccctctcttccaaccgagaagttcctgtcccagaatggacccagggacaagagaccctgagagccctgggactgggagtgtctgctcctctgaggccaggaggccggtgctgggccagagaggacggcgtggcgaaagtcagcgtccactgcagcacaggatcagatggccgtgtgctgtgcatgcaggagcctcgccttctgtgtctttagtcttgagccaaaatttgctcaaagactgatctcttccttgcagggaacagctttggggctgggggaactagaacccacatgttggtctaaaccctgagaaggtggcagtgaggaagtatcccctcaggtgactggatctgtgttcctccttaacatcatctgatggaatggcaatgaaaagcgtggattgtggaaaatacagaaaaacataaaggaaaaaactccaatcccctgagcccaccactgttcaggacccctgcttttgtcacctactatttccctttagtttttagcagcggctggatgtgatatgtctagtttaaccagtccccttgatctttctatataataaataacacaggagtgaacatcctgaatcagatcttagcagagatgctcacatgcggggtaactgtccatggtgtgtggaggggtcctcggaaccccctcttaggatcatctccacatactctcccagttctgagattcgttaccaatagcaggtttccgtcacactgcgatatcagagcagtgcaggaactctccgctccaaggggttttttcctcctaggggaacactctgctaagtaatgggcagagaacaaaggggctcctaattcaaggcaggcctaagggagggtcagaaagaactttagctggaggtatttacagatgtgacctcgaatccttggggattcttggaaaatgggcaaggtgccaaaagaggagaactggccaggccttcaaaactaaaacaccagagaattacagacagcgaacttgcccctaagccctcgttgtgggtttgtgtttgagcatttaggagaggactccagtgctcctcagcgacagacacagctgcctctgcggtgtctgaaggccctggtcgtggtgacgctagatggccgccctgggcgcctcctgtgggcgtagaggcatcaccactctgcactggcagactcagcatggagttggagcagagtctgacacgagcacttgccatcccaggcgtttcagttctgactgagaaggtagatgcacaggggaggagagggccctttcgagctccactctgcctccaccactcattccctaaccccgcagcctcagcgccctcatctgtaaaatggggagttttgcctacagggttcagcacaatgccagcctgacataggaaccccagtggattgtcagttttgccattatcccctgcatcctggaggtgacaccgcctggttaataggcaacactcccgacggcccagcacagccccagggcagcaggaggctggcctgtggccaagaatgcatggtggagggggcctggagggggactgcagctcctcctcttcctgcttcctccctgctccaccccgtgcctagggcagcacaaaagccaatcgctagcaaactccctgcctagcaaggcccagcctggggcagaaatggctgcaagtggccgaggtctctgcaaggctgtggccgcctctcccttcccggcgtggagacgagataacacggaagccaggggaggtctgaagcctgagtatgatgcggtggtgataggagcaggtaaagtggtaaagcaggccgggc

SEQ ID NO: 5753 - DNA, 2300 bp, Homo sapien
gacgggtgtggagggtacatctgtgttcctaccaccttcctgctggcatggtcttggcagcacggggaacgtctgtgcccggcccagaacatccccactgctacctcgtagccaggatgccactgttaggtcagtgaggaaccggagcggttgtcaaggcccacatgcaggggcctagtgagatgaccgagggcatgggcatttgcttgcgagggcccagagaggcctctggcgctggaggagtgccacagcctcactcctgaatcccatcctccccttcctccccaggaagctcctgcgctactacagcaagaaccgcccaaccgaggctgtcaggtgctacgagctgctggccctgcacctgtctgtcatccccactgacctgctggtgcagcaggccggccagctggcccggcgcctctgggaggcctcccgtatccccctgctctaggccaaggtggccgcagtctgcctttgcatcctgtcctccagccacccttgcttgccactgttccccatgacgagagcctcctgtctgcagtggccatcctgaggatagggcagagtgcccagggtggccccagggcttctaaaaccccacctagaccaccctccatgtcaggtactgagcaaggccccagatccttctctctggaggaagagggaagcccaggggtcctgtttgtaaaacaacggtggcaacagctcctcttccagagctgcctctgcctttatcctgggagatggggaggaagccccatctctgctgttccctgcgtggaggaagcccacccagcaagctctctcctaccccaggtaaaaggtgctcctttgcctgggtttgaattccagcgctgccacttcctctctgcacctcctggcaagtttcttctattccccacgtttaaagcgatggcacctccgtcccagggtggtgtgaggattacccagtgtggtaggtgctcaataaatgttggtcattgttatcactgaagcccaacatgctagtgcttctagacccttctgtcagtgctgataagcccttgctaagtcccagccccttcatgcttggctggcgtctgccctagggctggggttctcaagcccctggccctggcccagagatttggattcccttggcggccgtggagcccagcctttgatgtctttcaaagcttctgtggtgcgccctggattgagaaccaccacccgaggggtacagcccctctcttccaaccgagaagttcctgtcccagaatggacccagggacaagagaccctgagagccctgggactgggagtgtctgctcctctgaggccaggaggccggtgctgggccagagaggacggcgtggcgaaagtcagcgtccactgcagcacaggatcagatggccgtgtgctgtgcatgcaggagcctcgccttctgtgtctttagtcttgagccaaaatttgctcaaagactgatctcttccttgcagggaacagctttggggctgggggaactagaacccacatgttggtctaaaccctgagaaggtggcagtgaggaagtatcccctcaggtgactggatctgtgttcctccttaacatcatctgatggaatggcaatgaaaagcgtggattgtggaaaatacagaaaaacataaaggaaaaaactccaatcccctgagcccaccactgttcaggacccctgcttttgtcacctactatttccctttagtttttagcagcggctggatgtgatatgtctagtttaaccagtccccttgatctttctatataataaataacacaggagtgaacatcctgaatcagatcttagcagagatgctcacatgcggggtaactgtccatggtgtgtggaggggtcctcggaaccccctcttaggatcatctccacatactctcccagttctgagattcgttaccaatagcaggtttccgtcacactgcgatatcagagcagtgcaggaactctccgctccaaggggttttttcctcctaggggaacactctgctaagtaatgggcagagaacaaaggggctcctaattcaaggcaggcctaagggagggtcagaaagaactttagctggaggtatttacagatgtgacctcgaatccttggggattcttggaaaatgggcaaggtgccaaaagaggagaactggccaggccttcaaaactaaaacaccagagaattacagacagcgaacttgcccctaagccctcgttgtgggtttgtgtttgagcatttaggagaggactccagtgctcctcagcgacagacacagctgcctc

SEQ ID NO: 5754 - DNA, 2300 bp, Homo sapien
ggccttattcacaatggatgtaacccaattgtccatcagcagataaatggataagcaaaatgtagtatatacagactatagagtattatttaggcttaaaaataaagaaaaaaggaaggaattctcacatatgctacaacatgaatgcaccttgagaatattatgctaagtgaaataagccagtcataaaaagacaaatactgtatgattctacttatatgaggtacttagagtagtcaaattcatagagacagaaagtaacattgtggttgctatgaggaggaatgaagaattgttgttgttgttgtttttgttgttgtttttgagatgggagtctcgctccgttgcccaggctggagtgcagtggcatgatcttggctcactgcaacctctgcctccttggtaccagcaattctcctgactcagcctcctgagtcactgggactacagctgtgtgccaccacaccctgctaattttgtatttttagtagagacagggtttcaccatgttggctagggtgacctcaaactcctgactttgtgatccgcccgccttgacctcccaaagtgttgggattacaggtgtgagccaccacacccggccagcattattgcttaatggatatagtttcagttttaaaagatgaaaagagctgtggagatggatggtggtgatggctgcatagcattaggaatgtagttaataccactgaacaatacacttaaaatgcttaatgatcaattttacattatatgtattttaccacaaacaaatttgaaaaaaagaaacatgttgacacaaaaaacccgtacataactaaaaaatagattatattggattacataaaaatgtaaaactttggtgctacaaatgataccactaagaaagtgaaaagacaagccacataatgggaaaaaaacttttgcaaatcaagtatctgataaggggcttgtaaccagagcatataaagaactcttacaactcaataataaagacaatttaaaaatggataaaggatttgaatagacatttctccagagaaggtacacaaataggcaaaaagcacatgaaaagatgccgaacgtcagggaagtgcaaataaaatcacaagacaccactccacgctgggttactatacttaaaaaaaaaaaaatcaacaataacaagcattggtgaggatgtggagaaatcagaatcctcatacattgcagttgggaaatggaaattaccagtaggggaatgaataagtaaataacagcatatccatttgatggaattcattcgaccactgaaagcatagtgagtgaacgatctcaacggtgggctgagcaaagagatgcgtgtggcagggctatgtgctgtagatggggagttggaagaatttgccctaaggtgggctggaaggggtgggtagtgggttggggggagtgatgctctctttgatctgcaggtggtggaagtattgattcttagcctctgcctttcccccaagagatgctcaatctactatatccccagccagttcttgcaacccataccttgctgggctgggctcaaagctcccaggtggcacccaggcactgaggggtggactgttcggggatttaggcccttccagagcgccccctccacttccaggcacccccaatacacatacgattttttaaaataaatattgcaaacataggttcaacacaaaactcctaatgtgcactccactcccaaaatagattgagaactcctataaattccagcgttggcactctgggggcaactgagcccttctgtgcgctatgtcacctccccaaaggtcagggagagcagtcacaaaaggacagctctagccccagaacttcagttcattaggcaaagcctgaggttccggggcatggggaggagagaagggatcagctgaggagccaggaaacctgggttctgagcctggttcggaccctcagcaagttatttcttctctctgcgcctccgtttcctcttctgtaaaatggggcatgggcaaggcctggcaggggcggggctcgaacccgcggaaggcgacggcggctccggcccctcccggggcgggcggtcacgtgcgcgatcacgcggtcctacccggaagcgcgcccgggctcctgcaggcggggcgctgtgcgcgccgcgatccggtacgtgggcctccgggctgtcccctctgggggcggcgatcctccctccggagccccccttcaaccctcccggaagtgaggtagggtccctaggggtcccggagcgggcccactcctagcctcacccactccgg

SEQ ID NO: 5755 - DNA, 2300 bp, Homo sapien
agaggggcatattatttcagtgtgttgagcatgattggatttaccattaatttacttcacagaatttattgagtgcctactaagtgctccagtctgggaacacaaaggcaaaagtgtttgcccgccaggctgttgccatctctaagaggtgctcaatacatacttaaaaattacaagaatttcgactgaaatttatgtcacaccacacacccatacacagacacacacacacagtttaaaggatctagatgtcttagaaatgttcaggaactgaaggaaacaggccttagggctggagccaacatccaatacttcactatgtaacagcttgatttaaaaaaatcatctttaaataatatgacttgcatttgctttctcccatatcctcatcttatgcagtcctatttctagaaggtcgtcatggcgcttcacagatgaatgcaacataatctcgatttcctgggtgcttaggttggtagaggcttttcagggaacttcagttgaaggtcatctattccagctgttttcagatttgttaatcctggtctgggtggaggtaagaggatacaggttgctattacagcgtttgctgggctttaagactaacccttgtccatccacttctggggaaaacccttgctctgcattttagggttttgcttgtttgataccaaggagggccctggacgcttctgcgtttctgactgcccgcactacataaagtagttcccttcatctgccaagtagaagtcccattttgtctcagaaagaagccgaaagtggggcccagcaatgtgactgcagcaaactgtgcctgatccctttcccgcgcttcaggataggacctagagttcaatttgcaagctgttgtggggtggaagctcaatgagcagcggcgggtcgtgcatcacagcggcttccggctgttattccccatccagggctatgtgactctggttttgactgggggccgagatggaaacccgaaagtgtcactatggtcccatctggcactgtaaaggcgcacttccctgcaggagggctaagtataggattgacctccaggagggtctggaggggggactctacctgtgcagcagaatagagtggccaagaagtggcacagttggacgcagagccgccctgactatccaagcacagctcaggtagcttcgacttggccaaagccagcatgtattgacgctcccaagacgcttattcctcggttgcgggaagagcagagcagagcgagggcgcatgtcccttttggccctcggatcggaaaagctgcttgaccaggtcactatgtttttccttcttgctactctttgccctatggaggtcagaggatgcttcggtgtggctatccaacgcgtcacagagatcagggctcctcttcggggaatgtccttcagggctctatgctttgacaggaatcaccgcctcaagacccctctgcaacttaaccgcccttggtattgctgcttcaaccagaaaagggccctgagcggacgaagtgcctgacgctgtcaggagaaacaagcgtgctgtcggtgggaactctatcccagcgcgtcccgggttggcgctggggctttcgggtcggagtcggagcttgaaccgccctccagagcctctcagggaaggacgtaaaaacgagaccctttgctctgtacccagacggtacaacggcatggtttggattcctccctctgcttcctgaccctagagggttaaattaggagggtacaacgccacccttttctcctccttcccgcctgctcccctccccttacctttaaaaagttaaaaaatgtctgcagtagaaatctcttaaaggggcggtgccggtgtacgagttctcttggcaagagtcacggggaaggctggctaggggcgtgagttcgctccaccagcaccaaaacactgaaaaaaaaaattaaaaaaaattaaaaaaaaaaaagaaaaaaacaaaacgagcgagcgagcgagcgagagagagagagagcgggagagagagagagtgtgtgtgtgttgggggggtggtgggaggaagggaaaaaaaggggggaaaaaggcggacagacacacactttagataaggacaattagtcactagcgagacccagtaggaagagaggtttaaatcagagggattgaatgagggtgctttgtgccttccctgaagccatgccctccagcaactcccgcccccccgcgtgcctagccccgggggctctctacttggctctgttgctccatctctccctttcctcccaggctggagacaggagaccctt

SEQ ID NO: 5756 - DNA, 2300 bp, Homo sapien
ctactcaggaggctgaggtaggagaatcgcttgaacctggaaagcggaggttgcagtcagccgagatcgcgccattgcacgtcagcctgggtgacaagagcgaaactccgtctcaaaataaataaattaattaaaagatgtaaacggcgggtcgcggtggctcacgcctgtaatcccagcaccctgggaggccgaggcagatggatcatttgaagtcagggattcgagaccagcttggccaacatggtgagaccccatctctactaaaaatataaaaattagctgggcgcggtggcgcacgcctgtaatcccagctactcaggaggctgaggtaggagaatcgcttgaacccgggaggtggaggttgcagtgagccaaaattgtgccactgcactccaccctgggcgacagagcaagactccatctcaaaataaataaataaataaataaatctcatataagtgtgtgtgtgtgtacaaatttatacataaatacttttaacacaaatggtagcatattatacttgctgttctgcaccttactttgtttctacaattactttggagatttttttccgtatcacatatacaacagatccaccgcattattttttattgccgcatagtattccattgcacagtggtttcacttatttcaacagtttcttattgatggacattcggatcttaactaagaattgaacttaaataatccagaaatgtttacaataatgaaaggtcggctggagttgaggctaaaagttttcacatattcaagacttgactccagaatattcttttgaccagaagggggaatgcaagtggcaggagaagcgaaaagctgggaaatttcccgggccaatggggaagcagtggagccggcagggaattactgccgggtaggagttcgcagaggagcaccttacttttggagtaggaggccatgctgcaaacccagacttttcaggctgcatctcagatataccgaagtgtgtacccgctacgcacagtgcggtgatgcctggccacctccagcctccagcggggacctcctgcccaggtggagtctgaatgcccaccgccaccagcccacgcgcgcagtgggcgtacacgtggtgacctgcctgcggctgggttcccagctccggctcctcctccctccagctctcgctcggcttcctgcagtatcacgtgcagctgcgctgggtgcaggatggcggcggccgcggcggcggcagcagcggtgggtgtcaggctccgggactgctgcagccgaggcgctgtgctcctgctcttcttttccctgtctcctcggcccccggccgccgccgcctggctgctgggcctgcggcccgaggacactgctggaggccgcgtgtccctggaggggggcaccctgcgcgccgccgaaggcaccagcttcctcctgcgtgtctatttccagccaggaccgccggccaccgccgcaccggtgccctcaccgaccctcaactcgggggagaatggcaccggcgactgggctccgcggctcgtgttcatcgaggagcccccgggcggtggcggcgtggcccccagcgcggtccccactcgccccccgggaccgcagcgctgcagggagcagagcgactgggcatcggacgtggaagtcctggggcccttgcgtcccgggggcgtggcaggctcggccctggtccaggtgcgagtgcgggagctgcgcaagggcgaagcggagcggggcggcgcgggcggtggcgggaagctcttttcactctgcgcctgggatgggcgcgcgtggcaccaccacggcgccgccggcggcttcctgctgcgcgttcgcccgcggttgtacggcccaggcggggacctgctgccccctgcgtggctgcgggcgctcggggcgctcctgctgctagccttgtcggccctgttcagcggcctgcgcctgagcctgctgtcgctggacccggtggagttacgggtgctgcggaacagcggctcggccgccgagcaggagcaggcgcgccgcgtgcaggccgttcgcggcagggggacccatctgctctgcaccctactcctgggccaagccggagccaacgcggccctggctggctggctgtacacctcgctgccgccgggcttcgggggcaccggggaagactacagcgaagaggggatccacttcccgtggctgccggcgctcgtgtgcaccggcgcggtattcctgggcgccgaaatctgcccctactcagtgtgttcgcggcacgggctggccatcgcctcgcacagcgtgtgcctgacccg

SEQ ID NO: 5757 - DNA, 2300 bp, Homo sapien
actaataaagcatgaacttgctttttattgttttccataataacatctgaatcagtaccccagattttctccttaaatgtctctgagccaagggaaagaaccaaccagatttttattttagaaaaaggaccaggaaatgtgtctataccgcagaagaaaacaaaccaatatgaagcaggactattagacaaaacttcagtcccaggttagtactgaacttagttacctggtttgcaatccagctttgctcttacaggctgtgtaacttcaggcatgctacttaaccaatctgtgcctcagttctgttatctgtaaaatgtggagaatagcacttacctcagtggtttttatgagaattaaatagataaatttagagttctctggcacatagtaagacctgaataaatggaaactattattattcagtcatcgcgcaataaaaatgaagtctatgaaatctctgcctgtgacacattgtagtttatagtcttttcacatattcactaggtcatttgagctccacagtcaccttataggtactgattgttcaaactaccattgctgctaacaaactaccccaaaacttagagccataaaacaacaactattttattatgctcacagattctgtgagtcaggaattcaaaagaagtacagcgggaatggcttatctctgcttcacagtgtctggggccacagctgggagctgcttgaaaggctggggagaggctgggcgaggtggctcatgcctgtaatccccgcactttgggaggccgaggcaggtggatcatgaggtcgaggcagatggaccatgaggtcaagagatcgagaccatcttggccaacatggtgaaaccccatctctactaaacatacaaaaattagctgggcgtggtggtgctcatctgtggtcccagctactcgggaggctgaggtaggagaatcacttgaacccggaaggcggaggttgcagtgagctgagatcacaccattgcactccagcctggcgacagagagagactccatctcagaaagaaagaaagagagagagagagagagagagagaaagagaaagagagaaagaaagaaagaaagacagacagacagacagacagacagaaagaaagaaagaaagaaagaaagaaagaaagaaagaaagaaaagaaagaaagaaagaaaagaaaagaaagaaagaaaggagggagggagggaagaaagaaaggctggggagtgagtgagacaaggggctggatcagctgagactggcagatccacttccaagaccacttcttctgccaaactgcctggcactttggtgggaaacctggaagggtgggctcagctgggactggcacctaagcacctacatgtggcctctccactatggtggcctcagggtagtagtcagacttcttacaatgttcttgcagcaaaagctacatgcctttatgacctggcctcagaagtcctataatgaacattcatttcccattctcttttggttgaagtagtcacaagcccccccagattcaaggggaggggctgtagatcacacctctccgtgggaggcataccacaaaggccatgttttaaaatcaccacactggcattatttcctgattctagatgagagatggtaattcagtggagattaaatgatttgtcaaggaatagtaactgggatagttagtggggaagggggcttaggggaggagaatgacttttaccataattctgactctaaattcttgctctttcaattagtatatattatatcagctaacatatacttgctaatatgtaaaagttcaaagaaaaaaaactaactggttttgaatatattcagtaacttccctaaatagaaacacaaatctagaagaataaggtttgcatttataagcccttgcatttataagcgcttgcataaaaacttcatattttaaggaggtccagggatgagtgcaatcctgagattggtcagacagcaactttgtatcatttttctcacaaaaaaagatctctgaaaatgtccccgatacttaactgtgatttcatttgttctctaggaaaatctcacctggccattgtccagcgggtgaataatgagggagaaggggaccctttctatgaggtgatgggcattgtcacgctggaggatatcatagaggagattatcaagtcggagatcctggatgaaactgatctctacagtaagtgcacggccttggctgttctccagggtcatcttattttcctccaagactctcaggtaaagcctcatttgatttatagaaagggtgt

SEQ ID NO: 5758 - DNA, 2300 bp, Homo sapien
tgactcttctaccatttgttgaaggcttagtaagtgcaagaaacctagggagactcacaggtccctagccaaaagaagctacatggccaacaagcatataaaatactcaacatcactaatcactagagaaacccaaatcaaaactacaatgagatatcatctcacaccagtcagaatggctattaataaaagtcaagaaataacagatgctggtttctggtgaggttgtggagaaaagggaatgcttatacaatgctggtgggaatgtaaattagttcagtaaccgcggaaagcagtgtggcgatttctcaaagaacttaaaacagaattaccattcgacccaacaatcccagtattgggtctatacccaaaagaatataaatcattctaccataaagatatatgtacatgtatgttcactgcagcactattcacaatcgtaaagacatggcatcaacctaaatgcccatcaccagtagactgaagaaaatacggtacatatacaccatggactactatgcagccataaaaaagaaagagatcatgtcctttgtagcaacatggatggagctggaggcctttatcctaagtgaactaatgcggaagagaaaaccaaatactgcatgttctgacttgtaagtgggagctaaacattgagaacacatggacacaaagaagagaacaacagacactgggacctacttgaggctagagggtgggaggagggagaggatcagaaaaaatacctgtcaagtactatgcttactatctgggtgacaaaataatttgtacaacaaacccacatgacaagcaatttatctataaaacaaacctgtgcatgtatcccgaacctaaaataaaagtaaaaaaaaaaaaaaaagcagtttaccatctatgaagggtgtggcagatatgcaatgttaataatagctgacatttagagagtccttcttacatgcaactaaccacttcgtaaatgtattaactcacaaactccccacaccaactctgaggaaaatactattatttccacagagcaggaacttccacagagaggttaaaataacttgactaaacctgcccaaattcgtaagcggcagccagaatctaaacctagatagtccggtcccggagataggtttttaaccacaaaggcattttctaaaattgtgaaagtacagaagcacaggaaagagacattttggccagataagggttaagggaaggcttcatggatgaagtggcattcgctctgggtcttgaaggtcagcagatggagagggctcctggggaggaaggactctaacggggaaggaacagcctgacgaagaggaactttgggtaccagccagctgacgacagcaagatctggtccggtgcgcgcgggaggaagctgggaagggacgtcgcgcccagatcccgaggtccttgaggaccaggccctctctgcaaggaatcggggaggaaaatctcaaactattaatagaagagcggcaaaaaggaattcgtgcgcacccctctctgttggaaggaccttccctgccagagaccaaggctggcaggacaggtatacttccctcagggggaaacagccgacaaaggtggtcaaggtcgcccgcgcaggctccggagctgcacgtcctggacgaacactcccgtcccgagcacagacgctgggtatttggctgccagcccgggcccgccaggccgggcctggcaccgccaacacctgctcggcgggaacaggaagacctgtgttcgggaactccctccggccacctccccgtatcctcctggccctcgaaggtcgaaaggtggcctctcagggacacccgccgctcgctcggctcctcccctcagccgggagacccaaggaataacagcctctgcgataggagcacgctctaccaatcaaccgtagtcttcgcccacgcctcagccggaggaaattgcattggttgcatcattctcggcagccgataaattgttttcttggattggctaatagcgttccttctcccctgtgccttcgtcgtcagaagctggcgattggttaatcgcgttgccaagctttggacgcggctcgaccattggaggccgcgggcccgcccccgccggctaggtgaaggtgagtgtctcctccagtcgcaacggccagacctgacctgccagctccgggcgtggggtgaaatctcttgattcctagtctctcgatatggcacctccgtcagtctttgccgaggttccgcaggcccagcctgtcctggtcttcaagctcactgccgacttcagggaggatc

SEQ ID NO: 5759 - DNA, 2300 bp, Homo sapien
ttcctgcttttatgctcggcggccaccgtgatgcacacacactcgaggtccgccaccccgcagtgccgtgcacccctctgcccccacctcggaatttttgtgcccgagcgctcgggatccacggcaaaaccaggcacattcctccctctgcagactcaccgcctggtttgtagacactggtctccgcctggggcgtcaatagtttcaggatttaaagcagaaagacaccgggcgcccctgtggctgaggaatggcggttccagcacaagaccctgcccacagagggtctctccctactgcctgcgggccgccgctaccctaagtactccggggcgcacgtggcccgcgcggcatcccagctccccgggcggacccaggggctgcctctccacaacagttccgctcccttctgcagagccccgcctctcccacctcccgacaggctgttctttctcccttcaaccttgggcacccactcctgtcgccgttgcgggacccgcgtggcagccctccaccctcgtacccactcccagccggtgtcttatgccgctcggaggcaatgtccaccgtccctgcacctttcacctgccccttccaggtgagacgggtctctttcagctccgccatcctgaccgccaaaaaatgcttggattggctggggccggatgaggacagccacggttgagctggaaccgttccctatttttttaaggccagcgctgcacacgggtctttctgtggccctcaaagcagcgcccgctgctcctcactgggctaggcctggtagcgagcaaatgcctattgtgggagaagatggtcccagagtttccagctcagagtttccagaatctgtgggggactgtatagactcccccagaaaacaaccagggcctcatgaaggtgccagaaggcgtgtaggtagagaaattttaaaagcctgtcggagaggcaaggcctacattcaggctcctgatttcaataggtggaaaagaaggctgccaaggctgggtcacctcccttgtgaggacagatcctgctctcagtatgtgccacactccagccacgcaccaccaatgcagtcaacaaacactgcttgacctcccatacagaaaagcagtcgttgacacgtactgagcgcttaacacgcgtgaggccgtgcactaagattctggcatgttttgcctcattcaaccctagcaacaaccaaaaaaggtattactgccttcgttttatagacgagaaaacagacttagaaacgccgaagatcacacactgactaggccaagcaagagctgtcgaataccaaagtttagtcataactctatcttcctttcacatactgctctgtgcggctgctgccagggatacaagggcaaaagcaaccccgggacactgccctcatggagcttacagtctaactggggcgaccaggcaggcacatacagctatagaattaagtgggaagtgataagtgacatgcatgtcctttgctaacacaagctgcaggttcagagcctgaaagaggggacttccggctagacgatctaggagctcttccttggagaacagtttccactcgtggaggctaagtgtcagaaacatgttccaagtggagagaaagcttgagcaaaggcaacaagttgaaaaaggacatgtcgcccacccatagatagataaaacactgcatctcctcgtggatccagcgcccagtatttacccgccaggaagttttcctgccccgcgcagcagctgaaaaaaacacactcctggggcatccttccctggcgttggttcgtggacagcaagcctcccagaactggcctaggtcgggaaggtgcagccacgcgggaatcaatggttcaggaaccggatctgtgcagcctcgcccgcagcgtctcggacttcaggactctatactagtccttgtctatttctggtagagccgcaacatcccactcgcagagagcagggggcgtggcccacatgagccagaacctatagggagggaggttggggcgccagccccgcccccccaacgtgacgcaaatctcccggacagaggcttaggagcccgggccccagtccctgcagtggctgtaacaaaacccagacccccaggtcccggccaatggaggcgatttagactggagtgggaccgcgtctgtcaaaagcccgactcggcagcagcggcggagtccaggaggagagctggagccgccgcgctgcctccccgcccccgccgggatttattatttggactggacaattaagtggccctgatgatgttaccaagcccggtc

SEQ ID NO: 5760 - DNA, 2300 bp, Homo sapien
aaaggtcatttatgaccaatgaataaaagagtgaaaaatgtaaagagcttaaggagagaaaggacatagaggtggataggtcattagtggagtaatctggcagtaaagggaattagtactctagcaggattgaatgggtttttgtgagacctattcatttctcaagctaaatatgctagagaaaaggagagactgaacatgctgtgggggagaagttccttttaaaaaaatttttttgagacaaagtcttgctttgtcacccaggctggagtgtagtggcatgaacacggctcactgcagcttcgacctccctggcgcaagcaatcctcccccaagtagctgagactacaggtgcacaccaccatacccagctaatttttgaatttttgtacttttttgtatttattattttgtagagacggggttttgccatgttgtccaggctggtctcgaactcctgagctcaataaatcgtcccacctcggccttcacagtgttggggtcacaggcatgagccactgcgccggccagggagaggttaaccaggttaatggacccctagggtgtccacatggcaccttcagggactctgaaacgcagaaatgatatgcaaaattttgagtgcacacaggggatgggaggtggaagtaggagaagagaattcgtagttttattattttccaaacggtcgcgacctaaaggttaataacaactgctgaagagagtagaaaaagtttttaaaaaggaagcccagagaagagctaaactttagaaagaaaaaaggaaaacatctttcctatccaaggaaaacctatgaacagatggagaagtccacagttgcatcatctgggtaaaacagagaagacagagctggaaaccgcgggcagcttgtgccaacacgctcggggaaggcaaatggaagaagacgcccgtgctccctagagcaggaggtcctaaggccgggaatcgctggccttgcctctcaggacccgggctgacccgagggagggagaagccctcatcgccaggcgggggacccatcagcgcgccggctcagggacaaaatactgatgcttcagactcggccaggccgtgcgtccgagcttccccacagccgccgcacttccctgctgcctttgggatgcggcctccagccccgcctcgccaccggccgtcatctgtgaatcatcccgcccatttcgacatcttcctcccccgccttcggctcttggcctggcgcagagcccagtgacagccggggcccggggaacctcattcattcaacacttgttgggtttactctgcgaatgtggatgcgaggctcagtgccgggcgctggggcctgaggagcaccgagtccggccagagggcccaatactccagacccgaccagagtctagcgggccgccgcggtcccccctggaggtgaggcggttcccagcccgcatgtcgcaacggcttcccggacaggctgcgggtcgcgccagccagggatgaccggcccaggccggccccgcctcacgcccgcgacgagatcccgcgggaacacggctctccggggccagggccgcccgctctccagccacgcgtctcagaatttgaggagcgcacgggagcgcgggtcgtaacggcgcccgtcagcagtttgacgttgaaggcctgtcgccgccccgcccccgacgcgatcccgcgcacagggaccgcagctctgcaggcgctagtgaggggcccgaagtcggcccctagagtccctgggcgcgtcgctctttctgtagccaatcggggaccgacgtggtgcgggccaatggccgcggtcaaagtatcaagagtggttgagcctatcaaagttcagccttaagtttctcccgcccttctaaaagtcagaggcgggttgatcgcacatgtcggccaatcagtgaccaataaacaagaagcttctaagatcaaaggggaaaaggtgggatgtaggcgctagcaacgcctcagggcggaggaatgacaggcgacttcgctaatactaccggctgatttttcgtacgtaaggaaaggggtgggtctaacttggcgtctccaccaatggttgcttggggggcgtgtccgcggggccaagcgggagccggaggccccgggctctctgggccgcgcctgaggcggacactacggggccggggggcggcggcggcagtggtggcagcggcggcgggggtgggcgccgcagctggcccgggtggatggagttggaggggcggggtgctggcggtgtggcgggggggccggcggcagggcccgggcggagcccc

SEQ ID NO: 5761 - DNA, 2300 bp, Homo sapien
ttaatcccaactttatgcaactattctattcaatgtggtttctgggggtccagataaaatataacacttgaagcagagtggggattgagggacagagaaaaaaaaactgagaactgagaattgaagaagaaaggcaaattaggaagttcaacaaggttaggagagtagtggagccaaaaaaacaatagtcatgagaactgaatatagaaactggacaatggctagatcttatatgacaattagaactctgacccacaacctctacagcaaccagccgagaataatcaggacttggtcaatgactcagtttccctgttttttgccgcctcctttcttcaactcagaacccactaaagacagccaaatatgctacctaccccaaaccaatcacctaagagacactacttttgttagcccacctccagctttcccatgctaataccctcaagtcagagtatacatgaaaccttccctttttgttcactactaagctttcctggccaggtgcagctgctcatccctgtaatcccagcactttgggaggctgagacaggaagactgcttgagcccaggagttcaagaccagcctggacaacatagtgagactccatctctacaaagaattaaaaaaaaataagctgggcatggtggcacgtgcctgtagagccagctactcaggaggttgaggtgggaggatcgcttgctcaggaggtcgaggctgcagtgaaccacgatcgcaccactgcactccagcctggatgacaacagagtgagaccctgtaggtaattaagtaagtaagtagttttcctaatgtcctgacaggctttgagtcggccaaatgcaagtgatggtgactgactcccttgtcatagtaagctttgaataaataaagcatttgggtggtcttcctccccgatcccccccattcattcatttgcttattaattatacattagttgtgttttatctgccaggcagtggccagtattgggaatatgtggaagcaaatagtccctgccttcaaggatattctgtctagtgggacagacagacagacatatacgtataatagtaattcaacgtgctaagtgaaacaataggcatgtataaaaaaggtgtagtaggtcaagtagggcttttaggggaaggcgacccttaagatgggtggtaagggatgagtaggaggtgatttggctaagaggctgggacggttattcaaggcaggtggaggggcagaatgagcaaaacaggacgcgttgctggagcgtggtaaggaaggcaagtagcggcagaggacggcggtagggcggatcgtggggcgcaatggatgtgccacgttggaaagagcttggactttatgccgtcctcctggaaatgagataacggctggtgtaagcaagaaagaaacacacacacacccacgcgcgcgcgtcgtttcctttgtgttactgtaaggtcaaggagggcggcgacacagaaattcatgatgactggcataagcagacattcaatgaatgaatgaatggacataagcactttggtgtaaacgtcattgtcttcgatttctgttttctcacggggcaagacagtgaggtcggggcatcagtttgggaggtgatagggaaggtttaaggtgagagaactgccattctggtagggagggtcagtgggcacaaaaccaacaataggttatgggcaagggatgcgcttcggtcgcgaacaccctgaacccacctaccggagctactctgtcccaggagcggccgtggagaaagcaaccagccgagagttcgcgccccagggagggaagcgggcacagggccgcccagcgccactcacctgtgagctctccgcgggccctgcaggcggagcctcggtacgacgcctttccgattgggcgcggctcaaagtcccggggcgggcatcagaggccgagcgctctaggggattggccaccctggcggacggacgtgctgctgaccgagctggttcgcccccggttcggctcgtggagagccggcccctccgtgagtcttctgtcagtcattggctccctgcggtttccttggggacgtggcgccgccgccggccgggccctccttccggctgggcaaggggccgcggggagcagctcgggactgaaccgagaggtgccgaaggaaccggcgggccgcttgatcccgtgagtgtgggcgcgagagggctgtgggacccggagggacggggagaggaagcgggacccacaccccgccacctggggacgaccggttcctagaggacagagctggcccacgagaac

SEQ ID NO: 5762 - DNA, 2300 bp, Homo sapien
aacagaagtctaaatgttcttgtcatctctaattttagaagaagctcatggtgcttctactatatatatcagaaaagccttatctgccctttttccaaactgcactttgagtgcaattcaaagacttaatctcatgttagtgaaaagatcaccagtctccctgggcaacctcataacattggagaatcagagcaactacagtattcccaaccaagaattctgtcaagaaacaggatggtcagaaaatttatttaactgattttaaaaatgttttaccagattatacaagcacatagtaaaagacaaatcagtttaaaaggatatattgtatagtgaaaagtgattcttgccctgaccccacaatctctcagaggcaaacattactacccagttgctgtgtaattttttttttttttgagatggagtcttgctctgttgcccaggctggagtgtagtagcgcaatctcagctcactgcaacctccacctcctgggttcaagcgattcttctccctcagcctccccagtagctgggattacaggtgactgccaccacacccggctaattttcgtatttttagtagagaccgggtttctacttggccaggctggtcctgaactcctgacctcaggtgatctgcctgccttggcctcccaaagtgctgggattacaggcgtgagctactgcacctggccgttgctgtgtatctttccagggatattctacggatacacaagcataaatatacaccaatatatttacagtaatatatctctgtgtgtgtgtgtgtgtgtgtgtgtgtgtgtgtgtgcgtatccattccctcggttttacacaaatggtagtccaccatacctgctgttctgcatctttcccccactttattttataactttcccttattggtgcatgtagatccacattaatattttttaaaagcttcaggttattataatgtatggataagtgtattcatctgtgaagttcactttgtatattgattcaaaaggacctcggtctgtctgcttttaaagttcactgcaaacaaaaaacaaaaaaacttctttgtttaacctcctcaagtggcacctagccttgctcagatgcgaatctgaatcaatgttacaaccttgcactttacagagctgagcaagccgactcactctaccactcctggtctatgggctagaaactattatttatcagccctcgaaataatacaactttgatcgtctctgcatccaactaaccagaatacaaagtccaagtgcagctccagggcaaacctcacttgggacagcctcccagggccccccaacctgcctgccatcctctgccgtgctcccagccggagggaaagtgtgcagccttacctagccatgggttcccttcggtggtctcaacgcctgtcaccttctttttcttttgccctgagaaggtggcctccttgtcccaggcatctcctacgtctgcagcctagaaagatttgatttcaggcttctgtccgactgagcccacgagacaaacctgcacgggaattccacggctcccacctcctccccaggctcccgctccgtctgctctggttcctcaggcccaggggaccctacccgggcatcctgggagcggggcgttctcgtgggccagctctgtcctctaggaaccggtcgtccccaggtggcggggtgtgggtcccgcttcctctccccgtccctccgggtcccacagccctctcgcgcccacactcacgggatcaagcggcccgccggttccttcggcacctctcggttcagtcccgagctgctccccgcggccccttgcccagccggaaggagggcccggccggcggcggcgccacgtccccaaggaaaccgcagggagccaatgactgacagaagactcacggaggggccggctctccacgagccgaaccgggggcgaaccagctcggtcagcagcacgtccgtccgccagggtggccaatcccctagagcgctcggcctctgatgcccgccccgggactttgagccgcgcccaatcggaaaggcgtcgtaccgaggctccgcctgcagggcccgcggagagctcacaggtgagtggcgctgggcggccctgtgcccgcttccctccctggggcgcgaactctcggctggttgctttctccacggccgctcctgggacagagtagctccggtaggtgggttcagggtgttcgcgaccgaagcgcatcccttgcccataacctattgttggttttgtgcccactgaccctccctaccagaatggcagttctctcacct

SEQ ID NO: 5763 - DNA, 2300 bp, Homo sapien
tctcctaccactagaatgtaagcttcctgaggacaggaatttttgtctgttttatttactgcatgattccctggcatctagaacagcacctggcacatagcagacatacaaaccaaaaggaatgattattttggtgagaattacaacaccgagggaggccaatgacaggtttctaaccatcctcttccatctgctctccctgctcatgtcagtcctatgtggagtagaatgaaactatctttgtcttttgacgttgctatttgttagtcctaacctcagcccctctgaagcctaagaggctcagaagccacatcaagctggcttggtgctagacatgggatgacgggaataaacaggggtatgacgcagtgtttagtgaatgaacacaccatttctgttttcctttgtcagctggtagcccacaagtaactttagaaatggaacagctgtgactgtggggaaggtagagagtttgcctccaaattcatgttgcactatttctctgtggttgatccaggattactgtggcatggcttggtcggtactaactcagagattcaagaatggcctcttttcatcacatgcagatgagcatcgactcaagtaagttacttccctttcctccttagatgtggacttaaaatctagatggcagattataatggagagtgagcaataatgcagattagatttcatgttgagggagcatttgattattccagacttgattttctcagggataggggccaaaatagtgagcctattatagcaaagccagaagaaatcagtggttaccaaacagagttctcaacaagtgatttgacaacaaaagtgatttttttttttttttgagacagagtctcactttgttgcccaggctggagtgcagtggcatgatcttagctcactgcaacctccgcctcctgggttccagcgattctcctgcctcagccccccaagtagctgggactataggcacgtgccaccatgcctggccaatttttgtatttttttgtagagacggggtttcgcaatgttgccaggctggtcttgaactcctgagctcaagtgatccgcctgcctcgccctcccagagtgctaggattacaggtatgagccaccgggcccggccaaaagtgattttttttttaactttgtattatagataatatcaaacatatagaaaagtagagagaatagcaacataaaccctcatgtaactatcacacagcttcaacaaataacattttgccagtatggttcattggtcctttcatttttaaatgttttagttaaaaattgtttaaaattgccgggcatggtggctcacacctgtaatcctagtgctttgggaggctgaggtgggtggatcacctgagttcaggagttcaagaccagcctggctaacatggcgaaaccctgtctccactaaaaatacaaaaattagcagggtttggtggcaggtgcctgtaatcccagctactcgggaggctgaggcagggagaattgcttgaacccaggaggtggaggttgtagtgagctgagatcgcgccactgcactccagcgtgggtgacagagtgagactctgtctcaaaaaaaaacaaaaattgttttaacataaacaaaactagaatagtgtaatcaactcctgtgtacctgtcaccctgctttcctactaacatttatcagctcctggcccatcttgtttttatctgttttcccatccacaatccccctcttacttcaactgggttgttttgaagctaatcccaaacatcctataattacatttgtagatattttaatatgctctctgaagatagggactcttaaaaaaaagaaaaagaaaaacacagccacagtatcattattgcctttgtggtaaacacaagataagtaggctgacttagaaataacccacttagaggtgaggaaggtgaagcgggaggaggtaggtcttttaataacttgtgggaatacggagtggcttattgcaaaggaaagtattagaattcttttctctttttttaaaatttaattatttttgtcacacagatatcagtgttttaaatcggcttggatgtaccaagtcttacatgaaggattccactttccctatgactacccaaacctgcggacagcccagctggtgtatgaccgagaggttcagtggacgctgggagccattctatataaaacacgattcttaccactcaggtaaagtaagactgaccaatctggtatcttgagctcagaggatatcagttgatgcctcagaatcggtttctttctttttttt

SEQ ID NO: 5764 - DNA, 2300 bp, Homo sapien
tcttcaaggtctgcaataggtcactcccacagcacactggaaagcccttaatacactgtaatgtacagtcaagcatcacttaacaacaggggcacatgttctgtgaaatgcattcttaagcaatttcatcattgtgtgaacctcatagaatgtacttacacaaatctaaaggctgggtgtagtgattcacacctgtaatcccagcactttgggaggcagaggcagggagatcacttgggtcaggaattcaagaccagcctggccaaaatggtgaaaccccatctttaccaaaaatacaaaaattagctgggcatggtggtgtatgcttgtaatcccagctatttgagaggctgaggtggcaggatcacttgaacctgggaggcagaggttgcagtgagccaaggtctcaccactgcactccagcctaggcgatgaagtgagactccatctctcaaaaaaaaaagtacttacagaaatctagatggtatcgcctactacacccctgagctatatggtatgacttattgctcttaggctataaatctgtatggcatattatgtaccgaatactgtaacacaatggtatttgtttatctaaacatagaaaaattacagtaaaaatatggtataaaagatttaaaaatggggccaggtgcaacggctcaagcctataatcccaaggctttgggaggccaaggtgagaggatcacttgaggccagtagttcgagaccagcctgggcaatgtagcgagaccccctatctctattttttcaaaaattaggcacagtggcacacacttgtagtcttagctacttaagtgactgaggtaagaggatgcttgaggccaggatttccaagctggaggctgcagtgagttataatcatgccacagcactccagcctgggtgacaaagtaaaacgctgtctctaaaaaagaaatttagagaaaaagatttttttttaaaaaaaaggtacacttggaaaggcagctccattataatcttatgggaccatgactgtatctgtggcctgttgttgaccaaaatgttgttatgcagcacatcactctaccttcaggttcatctgtttgtatctcccactaaactatgagctttggggtggcagtgtccggtcagtcttgctctctcccttctgctagctttgtttctaacactgttcctttatataatgagaccatgataaggatttcgcaaatgaataaactgacttcctccagggcaggagtcttgtaatatttatctttctttttccagttcctaatatataataaccactcaataattactagttaagcaaatgcatgccctcttcttactatatccctgtgagtccaaagatccatgctcggtttcctatttctgattaactgagtcacctttagaaaagtaactttaagcctcaatttccttctctgtaggatgcagtaatacttcctcatctgactacttggaactttttaagcaaaaataaactatatgggtaaaaattactcagcttttaccatgtgctaaaggcctgatgtatattaaagaatgtaatcctcataacaaaccttaaagtaggtattgttatccccattttacagataaggaaactgaagaacagaaagtttaattaacttggccaataccacacagcaggtcaatgttccagatctgaacctaggggctctgatctgaacctatgcgttgtgagtgcactgtaaggagctccggaaacgtgatgtggggctctacattatctttatcccggccctttcactccatccccgctcccgcgactcggagtccgctgcagtgcggtacctgtgctctaggcgctgccctaggagccaggagcggcagatactgcctccccttcaaggccctcaacggcggaaagagcaatcgctgcatactgatgacagggaacagccacctcttccacaacccagggctctgtggtctccctcctccgccaaggaaaagagaagcacttccgggtcgggcagcgggagccccgccttctctggggaccggagcgaacagaagtgcgcctgcgttgcgactccgctttcgcgggggctgctggggcgtaggtgtcggggacgcgcgcacgggcgcgcgcagctgttgacgcgcttcttagctggtgcgcgccggagcccaaattccaagtggaaactgcaggcgcacgagggaggaacgcgtggagcatgaaaaggcagggggcctcctctgagcgaaaacgagcgcggataccgtccgggaaggccggtgcggaaggtggcgggggaggg

SEQ ID NO: 5765 - DNA, 2300 bp, Homo sapien
atataaattagccgggcgtggtggcgggcgcctgtaatcccagctattcaggaggctgaggcaggagaattgcttgaacctgggaggtggaggttgcagtgagctgagatcaggccactgcactccagcctgggcgacaagagccagactccgtctcaaaaaaaaaaaaaaaaaaaaaatactatcagtcccaaactgtgaaagggttaagtgtcaatctatgctcttaaccaacagctctgcattattaactccatgagtttcctggtagctaccagaccagctgtcagatcagtggcactggccgatgctgatgctgccgggggactatttgcctcacacaagaaaggaccctaggcaggagaagatggagagatgtataaaaaaggctatgacagaaggcagagcaaggcagttgtcccaagcaacaaagttataggatcaaaggagaagcagcagcagttctcaaagtgtagtagtccagagagctttgggagcctctgagacttttcagagtctgcagggctacaaccgttttcttaataattctaacactttatttgactttttcactttaattctctcacaagtgagaggcgttttcttttttgaggcagagtctcactctgtcacccaagatggagtgcattggcgcgatctcggcttactgcaacctccgtgaagaggcgttttcaagaggctacttgacatgttagactgaatgaagcagcgggcatgagaatccagctgtcttccattaagatatactgaagaaacttgcaaaaatatatttccactcttttgctttttttgttgttgttgtttaggaatatttctttttcaaaaaaatattatgtcaatatgtaatgggtttactatggttattttctaatcaatattttaaaattttgttttaattttatttttatttttttgagacggagtctcgctctgtcgcccagggtggagtgcagtggcgcgatctcggcttactgcaacctccgcctcccgggttcaagtgattctcctgcctcagcctcccgagtaactggtattacaggcgcctgccaccatgcccagctaatttttgtatttttagtagagacggggtttcaccatgctggccaggctggtctcgaactcctgagctcagatgatctgtccccctcggcctcccaaaaaaaaatttgttttaatttctaatacagtcaaaatagatagatgtaatccacataaagaaaaaatctttgaggattcttgataacttttaggaaggttcctcttcacggaggaagagggacttgccaaattctctggcacctgccatgccatgctaccctggcactcaggaagaactcgggtcttggagcagccacaagctcggccacttggtagctgcgtgactttggggaccaagccccgtccccgccgtggcagctacaggtaactgcaggttaggaactgggctccgcgctcgacaattaactatcccagcggagtactggctgctggtgcgggcggtactggcatcctcgtgtggcgacggaaaaaacgtgaagctgaagttaaccaacttgcacaaggtcgcagggccgttatgaggggaccccgggactcgaaccttggctccacagctgagccattctcgctacctgcccctcgtcacgccctccgtttccacacctttaacgcctcaaagatagaaggtgccgcccaaggggctggaaggagctgaggaaacgactccagaagaaatcaccactgactacgactcccgccggcccgccccggggagccttcggccgaccgtcccctcccccgccaccttccgcaccggccttcccggacggtatccgcgctcgttttcgctcagaggaggccccctgccttttcatgctccacgcgttcctccctcgtgcgcctgcagtttccacttggaatttgggctccggcgcgcaccagctaagaagcgcgtcaacagctgcgcgcgcccgtgcgcgcgtccccgacacctacgccccagcagcccccgcgaaagcggagtcgcaacgcaggcgcacttctgttcgctccggtccccagagaaggcggggctcccgctgcccgacccggaagtgcttctcttttccttggcggaggagggagaccacagagccctgggttgtggaagaggtggctgttccctgtcatcagtatgcagcgattgctctttccgccgttgagggccttgaaggggaggcagtatctgccgctcctggctcctagggcagcgcctagagcacaggtaccgcactgcagcg

SEQ ID NO: 5766 - DNA, 2300 bp, Homo sapien
gtatctaccatggtacacaataatcaaatatttactaaaagctgaataattacaacaaaattaatgtatttatattacaaagtgtgatgtaaacagagttttgagtttttttccgggagcacataatttaaaaaaatgaacgaaacaatgcacacttcatgtaatgacacttactagaatgttcctcacatactggtaatggtcacttctggtggggtgtgatttgaaattatttttattttcttctttttacttttctttattgctttattttttctacccaatattgcttttataatttaaaaaagcaatttttactttgaaaaacaaataaaacaaaaacctatcatctgctaacatcaaactgcaattgccttacttatttaagactatcagtccctgtccggcgcggtggctcacgcctgtaatcccagtactttgggaggccaaggtgggcggatctgaggtcaggattttgagaccagcctggccaacatggcgaaaccccatctctactaaaagtatataaattagccgggcgtggtggcgggcgcctgtaatcccagctattcaggaggctgaggcaggagaattgcttgaacctgggaggtggaggttgcagtgagctgagatcaggccactgcactccagcctgggcgacaagagccagactccgtctcaaaaaaaaaaaaaaaaaaaaaatactatcagtcccaaactgtgaaagggttaagtgtcaatctatgctcttaaccaacagctctgcattattaactccatgagtttcctggtagctaccagaccagctgtcagatcagtggcactggccgatgctgatgctgccgggggactatttgcctcacacaagaaaggaccctaggcaggagaagatggagagatgtataaaaaaggctatgacagaaggcagagcaaggcagttgtcccaagcaacaaagttataggatcaaaggagaagcagcagcagttctcaaagtgtagtagtccagagagctttgggagcctctgagacttttcagagtctgcagggctacaaccgttttcttaataattctaacactttatttgactttttcactttaattctctcacaagtgagaggcgttttcttttttgaggcagagtctcactctgtcacccaagatggagtgcattggcgcgatctcggcttactgcaacctccgtgaagaggcgttttcaagaggctacttgacatgttagactgaatgaagcagcgggcatgagaatccagctgtcttccattaagatatactgaagaaacttgcaaaaatatatttccactcttttgctttttttgttgttgttgtttaggaatatttctttttcaaaaaaatattatgtcaatatgtaatgggtttactatggttattttctaatcaatattttaaaattttgttttaattttatttttatttttttgagacggagtctcgctctgtcgcccagggtggagtgcagtggcgcgatctcggcttactgcaacctccgcctcccgggttcaagtgattctcctgcctcagcctcccgagtaactggtattacaggcgcctgccaccatgcccagctaatttttgtatttttagtagagacggggtttcaccatgctggccaggctggtctcgaactcctgagctcagatgatctgtccccctcggcctcccaaaaaaaaatttgttttaatttctaatacagtcaaaatagatagatgtaatccacataaagaaaaaatctttgaggattcttgataacttttaggaaggttcctcttcacggaggaagagggacttgccaaattctctggcacctgccatgccatgctaccctggcactcaggaagaactcgggtcttggagcagccacaagctcggccacttggtagctgcgtgactttggggaccaagccccgtccccgccgtggcagctacaggtaactgcaggttaggaactgggctccgcgctcgacaattaactatcccagcggagtactggctgctggtgcgggcggtactggcatcctcgtgtggcgacggaaaaaacgtgaagctgaagttaaccaacttgcacaaggtcgcagggccgttatgaggggaccccgggactcgaaccttggctccacagctgagccattctcgctacctgcccctcgtcacgccctccgtttccacacctttaacgcctcaaagatagaaggtgccgcccaaggggctggaaggagctgaggaaacgactccagaagaaatcaccactgactacgactcccg

SEQ ID NO: 5767 - DNA, 2300 bp, Homo sapien
tttttttgattacttagaacgtttaggccagacacgatggctcatgcctgtaatcccagcagtttgggaggccgaggcgaatggatcgcttgagcccaggagtttgaggctctacaaaaaaattaaaaaaagaaaattaggtgttaatccttgaccttatatttctcaaagttttaccaagagttcccccggactccgagtcctaccaccagtgccaagagaagtatgcagcctaaaggtgcaccctgccccaagtgagatctcttagttccacagctgacctttcctggctcttctggtgagtggtatggaaaatgatggagaaactgccatatgttttcataatggtcagaccaatttacatttccatcaacagtatactagggttcccttttctccacacccttgccagcacttatcttgttgttttttttttttttttgtaatagccatcctaataggtatgaggtggtatctaactgtggttttgatttgtgttttccagatgacttgtgaagttgattcagttgtcatatacctgttggccatttatatgtcttctttggaaaagtgtctgttcaagtcctttgcccactttttaatttgttagtgtatgtttgctattgagttgtatgagttccttatagtatattgtggatattaactcttcatcagttatatggtctgcaaatattttctcccacactgaatgctgccttttcattttttttatgtgtatacttgacttttaaaatcagtaacaaggtccatacaattcacatttggctgatatgcctcttgattctcttgtaatttgtaagttcctttgactcctttccttcttttaatttatttattaaaaaatggaatcatttgcactatagaatctcccacattctggattttgacaattgcattccaatggagtcctttagcatgttcctgtgtttcttataatccggtagttagatctagaatttgaccagatttaaggccaattttttttagctaggatactgcatgggtggttatgttttagctaggataccgcatgggtggttcatgatatcatgaaaaaagcatgttcttaaagcaatttaagtgacagtacaaaaggttgggtcaggtggggcacggtagctcatgcctgcaatcccagccctttgggaggccaaggcagaaggattgttgaagcctggagtttgagaccagcctgggcaacatagtgagaccccgtccctacagaaaacatttttttaattagctgggcttgttggcatgtgcctgtagtcccagctactcaggaagctgaggcaggaagatcgcttgaacccatgaggtcaaggctgcaatgaatcatgatggcaacactgcactctagctcaggcaacagaccaagaccctgtctcaaaaaacaaaaaacaataacaaaaaaagaaaaggttgggtcgatgacagtttctagcgactgatgccaccactctgtttacagaatcacccctctcctctggccctgatgttttatcatgatatcatatttacaatgcctggcaaaggcttcattcccatttggcatactacctctcaggcaaatagaacttttgaaagcctgtattatgtatataacatataggctcacactggataagctattttataacctgacttcttcaaagaaagtttacatcatgtttaaaccatgttttagattctatatttttaattaaaaatctaaggaagaaggatatttcacatttctataaactctaagatcttgcagcagaagcgaaactgcacatttaggggtgcctgcccctctactgatgctgccctttgtgggtcatatgtccttaggaaaatgaaagactgtgcactcttgatttgttggccagctctgttgacatctttcagtggttccttttatgtatggccactcctacagaggcctcttgtactttgggaactggtgagtctccctgtccctagggctttttagtcacatgtccatccactgtttcaatgtaacatgcatctaggcaaggttaacgattaaatggttgggatgaaaggtcatcctttacggagaacatcagaatggtagataattcctgttccactttctttgatgaaacaagtaaagaagaaacaacacaatcatattaatagaagagtcttcgttccagacgcagtccaggaatcatgctggagaagttctgcaactctactttttgggtgagaaattacatttatcttcatattgactcttctcagactcagaacaagtggtagttagttaactt

SEQ ID NO: 5768 - DNA, 2300 bp, Homo sapien
ctgtctaggtaatttatgttatattgggtggcattttataaatgcaatcatattaatatgtgcaaatatgcttaaatgtatcattgttcacagtcttattgtgggcaaactgtggctctaattatcaggttaaattgtgctctagaattgcaccactttgctattagctaccagatggctaccaaaacccaaaagtggaattccaggttagaatgcatatggtttgccttcctgggaaaaaaagagacagaatagctattggtaaagagcacagactctggagccaaggtaggttgaaatctcagctcttctacttactggggcagttacttaatttttcttccttcctcatcagtaaaatggggacaataatagggtgttttgaagctaaattaatatttgtaaaatacctagaacagtgcatgacacacatagtgccatataaatatttgttttcttttctttttgacacagggtctcactctgttgtccaggctggtgtgcagtggagctatcacagatcactgcaacctcaacctcgaaggcccaggtgatcctcccacttcagccttcggagtagctgggactacaggcacgtgctaccacgcccagctaattttgtttgttgtttgttttgtagagactgagggtctcactatgttgcccaggctggtctcgaactcctggtttcaagtgatcctcccgcctctatctcccaaaatgctggaattatagtcatgagccactgtgctcagccagtatgacttttttttttttaattattttgttcctgtgaggttaaaaagtactggttaagtttgagtccccattgatctcaacttctcccccaaatcctaggtccttccctgagacaaactctgggatgaatttcgtgtgttttccttccagacctttctctctacacttacataattttatatatatgcgtgtgtgtgtgtgtgtgtgtatgtatatatgtatatgtgtgtatatgtgtgtagatgtatatatgtgtatatgtgtatatatatgtatatatatgtgtgtgtgtgtatatatatatatatatatatttttttttttttttgagacagagtttcacacttgttgcccaggctggagtgcaatggtacgatctcggctcactgcagcctctacctcccaggttcaagcgattttcctgcctcagcctcccaagtagctgggattacaagtgtgtgccaccacaccaggctaatttttttgtattattagtatagatggggtttcaccatgttgaccaggctggtcttaaactcctgacctcaggtgatccacccatctcggcctcccagggtgctgggattacaggcctcacgtgagccactgcgcccagcctatatgtttatatagaaatatgtatgggtttttgcagattttcctttctttcgtctcttttccccgttctccattttcttacaaaattgtgcattttcttaaaaaattgtggcatattgttgtgtgcctttcttctccctggttcatttaagtgtaaatgtttggaagatgtgagcgggactcccagttcctgtgaatcactcctgccatccctgttcttgctgtcctgggactacccagctgaaatctgctctgtgatggctttagggttcattgcctaaaggagggggaggtttggggtcccttggctaagctgtgggtgaaagactgcataaagaggctcaggagcagactaaacaggcaactgctgcccacttcacagttttgcctctcatcacaagagatggctgggcctttggaattctttcctcaaaagggcattccccatttcccacgcaaaacaacaacaaaaaggcttagcatggggtagaaaaggaagagataataatcttagattcaaactccagaggtggaatttcgagggttttaggactaggaaagaacaccaaatagaaaggaaggtgttgatccaggtactgctgggcccgctggtgcacttctcagtccagtacgcttagggttccagctccatcctttaggacaagccctgctgtgatagcccgggtgacttgcgcgattcatatgtaaatgtgggaagcctgggggaaatgccgaccctattcaaaggagtttggggggttgtggagcattccagagctctgggaagattctgtcccgcctgcttaccctcaggcccacacctccacacacagccagctctgggcactgcaggtaggtcctggggtgtgggagccagcacagaaggaagtggaacaggcagcctcttcgtccctgttcaaggg

SEQ ID NO: 5769 - DNA, 2300 bp, Homo sapien
ctccctctgactttcctaacactttttttttctgtgcactctgcagagaaatacctaacacttttctgatattctaaattcatctttgcagactcaatctacggctgtgcttctgccttcaaatgtggtaatgctggaaaagcattctaggtgtcaagagagccagattctattcctgccctaatccttgacccagttaccttggaaacacatttcaatttctctgagctctatctcttcatttataaaataaatgggttgtatttaagtgtttttcaaacattttttactgtgacccacactttattttttattttatttttttgagacacagtttcactctgtcgcccaggctggagtgcagtggcacaatctcagctcactgcaacctccacctcctgggttcaagcgattctcccgcctcagcctccggagtagctgggactacaggcgcccaccaacatgcccagctaatttttgtatttttgtacacagggggtttcaccatgttggcaaggctggtctcaaactcctgacctcaagtgatctgcccacctcggcctcccaaagtgctggtatttcaggcgtgagccactgtgcctggcctgacccacactttaggctgtaactcacatttacataatacatttatgtctatacacatacacatacacaaagtattacatgcttacttttactacatagaatgtagtatgaaagttttttctatttacttttatttttcagaactgctgattgcaacccccaaacagacttcaagacccagtcatgagtggctacccattatttacaaaaacatgggattgtggctatataagcttccttccagtaataacataagaggctcctattttgtagccttccaaccctgaacctttagccctctctagttttgtttagagccctctctagtttcatagttttctctgtaagagctcttcatttagatatcctaatattatttacatgcaaaacaggtaacgtggaatttgaaacaccaggtccccttctcatcataaccatgtatgttattagcaagtgcaaaaccctagtgcccacacttggtctagtaatggtagagtagctcacattgtactaatctccctacttataactaccaaaaacactttacaagatttatttttttaacttttatttacttttatttttctagagatgtggtctcactctgtcacccaggctgcagtatagtggcatcatcatagctcactatagcctcgacctgccaggctcaagtgatcctcccacctcagccttctgacagatattttaaaaaataactatatgcaggcactgaaaagcaatcaaaagcaggcagaatttggaggggatatgactcaaaacaagggaagcaaactaggtaagatgcacctgtctccagtcctcccctcagggcactccctagtcttttaggacgccgggaaataaagcaaaagaagaaagcccacatggggcaatcttactgggctgagcagccaaaggttccagtctgggggctctgaagacattagctattaagggggaaatcctggaaaacagtaagccacagagaggagagccccaaaatctgtgcagaaatgcctctcaatccttcaactgtgcatgcaggtgatgagactccaaggaaccccgtggaaagctggaggccagaagagcccagcagatagatcttcaccaactgtctggctctgggaagacacagtttgaaatttgagtccctccaagttaggaggttcaataaacacttccagttttctgttgaaacctccgaagggccacaccttaggaataaggcccacctctcagaactagaggtccacaccctaggactaagagcaaacccctaacagacctgccctaaaaaaacctcagatggaggcctcaggagaatgactgatcaggccggtgagaaaggaaagcctgggggaaaacttggcttcctgcctgggggagaggctggagagcagccactgaacagagctctgtctcagatggaggaggggtggcaaggggaagacgggagaagaggaagggacaggacattccacttagacaatcaaacttgaagtgtttacggtctagggtagatgtccaacagggagcagggactatcaatctggaactcagagacgaaaccatggagtgacaggtgggtggcgcaacttataaaggggaagggaggtgggcagataaaacacaaagaaatggccatttatgagcacctactatgttccggatatgtgactgttttatttttc

SEQ ID NO: 5770 - DNA, 2300 bp, Homo sapien
cctcaaactcctgggctcaagtgatcctcccacctaggcctcctaaactgctgagattaaaggtgtgggtcaccatattctgcctcaatgcccctgttttatagccctgttactgaaccgtaagtctctgtttttcatcagaaagagtcatacaagctattcccctgggatcctaggtgattccttaggaacggatcactttttccattagattggtatctccagaataactagtggtcattcccagacttctgaaatgccaatatgaggaactcctgcacgagcaagaccagattttgagaacagaaaaataggaagtgtggtgacccttagggtcagcctgagcctttgactcatgcacaattaatcccagccacactgcttgtttcctctggttggattttttatttgaacaggaaatgcattaggaataaaatggtaaaaaggagtgcaggtcttcttagaatcggatatgagcagtctgactgcagtcctgggttcctcacggactccttttgggctgtctctaaatgccaggggaactatgtgctttatgcagcctgaccacgtagagtattttattcaggtttccatacgagccatgtcagaacttctttcctgagagctcacattcatggcatcacaaatttacaacacatgtgctttgactgatgaataccactggtcaatttgttttttattggccttttgtttgagggggcaggtgatctagaaacatgctgggggaatccgaggagtcattgtggccaactgcctcattttattgatgggtagattgagttccagagagaattagtagttacccaagagtaaacatgtaattattaacaaagcatataaggcagttttcctcagggttctggatattatttcacaaataaggattaaagttcaaggaatcattcctagatatctaagaaatgaccagacagctaaaagagtaatcttattaaggcctgtctcttagcatgtgtttcccctgctcaaaaacctcatgactctttgctttccattgaataaaataaatgtcattgacatcctctggggtccaccccaacctatctcttcagcctcctctcttattttccacgtattatatccttcagatgattccccatttcttagtgctccatatgtgaagtctgcagagatcctgcttctcctagaagtcactgttcacatccaaccgcttccctgaagcctccacttgccatgccagggactttgctttggtgctgttgctgtttgtctttgctccatagcacttatcacattagatctttctttaagcgtgttgcttctgcattgtaagaggcagggactaatttgtttgtctttttctgttccacaatgcctcctctatgataggtaaccatctaatatttgttgatttaaatagccatttacctgcctttttgatttctggcctcattttcgacttcttaaatatgttgtatgaattaactagaaaagaggtttaagaaatgaatgtttttgatgcttccctggcatgacaagtatctgggaaaatgtgaaagcatacctaactccattctgggaagaatgtttacgctataaaatcacctactcaccagatcaaagtaaaaggaagtactttttcttccttcagtcgtatgactaactgtctgcaggtgggagcttcagcagcttgcgattggagtgtacactaactggtgacttcaattccagaaaagcaaagcagtcagaagagtcctgactctaagttaagggatgaagtcctgaaaggtttcagatgttcaaggattagaaaggtggacttggaggatggggaatggaggtgcagcttgagaaggaaagcacttgtttatacccctggtggcttactaaaggattaaagaggcgggggagactgatatatgacctgacctggacttctaaaggggtgctgtttctctttcacacgacttttcctgcaaaacctttggagtagcagaatgcctctatcttcagcaagtaaagcagccaagccagtttgaccagcttgagggaaacaccaaacaaagctggcaactccaatcacatgcatactagttactcattatcttctggcctctggagaaagatagagtagctcgctgattggatcctgaggttgaaataactccacatctcactgcgctccgactagagcaacgagaagagtgtctggaatggttgggagacattttaagcaggacaaatccagccttaggctagactgcacctgtccacagcccagcccaggcccatggaaaaga

SEQ ID NO: 5771 - DNA, 2300 bp, Homo sapien
gctgattggttgcggatgcaaccatagggatgtggacagtggtcctcctgtaccaagtccctttctgggtgggaccacaggactggttggcaggtccaggtggagccatcagtcctcagaaatgcaaaagcctgaaaagacatctcaaaagattaatcttaggttctacagtaatggcgttatctgcaggggtgattgcggaagttgcaaatcttgttaccttctaaataatggctagtaatcctttatgtctatatcttagcagaattaggctcctctcatccttctgacttggtgacctttcattagttttacaaaagtggtttagttttagaaagtggaagggctatttccatttcaactgtaaactaaatttctcccacagttggcttaggccaagcccaggagtgatcaaggacagtttggaggttaaagacaagatgagggttgtttagatccaatctctttcattgttgtaattttctcactgttataattttctcagtgttataatttttgcaaagaggttttaccatctacagagctgtgctagagataggaagacaagttagaccatcctagccctcaaggaactttcagtataataaaaggaggtaagcaagtataatgaagtaacagcataggttagccaagagagatatttgcaaggttctctggaaaatagcaagaactgtaggaatcagaatgtcactgggcagagtcctagagagtgaggagttgttgaccctcagtggagcaacaacatgggcagtcacagaggaatccacaaaagtttagggagttacatattcttgctctttttttttttggcacacttttctcccttttttcctttacccttcttctaccttctctgtctcttctctctccttccaaatcctacttctccatcctcacttctagaataggtggcagtctatccactctgggcatcacacagatagtcatgatggcccacccactaggagcaaatagcaaacatcacggtgaggtggtgcttcaggactgctgaaaagagccagtggagtgtgactgttgtgtaaagtgagagggggtgctgaaggagggatggttgtctacagggttctatttcaccagcagtcctaccattgagaaaagtagaaaagtcatcctccctctttcctcggccactttctctgtacacagatttattactcaaaaatggcaacccattcacagcttttgtttagatctgagtcatagtagtgtggagataaagctgagggagtttacctctttatgcaaactgcttatctttaaagtcctaaaggcaatcggacttagaaagggtgggggaagcccccttttgtaaccaactgttcactctccacttgcccaactataatttcttttttttattttttgagatggagtctcactgtgtcaccgaggctggaatgcagtggcacccatcttggctcactgcaacctccgcctcccaggctcaagcgattctcctgcctcagcctcctgagtagctgggattacagatcctgccaccacacccagctaattttttgtatttttagtagagatggggttacaccatgttggccaggctggtttggaacttctgacctcaagtgatccgcccaccttggcctcccaaagtgctgggattacaggcctgagccaccacacctggtcaataatttctttttataactaggatccttacctacaatttagtcctctctttttatctcttctcttggttgattaggtgtatttttcttatcttgctagctttatcaaagatatcaagttgctagtgaactttgttttccataacagagaaagtttaatcttttaattggattagaaataagcaagatcatagaattgtagacttaaagtggcagagaaatcattaatgtccacatttcctacataggaaagtgacagccaaagagggtaatcatacctgaaaactggttattagcagaaattgaacttctagaaggcaggtgtcatttcctcatttggtctccagtgctctctctgttacactgttgctctgttttaacttgtggtgaaagctgtcctcccgaataatgttgacttcctattggtttggtgaaccaagtcacaatctttgttgggtttaggtgataggttgtaatgactgagtcactcagtgctgggctgtcttgtgtgtcactgccattctgtgtgctcatggtggttggctggtgaggcccagctgagggcagggttggtcggccaggactggaaacaaagagagaatggtggtgttg

SEQ ID NO: 5772 - DNA, 2300 bp, Homo sapien
tctggcataggatgctaaatcttgtctggaggtgccatctacatagtcctttcttcctttcttacagatttttacttttctaacttttttttttataaaatagaggtgaagtcgtgctgtgttgcccacgttggtcttgaactcctgactgcaattgatcctctagccttagtctcccgaagtgctaggattataggcatgagccattcaatagattttccctttccttttcctttttccttttctgagtctcactccgtcacccaggctggaatgcaatgaatggcatgatctcggctcactgcaacctcggcctcccaggttcaagtgattctcctgcctcagcctcccaagtagctgggattacaggcacccgccactgtgcctgactgatttttgtgtttttagtagagacggggtttcaccatgttgcccaggctggcctcaaaactcctcacctcaggtgatctgcccgccttggcctcgcaaagtgctgggattacaggtgcgagccaccgcgccagtccccaacaggttttccatctaggcctttgaggcatagttctgctgctgttcttcaggttgtggtacatttgtttgcagatagtctcagtaggtaggaaccagaatgccctcagtttgagttctggccctgctgctgtgagcactgtgatcttggacaaataatgttttctaactatactgagccttagtatcctaatctttaagatctatagggaataaaatgccatatttaaaatctctactttttaaagtattgtattttaaaattaccatgttgtctggtgttttaaaaatgttaatttcattactgccctcttcaggcattctgaaaagcctacatttgctgacacttgaatcttttctatcactgagaggtctagggtttttgttttgttttgttttgttttgttcctgaattcctttgcggtccaaatgaaaaatatatgaagaaattattatttttaaattagaccaggtgcggtggctcatgcctggaatcccaacactttgggaggccaaagcaggaggatcactgaagccaggagttcaacactagcctgggtaacgaagtgagatctcatctctacaaataaataaataaataaataaataaataaatgccgcaggcagtggctcacgcctgtaatcccagcactttgggaggctgaggtgggcagatcacttgaggccaggagtttgagatgagcctggccaatgtggcaaaaccctgtctctactaaaaatacaaaaattagttgggcatggtggtgcatgcctgtagtcctacctacttgggaggctgagccttgagaatcacttgggaggctgagccaggaggcagaggtggcagtgagccaagattgtgccactgcactccagtgtggaacacacagcgagatttcatctcaaaaaataaaaataaaaagtcaggcacagtggtgtgcgcctgtagttccagctactcagaaagctgaggtaggaggatcacttgagcccaggagctggaggctgcagtgagctatgatcacaccactgcactccagcctgggtgataaagcgagacctgtttcccccggcccccaaaaagggaaaaagaaatgagaaataactttgatattttaaaatatgaggccaggtacagtggagcatgcctgtaatcccagcactttgggaggccagggtaggcagattgcttcagcccaggagtttgagaccagcctgggcaacatggtgaaaccctgcctctagtaaaaatacaaaaaattagctggacatggtggcacatgcctgtagcccaagtttcttgggagactgagctgggagaatcacctgagcccaggaagtcgaggctacagtgagccatgattgctccactgcactccagcctgggcgatgggagtgagaccctgtctcaaaaataaaataggaagtactaacttatttgcttagctttggcttcattttaagtatatttgtatcttaagctttatcattccaagaaatagatctatattgcagtgtcttaaatattgatgttttctatttctcttgatctatctttccaggttataaaacatggaggctggctcagtggttcgagccatttttgacttctgccctagcgtatcagaagaactgccgctctttgtgggagatattattgaggtgctggcagtggtggatgaattttggcttctaggaaagaaggaggatgttacaggtaagtaagagactcatagtggaccacaggccctgacttctttccatattaaaaa

SEQ ID NO: 5773 - DNA, 2300 bp, Homo sapien
taatcccagtactttgggaggccgaggagggtggatcacctgaggtcaggagttcaagcccagcctgaccaacgtggcgaaaaaaataaataaaacgaaatgcttgatttttcatctgaatttcatatggcatacttgactccaaacaactttagaaagctacatccacagaaaacaaaattgtaggaaactgaataataagttatttttattttggctaataacattatccaaaaataaagacaatagatttgcaatgttaattactttcttgaggaaagaaaagtcacttgttttaaaatatttatttatttatttatttatttatttatttgagacggagtctcgctgtgtcaccacgctggagtgcagtggcgcgatctcagctcactgcaacctctacctcccgggttcaagcgattctcctgcctcagcctcccgagtagctgggactacaggcacccaccaccatgaccagctaattttttatttttagtagagacagggtttcaccatgttgaccaggatggtctcgttctcttgacctcgtgatccgccgaaaagtcacagttttacaggcaaatgaagcattgctaagaattttaaagactctccgaacgttgatattttactacaaaatgttctctttacagtgttaacatgcttcaaaaagcaaaggaaaaaaaaacagtatggtggcttctcaaaaaattaaacacagaattaccacatgatccagcaattcttctggatatatacccaaaagaattgaaagtagggactcagatatttgtacacccatgttcattgcagcattattcaccatagcctaaaggtacaaacaacccaaatgtccacagaaagatgggataaaccaaagatgttatatacgtacaattgagtattattcagccttcaaaaggaaggatattctaacgcatgctacaacatgggtgagccttgaagacattatgctaggtgaaagaagccactcacaaaaggacaatattgtatgatcccacttatatgaggtatccagagtaatcatagagacagaaagtagaatgatggttaccaggggctggagaatgaggagttagtgtttaatgggtacagtttcagtttgggaagatgaaaaagttctggagctggatggtggtgatggttgcagaacaatgtcaatgtacttaatgccactgaactgtacacttaaaaaggattaaaatggtaaatttcatgtgatatatatttaaccacaagtttttaaaaagcaaagggaaggagaaacatatacagcatgggatgagatttgtgaaatatttatttttgttgtgcatgcacagtcatagactcgccgccttcttcagaatcctctaggtagattccagaaacgtgaggcgcagcaattccagcaacatagccaagctgtgtaacttcgtggtctttaaacaaacaacgggaatactgcggggattcagaaactgagtcggaggaggagttctgacagccctgcccagttcttgcttctgtcatttcttgctctcaaattctcaaagatgtcctgagagactttcctcagaaaaaaatgggacagatagaggcgaaccccagcgagtattgtgtggcataataagggaaactgcctcggggtagcaaagaggacagcatcacacgcagacaggaatcgacttggacttctctgaatggaattttgacttttttctaggttggagggtggtgtcgggagtgggggaacagcaagagtggaggaacttgtccgcagccggggctgcacgtaggactgcgtgaggccgaggcccgacgagccgtgtcggcgcgctgcggcgggggcgggcccccgtgcctcagtttccccggtggccgttctgggagcgacgcccctctgacgtcgcgaggcgagcagggccgggccggccgccagggggcgcgagcgcggggcgggcgccggagaggtgggcgcgcgggcagcggagcttggcgcccccggggccgcgcggaccgcgccggcagaggcggaagcctgagcgggaggcggggcggcgcgctgactcacacgggatcgacccgcccgccgcttccaggggcggaggtgacagcgggctggggactggcggctgcaactgcctgccgcgccgagggaccgccgggcggcggaaagcaggtcagaggccgggccaggccggagccgggcgggggccgggcggggagcgggggtcgcggtccggggccgcgggcggaggggacccgcaccccgagagacgcgccgcgccgcgccgcgc

SEQ ID NO: 5774 - DNA, 2300 bp, Homo sapien
ttctgtctctataggtttacctttgcaggacatttcatataaatggaattatacattatgtgtttttttcatgtctggcttctttcactttgcatagtgtttttgaagttcatccacattgtagcatgtagtcgcattttattcttttttttgctgaatagtgttcaattgtatggttatatcatattttatttattcaccagttgatagacatttaggtagtttctactttttgcctattatgaataatgctgctgtgaacattctgtgggcaagtttgttctattgggtacatacccaggaatggaattgttgagttgtatggtaaatttatatttaattctttcagagggctgtacttattttttattcccttttaaaaacagctttattgagatacaatttgcatatcatagaattcatctgttttaagtatgcaattcaatgaattttagtatatttatcgagttgtatagacatcaccatcaccacaatctaattttagaacatttctatcactctaaaaagaaattttgtgtccacttgtggtgttttgggtctggcttcttttaccaggcatgtgtaagattcattcacattgtacaatatattagcactccactcctttttattgtcaaatactatttcattgtatggatatgccatattttgtttatccgctcagtggttaatggacatttgggttgtttccactttttgtctcttgtgaacaatactgctatggacatttatgtacaagtttttgtgtggatgtgtgttttcatttctcttgcataggtacctaggagtgaaactgttgtattatatagtaagtatatatttaaccttgtaagaaactgctaaactgttttccaaactggctgtactatttatttgtttatctttattttttattttttttgagatggagtctcgctctgtcaccaagctggagtgcagtggcgtgatctcagctcactgcaacctcctcctctcaggttcaagcaattctcctgcctcagactcctgagtagctgggactacaggcgtgtgccaccatgcccagctaatttttgtatttttagtagagagggggttttgccatgtttgccaggatgatctcgatctcttgacctcgtgatccacctgcctcggcctctcaaagtcctgggctacaggcatgagccactgcacctggtctggctgcactatttatgagggttccagtttctccctattctcaccaacatttgttattgtctgtcttttttattgtagccattctagtggaggtaaagtatatttcatgtgtgatttttgtttgtttgttttttgagatgaggtctcactctgttgcccaggctggagtgtagtggcatgatcatggctcacttcaggccccaccacccaggttcaagtgattctctgcctcagcctccctagtagctggaactacaggcatgccatcacacccagctaattttaaaaatatttgtagaggtggggtcttgctatgttgcccaggctgatctcaaactcctgggctcaagtgatcctcccaatttggcctcccaaagtgctgagattataggcatgagccaccatgactggatctcatgtggttttaatttgtatttccttaatgactaatgacactgaacatctttaaatgtgcttattagccatttgtatatctattttggtcaaatgttttgcccatgttttaattgggttgtttgttttcttattgtattgtaaggattctttacgtattatgggggtattatcggatacatgatttacaattgttttctcccagtccgaggctaatcttttccttttcttaatggcatctgttgaaagatttttgaggaaaaaaaggacaaaatacagccatgcttcagaaagataggcaggcagcagtacgtgggatggatcaaaagggacagagaactctttttgaaagttgtaataaaaggaacaggcacaggccaagttttaaaaaattctccaggaatcaaagggttataagcagctatttattgaagcctgtttacagtccagttaaccagtaaaccagaatcagtgaaactacccatctggggaagtgcaaaaaacctttcaaaaggctttcctggattagagaaagaaagggagtgagggaggagagatgagtggctattccagaacgacataaagaatttccagccttggacggacagctgggaacgtcttccaatttggactggtgtttacaagcgggaagctaggtggaccttggattttggcgggtgaagagg

SEQ ID NO: 5775 - DNA, 2300 bp, Homo sapien
attatgcagggataacatcatttgttatatctttctcgactattcttaatgtatatgaacaaatgtttgtagatataaatgcatacatgctcaactaaagcagaatcataccatacttgcttttttcactaacattgtctatgaacatctttccaaaacaaaaatataggtttggtaaatcattacttttaatggttatatttagtgaatctctatggtttcaaattttttactactgtatgcatgttggaatgaccaagcttatatattctgtacatctttttaaatccctctcttacaataaattcttgaagtgggattgatgatcaaagtgtatgccctgtttgggggcttattgatacatactaccgaatcaccttttagaaaaattttagcagctccccccctcattagcagtgttggtaagctgtagttcttacacatttgattgcatgattgtacccaaataattagcagatgcaagctttccctttctctcttaatccttttggagaaaattagtctgttattttgtgttaattattgaagttgaataccctaggttattagctgtttttatttcatttataaattgttggttttgctcatttttgtagttaatggtttttctaactgattttaataagctatttttggctgggcatagcggctcacatctgtaatcccaccactttaggaggctgaggtggaaagctcccttgagcccaggagtttgaggtcagcttggacaacatagtgagaccccttctccacaaaaaatttttttaaaaaattaggtaggtgtggtggcatgtgcctgtagtcccagctacttgggaggctgaggtgggaggatgacttgaacacagcaggttgaggctgcagtgaactgtgttcatgctgtactcttgtctgggcaacagagcaaaaccctgtctataaataaataaataaatagcatttgtatatagagaacttgtttttgaaccttaccctttgagaggggtagaattcgtttttaaaaataaactttttcatatgttagttattgtagctcttttttatatttataggaaacattttcttcaaattttttctttgtcatttaactttgttttttccttgctgataactttgaagtgttcatgttttacatagtaatttcagtgattttgtctttatggtgtgttgctgagctggcatgttttaagagcttttcaccaccttaaaagtatagcaattaaaattagaaattataaaaattgtatctgcttttacagttgtattcttagatttaaatcttttaattcatctgcaacccattttgatctcagttgcaaggtaggccttcagctccatcccctcaaccccaaattgggtaacagcggtaattactgaatagtttatttttccatcttcccccttctttgaaatagtttttatgttacatactgcattccattatatactagagtctttttctgaacttagttctgttccattgatcttcccattcctactctttcattagttattgagtccttggtcttttctcatcaaatcgaattttctcctgtgtttttcatcttgtcagttaatggtaactctttcccctcaagccaatctagaagtgtaggaggcatctttgacaatcgcctcaccctcagcatctaatcagtccctatgtcctgcagattccaccaccaaaatccatgtattaataaaactgaccacacctccatcttcactgtcatctcaagccaagctaccaactctaaccttgacatgtgcagtagcagtagccgcctgtcttctttccccactttcacttttacctttgtctacttcattttctgcacaacagccagaaggatcttttgaatttacttatatttatttgctgtttttataaaaagttattgattgaaaaaatgtagttttgttatacgttcttaaagtggtagagatctccattgttttagggtttaaaaaaattttaaaataatttttatattttgcaataacttaagcataccctgagaagagaagagctcctttgctttggttgcttttgtcttgttataaaattttttttacaatagttggaatgcattttaagaatttcaaggctgtttttgagctttgttatttttaacacattaccatatggttgtgataattcaactttttattttaaaatctggcaagagacatcatcttttaaaaaataatggcctttgctgtttctgccagcttaatcttccagatgagttttcattatcgatattttcaagctatat

SEQ ID NO: 5776 - DNA, 2300 bp, Homo sapien
taaactgatgtcacagccccaccatccccatttttgctagtggtatcattttcctagtcaaccaaattttttagtcatcacatatcactgttcgtcatctattataataggcagtctctctcttgtttccctggttttagaagattttagtaataaacatttattgggtacctgttacttggagggtattaagctagatggcaagatctgaaacaacataggcagtatagtaaaagtgcttatctgggagtctgaacattacaagccatccaagcattgcaattattgttaaggattattttcaatggtcatgcattttctaatattttaataattggttaaagatttgttatagcgtgggggccgctgctggtgtgtggctggggttatgtcagggcagcctgatctatataatttgggcagatggtgtgagtcagaacagactattatagtgggatccccaaacttgcttttgatgcatgagttggaccactattttttggtgggtaacaacttttcagaggggaatggcagttgtgaattgtatacatttcattctttaagcaatattatgaaaaacttcagagaatgtctacagaaaacagggtatggagcaagttattttccattctttttgctttttggaagttaaaatagctaagctctgcaaatatcatttatttggaacagataaggtcccagacattcctagataataaaaatcaaatgaatgatacaggtaagtgtatttattgaagggtgtgggtagagtggtctgggaagtcttgctttaatgaagacggattgattctatttacctcttcttacttccactactaagtaaccctgggcctgcagtttcctaaccacttgacttccttgccaacagtctgtctccactttcagccgttttatagattcattggccctaaagcactgctttcccatacttccctacccaagagggcaggggtccccaagccctgggccgcggaccggaaccagacagtggcctgttaggaaccaagccggatagcaggaggtgagcggcgggcgagtgagcattatcgccttgagctctgcctgctgtcagattagcgagtggcatcagattctcataggcacgcgaaccctattgtgaactgcacatgtgaggtttgccggctccctgtgagaatctaatgcctgatgatctgaagtggaacagtttcatccccaacccacacacacccccaccccgtccgctgggttagaggactttacaaccctagtccaccttgtccagttatagttccacctctagcctttcaaggcttaaaccattaatgtccttaatttctcttgtattcatctatctcccaactatacctttttccttcccttttttatttttggcaatatgtgcccatggttttttaatttaaaacgaacagaatatgtagtgacgcctaccatagcactccttcccatcacacaagccttcaaggaaactgaagtacttactttggtctccctggaggattccctccgcctcccgccccatgtgcttagcaattctgttcctgtagtctggatggccttcataaagccctcactggaccagcattctggcacataataggaacacttaaaaaacgagagaatgatgccgttatatctaatatcttcctcttctgaactttcacagcactttatttgcaacaagtttagttgctcctgaagggcaggatctctgccggaagcaagtgcgtgccacacagtggggctccgcatacactgcaaaaggacaaataaaccgaacagctaccgtttgagagtgagcgagtgggttctctgcacaagaacaaaccaaccagtcccttgtccgaaagggcgtctccttttctctgcttcgctgctcactccagactgcgggctgtcctcttccgaagcagttaaccagcagtgtacagaaagcgacttgcctccaaaggagcctgcgcggcccgcggctaggagaattttgtcccatgcgctccccgtctcactagccgcgggccggggctacgccgtgtgcgtccccgcgcagccgcagtgctgggcgagtgggcggggccggctgttggcggcggttggctcggcgcgggagtcggctgcacgtgcgggcgggggcgatgcgtcactgatcggtgaggcgcggccgaggggtcggctttcctcgcgagcctgcggctgggcttcttctcagttagtgccttccacccgggagcgacccttgggagagggagtttcaggaagctcaccgagcaggggcggcccac

SEQ ID NO: 5777 - DNA, 2300 bp, Homo sapien
gatttgttaaaacttgaggaaattaccataaaatgtctactgaatcaatttttcctgcatttagtcttaatgtcaattctgtacatttcctctttcattaagaaaaatagcagtggccaggcatggtggctcacgcctgtaatcctagcactttgggaggccaaggcaggtggattgcttgagcccaggagtttgagactagcctggccaacatgggaaaccctgtctttataaaaaatataaaaattggccaggtgtggtggcacacacctgtggtcccagctacttgggaggctgaggcaggaagatcgcttgagttcaagagtttcaggctgcagtgagccgtaatcctgccattgcactccagcctgtgacagagtgagactttgtctcggggaaaaaaaaaaaaaaaaaggataatggtggccagccatatgacatgtacctgtagtccgagttactagggaggctgaggcagaaggattgcatgagcccaggagttcaaggctgcagtgcattatgattggacttgtgaatagccactgtactccagcttggcaacatagcaagatcctgctctcttaagaaaaaaaaaaaaaagaaaagaaaaggaaagaataattgtttacttcaaatatttatgaaaaaaactctgaaatttttttaaatcaggaaataaggtaaatgaaatgatttttcaacttttgattatgaaatgtccaaacagaaaacttgcaaaaatgaacacccatatacttataacttatagtcaacatctaattgtaactttttcatgcctggttttagaatcttgattggagttggttaacagaatgagttgtcacttgttcactgtccccaaacctatggaagttgttgctatacatgttggaaatgtgtttttcccccatgaaaccattcttcagacatcagtcaatggaagaaatggctatgaacagaaactacatttctactatgatcagaagaacatgattttacaagtataacagttttgagtaattcaagcctctaaacagacaggaatttagaaaaagtcaatgtacttgtttgaatatttgttttaataccacagctatttagaagcatcatcacgacacatttgccttcagtcttggtaaaacattacttatttaactgattaaaaataccttctatgtattagtgtcaacttttaacttttgggcgtaagaccaaatgtagttttgtatacagagaagaaaacctcaagtaataggcattttaagtaaaagtctacctgtgtttttttctaaaaaggctgctcacaagttctatttcttgaagaataaattctacctccttgtgttgcactgaacaggttctcttcctggcatcataaggagttggtgtaatcattttaaattccactgaaaatttaacagtatccccttctcatcgaagggattgtgtatctgtgcttctaatattagttggctttcataaatcatgttgttgtgtgtatatgtatttaagatgtacatttaataatatcaaagagaagatgcctgttaatttataatgtatttgaaaattacatgttttttcatttgtaaaaatgagtcatttgtttaaacaatctttcatgtcttgtcatacaaatttataaaggtctgcactcctttatctgtaattgtaattccaaaatccaaaaagctctgaaaacaaggtttccataagcttggtgacaaaattcatttgcttgcaatctaatctgaactgaccttgaatctttttatcccatttagtgtgaatattcctttattttgctgcttgatgatgagagggagggctgctgccacagactgtggtgagggctggttaatgtagtatggtatatgcacaaaactacttttctaaaatctaaaatttcataattctgaaacaacttgccccaagggtttcagagaaaggactgtggacctctatcatctgctaagtaatttagaagatattatttgtcttaaaaaatgtgaaatgcttttatattctaatagtttttcactttgtgtattaaatggtttttaaattactttcttgatctctattcattataaaaatcagattataataaaacagttgaatatggcttaggaaaatatgaaggttccatgaagtggaattaagagcatagaataactgtactttccttaggaataataggacttatggtaaaggtagtattgggcaacttctttaagagtgttttcctctgagatgtcctatcaccactatctacatctaaaaaacatgctcgattcttg

SEQ ID NO: 5778 - DNA, 2300 bp, Homo sapien
catagagaaggagcaaagagaatgctacatattaggcgcaaaaagaaaaatatttttacctttatattgggcacttatggtccagacactgtttcatttaatcttcacaaaatctctgtgaggtaggtattacctctattttactcatgaaaaaaaaactgagactcggaaaattgaagattgtggagcctggggtcaacaggcttaggctttttaaaaaacaggccaggtggctcatgcctgtgattgcagcactttgggaggctgaggcaggcagatgacctgagatcaggagtttgagaccagcctagccaacacggtgaaaccccgtctctactaaaaatgcaaaaaattagctgggcgtggttgcatgcgcctgtaatgccagctactcgggaggctgaggcagtagaattgcttgaaccctggaggtggaggttgcagtgagctgagatcacaccattgcactccagcctgggtgacaagagtgaaactccatctcaaacaataacaacaacaacaacaaaaaacaactcaaattactcatggccctgggaatgggggcatttaaaaagttaaccaagggaaccaacctggtttccacaaagatggccacttctgggtcagcccaatcatcagtatccctgggtcctcagcatcccttcctacctcttttgactgggaattacgagattacagccccacctacggaaattgagcacattagcactggccatgctgtacatacagcaaatgagagggcttcatactgttacaacaatctgtaccacaattctctgtgcggtctgcccagctctaaatgacatgtcctcagaggcatcatcatctccaagtccatggaaaccatgcacttacagaaaccagaacctcccataccacatgttactaatgacctacaacatcgacttcgtctgtatcatgcagtgctcaacattctggttgcagcatcacatttatcaataatttgattccatgctgattcctttacttggagtattgagatcccccaggtacagtgaaggtatgaccctcttaaatggaagaccaggagttgtttcccctatgctatggcaatccgccacccggaagcacttgctgcaccaacagcattcccaaagcttgcctctgcagccctgtagcacccattagaaacacttctcacaatgaactactgtgctggcaaacccataactggactgccggacagcaagctctgtgaggcatctaggaaaaaagctcgcgaaatcccgagaaacactcttcactccggaatagcgtcacattcttgagtcatttgggatgacaggggatatcctggagcaggtgtattgggaagtcagtgaacaagaaggctaattcattagtgggcctgctagcgtagtattttaacgatttcgcagcctttaaatcattggtggtctttagcgtgccggatcagctggtggtggagttggaggatagatggcagggatctgaagaaaggtgaagtgtagataggagtagagacaatatgaagtttagaaaagactaattgctggacgcggtggctcatgtctataatcccagcactctgggatgccaaggtgggaggactacttgagaccaggagttcgggaccagcctgggcaacgtagcaagaccatgtctctacaaaaaataaaaaattagccaagcgaggtggtgcgcgcctgcaatcccagctactcgggaggtgagaagatcgcttaattccgggaggtcgaggctgcagtgagccgtgatcgtgccattgcactccagcctgggcaacggagcgagaccccatcttaattaaaaagaaaaaaatacaggagagactgggctgctttgaaaagtggatttgacgggaatgtggggtttggagagatcttatgttttccaagactagaaaaacattgtggttccgttcagccctcccggaaaatacgtaggggacttaaagagcggaccgagtacctgtttgtttccccatcccttagccggcagggctctggcagcgccctgggagaacttagggaagggccttctcgcagcggttaccggaagtgacgcattcattctcgcgagaacaaagacgcgcgagcatcggcggcccggaaccggccttggaacaactgtggaacctgaggccgcttgccctcccgccccatggagcggcccccggggctgcggccgggcgcgggcgggccctgggagatgcgggagcggctgggcaccggcggcttcgggaacgtctgtctgtaccagcatcgggtgaggcg

SEQ ID NO: 5779 - DNA, 2300 bp, Homo sapien
tacatagaattgtgctgatggtccatagccacagattagtaaaaagggggaagggctgctgagagtgtaaaataattattgcaaaatcaatgcattttacttacggggagaaccatttatccaggtcctatttacacatggttagagataattctagtatagaacagattagaaggtgagagtttgaaagagagaggagattaggcaagcgtgaaactattcacaaaaattgcaagtacaggattagagatggtgcagaggagctctttagtttagacatcattacctaaagaatgcacatcataatagagaagctgatgtttatggcagtgaccttctgacaaaaatagctagacgactcaggcttctagagtaaccttttaaacaaatacaatataaagtggttattatacaaataaaaaaaagtttttagtgcctgtgaggttttcatcaactttagtcatctggaaaattaactttgtcaatatgctcagtcctctctgccaaacaaatcaaggacaatcatgctttagtatctttccaatacatatcctgtcattctgttggactttcttattatagatgagaagtgattccttccttcagccttaactttgagcccaccacactaagagcatagttggaataattttttattttttttcctgagacagtcttgttctgtcgcccaggctggagtgcagtggcacgatctcggctcactgtaacctccgccttccaggttcaagcaattcacctgcttcagtctcccaagtagctgggattataggcacgtgccaccatgcccagctaatttttgtatttttagtagagacggggtttcaccttgttggccaggctggtcttgaactcctgacctcgcgatccatttgccttggcctcccaaagtgctgggattacagtcatgagccaacgcacccggtctggataattgttttctaacgtatctatatttgcctgtactggtactcattgggcccttctgtgctcactcatggcatcttcccatcagagaatatctgagtggtagaccattcttgcatgttttggtttttacagaaatatttttagttgccattaaaggctgacatccattgttggaaatcattcttttctgcctctttggatgcatctgagtttgaggttttactttccttctaccccattaggttgtatgtttgcttttgttttgtagaatttagtcagcagcttaaggcttaggaacattagatgctaatcatgccatcttagctttttttgtgagcccaaggagtatattcgggggtgggggtgggaatgaaagttactggggaggcagaaaggggtcattttttttttttttttttttttggagacggagtctcgctctgtcacccaggctggagtgtagtggcgcgatctcggctcactgcaacctctgcctcccgggttcaagcaattctcctgtctcagcctcccgagtagctgggactacaggcacatgccatcacaggcctggctaatttttgtatttttagtagaaatgaggtttcaccatattggtcagcctagtctggaacttctgacctcaggcggtccacctgcctcggcctctcaaagttttgggattacaagcgtgagccactatcccagccgaaagtggtcattttgaaatcagaagttgtatctttttgtggttgagggtgataaaaactgaaaaactgttttcaagtttggagcatgggagggaaaacccagcgatttgttctggtctccctcagctcagtgtgtttgaagccaaaagcctgcttgtgtgcctctcccaattcatttgctcctagttcatttgctacttgcatagaaattttcatgccgaatctcactcttcagcggatacctgagaacattgttgctacaatctctaaaatcagattttttcaagaaagaatttttattaataacctcaagtacttttcgcctacaccctcaggctcactttttgtataggtttttctccctggagaatcctacatgctgtattgatgtctcaattctgtgtgctgcttcttcagtgctaccttgccctggccaaaggaggcttatctgatgaccatgtcctcatcctgcctattggacactaccagtcagtggtggagctttcagcagaggtggtagaagaggtggagaagtataaggccactctgagacggttctttaagagtcgagggaaatggtgtgttgtatttgagagaaattataagagccatcacctccagctacaggtaggtggtctgttcata

SEQ ID NO: 5780 - DNA, 2300 bp, Homo sapien
aacatactggcccgtgggctccagcagcctccacgtagggctgttcatatttactgagcaggaatactgttgtagccattcaccattgatgcctagcagccagaagggagctgctggagagtttacacttcagacatgtaaaatggcagggacataggagagtcatgggagattcatccccctattgatggcttttcattctgcaattctgactaaaatttgttcatttttctttgaacccaggtcgtaaaggtatcttcactggaagctcggggctgcagattgtgtacctcagtgggacagaatccttaaatgagccagtaccaggttatagttttagtcccaaggatgtgtcttctctgagaatgatgctgtgtacaacctcccagtttaagggtgttgatatcttgctcacatccccatggcccaagtgtgtggggaactttgggaattcttctgtgagtagtgtttgtttagttggaatttctaaaagcaaattgcactggcttgagttgggacttttttcttttcctgtttatattgagtattttagctcttgggtaccttttattagaagtcttctgtgaaaattttcaggattctaaaagttctgtcaactgatcaaagcaaaagttaatttcatgaaagtgtgattcatagatgagactgctgaaatcttaattataaaggaatggttttttatattctctgcttcaagtgccctttcctaagcctcttaatgttttgaggcttcactgatttttttgttttttgttttttgtttttttttgagatggagtctcactctgtcgcccaggttggagtgcagtggtgcgatcttggctcactgcaacctcctcctcccgggttcaaatgattctcctgcctcagcctcctgagtagctaagattataggcatgcgccaccacgcctggctaattttttttttttttttttgagatggagttttgctgtgtcacccaggctggagggcagtggcgccatctctgctcaccacaacctctgcctcctgggttcaagcaattcacctgcctcagcctcccaagtagctgggactataggcgcacactgccatgcctggctaattttttgtattttattagagatggggtttcagcatgttgcccaggctagtcatgaactcctgagctcagacaatctgcctgcctcggcctcccaaagtgctgggattacaggcggatttttttgtatttttagtagagatgggatttcaccatgttggccaggctggtctcaaactcctgacctcaagtaatttgcccacctcagcctcccaaaatgctgggattacaggcatgagccaccgtgcccagcctaatttttgtatttttagtagagacagggttgcccaggctggtcttgaactcctgcgctctagtgatccacccgccttggcctcccaaagtgctgggattacaggcgtgagccaccatacctggccagattttaatattttatgagtaatcttgaaaaggatggtacaccaggagtgacaactatcatggggagtgaaacgctacactggtggaagtaagcctaaggaagattttgaaaaggttatgtgtgagggcagaaaacactgggtgagcttcattgaagggaaatgtaagaatgcatttgggaacaaatctccatggttggattcaggattatcagtgatgatccagaagtggagcctgtataccaccccttgccagtttcagcaccatgtgtccatgaccaaaaaggccaacaggataccaggcattatcaaggaggatgctctcttcctttttgacaaacccatgattactctttacgtagaatacaaggcatagagctggttggagcacaaggatatagcaaagctagggaagatcgagagaagggctgctaaagtgatgaaggaagagagaaagacacatatgatgctctgtaaggaaggatgagaaaatgaggcccctttgttttgcggggagctaaaaattgattttgatcaaggcttataaataaccatacagtatatttatggaggagaaaagtatagttcaccagtccctaagatgctaggactgacctcaaagctaattccctgcccttcagcagaaacctgaaggaaacaagcataagacaaaaggaaattcctgctttacgtagtggaaaacaaactttgttagcttatttccaagtaataccttctcttagaatagagttcataaataatgctgtgggtgagagatcacttaattggttgttaacagaatctggggatgttctgg

SEQ ID NO: 5781 - DNA, 2300 bp, Homo sapien
atgctactgatttttgtatgttgatttggtatcctgaaacttttactgaattcgtttattatttctaacagtctttttcgtggagtcttttgatttttcaatacgatgagtttttatgtcttacttttgtatcctcttctgggaattattacctgctcatgtttggcaaacttctactcttcttcaagattcagtcttgagtgctactcctgggcagtgctgtattatccaaagagtaggaaaaaatgcatgcttatgtgccagcaaagcagagccaccagttatgaggcaagaaacaaacaaaaaagaaggcttgtaggctgtgggaaaagccagaactttgtagttttgtttggttattgagacagggcttgctgtgtcacccaggctggagtgcagtggcaaggtaatagctcgctgaagcctccatctcctgggctcaagtgatctccccacctcagcctctggagtacctgggagtacaggcatacggccaccatgcccagctaacttttttttttttctttttaaatttgtagtagagacgaggtctggctatgttgcccaggttggccttgaactcctgttctcaagtgaacctcccgcctcagcctcccaaagtgctgggattacaggcatgagccactgtgcctggcctgtagttcttctttaatcttatgttttattaattttgaattatttagatgcccttgatgagtcttcctttccccgcagtcgtcaggaactctctcttgtttccatttccttacacacttgtttcctaccacttggcctgaacccttcaaaaaagtcaatattacaaaaactaaaaccaaataggtaggagggcttttgtagattaaaatagagacagaaccaaatgcaagtgtgaaacttgattgcatctgaatcaaaacaagccccaaatataaaatcagtttgtagggaaatatggagaactttaaatatggatgtatattaggtaatattattgaataattaatgttaattttcttagctgtgttaatagtattacggttatgtaggaggatatcctaatcttaggagataaatggagatgtattcctgttgtccgcactttattttattttattttttgacacggagtctcgctctgtcgcccaggctggagtgaagtggcgcgatctcggctcactgcaacttcctcctcctgggttcaagcgattcccctgcctcagcctcccgagtaactgggactgcaggtgcgtgccaccacgcccggctaattttttgtatttttagtagagagggggtttcaccgtgttagccaggatggtctggatctcccaaagtgctgggattacaggcgtgagccactgcgcccggcctgtactttactttcaaatgattgagtgagaatggaagggcttgggcactttgagagaaagagaacacaagcaaatttgccaacatgctgagacttactgaatcaaggtaatagccattattcttttaacttttttttttttaatttgagacggagtttcgctcttgttgtccaggctggagtgcaatggcgcgatcttgactcactgcaacccccgcctccctggttgaagcaattctccaccatgcccggctaatttttgtatttttagaagagacggggtttcaccatgttgcccaggctggtcttgaacgcccgacctcaagtgatccgcccgcctcagccttccaaagtgctgggattataggcgtgagcgtccacgcccggcctcttaactttttgataggttaaaaacttacaaaaaacgtggatagagggggtctgtcttgcccactagaccgatatggttaggttaggttaggttaggttaggttaggttagaacccgacattgtgctctgtacttcctagccattcattcgcttcaagtgctctgaaatttaatttaaaaaatcatagttggaatcctttcggtcactttctctttctcccttcgttcctccctttccctcttgattcttccttgaggcgcaaacacctgagagaggcttctgtccctcggcggtctccgtaagtaagtgaaccgttattggctggagggcgctgacgtctgattgttgcgcggtcgcatttttccggggagcgcggattcgcattcccaattttaggtggcagtcgcaacccatactattcggacagatggcacagaaaccgctgcgcctgtgagtgaccgtgaatggaagcctctctccctgtgtctctttcgtgtgtgtaggtgacgacacgggcgggagtctttcccatgacgggaa

SEQ ID NO: 5782 - DNA, 2300 bp, Homo sapien
cttgtgaatcagtgtttctgtgtgttgccacatagctctgtgaaataacgtcttccactgggccttttactccctgtgtacttagctctgtgtgttaattaaaaaaaaaaaagttaacaaacaggataaagagagggagggtaatggctcttcctaagcacctggatagccatggtctgtgaaaaaggtagaaaccaagagagtaggcggtatctagatgtcttcctacttcccagtgaatcctattcttatcctttgtgcatcccaagatttgttgctagcacccatgggtttctcgttttcccccacagaggttccctataaaagagaagaggaagccttagaggagaggagactctcccgtggtgagattccaacgttgcagaggagttaagtgtgaggcactcccggagcaaagtctatgaaggatcttctgcaagaggctgcctcctggtccactgaacctggaaactgagtgggctttaaccaggagataaaaatggagcctgaagggaatcaggcaaggaaatgaactcaggattcagagatctttgaattaatatgtggtgggttctgacattattcttccataagaccatgtgggtttccatggtggctatcaataaaactccttaggaaaacttggactttgcatttgcttctggtattatagagggaagaaaggctgaaattgtgggtcatccatgtgcctgggctggaataggttcatgctctctaggaggtatagagtaggtgcagtgatgtgaaggagctgggctataagaacttctaggcctagcacagtgactcacgcttgtaatcccagcactttgggaggctatgttgggtggatcacttgaggccagaagttccagacaagcctgggcaaaatgctgaaatcctgtctttaataaaaatacaaacaaattagccaggtgtggtggcgcgtgcctgttatcccagctacttgggaggctgaggcatgagaatcgtttgaactcgggaggtggaggttgcagtgagctgagccgagatcacgttactgtactccagcctgggtgacagagcgagactctgtttcaaaaaaaagaacttctggctcgcaggaatggcttgaaatagtggctactatggttgcaccataggaaaagtggggacaggtgacaagtgagactcagtcctcagggtggagacagtcagggtaggagggctggggataaggggtagctggcgtgtgtgtgtatgtactggcatcggggtggggtgagagggtgcagagggaggataaccagggataagaaaagaaactaccaagattttgggtgtccaggagcctgcctgaggcctgctgaatatctcctatcccttcttctgtggcctttatccctcctcattttgcaccttcaattgctccccagtcacttcttctcatccatctctttcactcactcctgttctcccatcccattaagtactctgtacacctaggaggcttgtgaaacagcttaaatgcaattaagataaccagagtgtatcctcagccctaaaaaagttacagtctaagctttcttcaaggaaggctgtatcaactgaagagaagtagatgcctgcctgcagtttaagaaataggggccagtgagttggtgttaactcaggacattgggagggacagtatttaggaccagggatcaatgcctgaaggtttcccaaagtgtggacgagacaacctgtaaaactttggattccctgagcaatcttttgatgactaactccagtgcggagtgtcaggagagcgggcaatccgtcttcagtggttttggtcagcaggccacaaacagggttgactattcccagacgggtcgtgagtggtacaagatgagtgatccctccagggtgtgactgtagggatgagctcgccctcagtcccagacgtcgcgactgttggcagtggatcaattcacaacagcctggcgtagcttcaatttcggctccggaatcgccctttgctgtgtcatagacctgaggctggactggaccgctaggcgcaggactgcagggccggccgggtgggcggggcacacccagtgcgcatgcgcagcaccccggcccggaaacagcgcggggtccgctatggcggcggcagccgagggcgtactggcgacccggagtgatgagcccgcccgaggtacccggaatggatggggaggaagcgtccggtggggggcctggggctccgtctcgggtgggcgaggttgagtgtgtggtggctcacctggcaggaacgggctggtgagaggagt

SEQ ID NO: 5783 - DNA, 2300 bp, Homo sapien
tatacattgtggagtgatcaaatcaggtgaattagcatattcattacttcaaatatttatcatttctttgtagtaagaactttttaaatcctctctgttagctattttgaagtacacagtacctcattatcaactgtagtcaccacactgtgcaacagaacaacagaacatatttctcttgcctgattgaaagcttttatccatcgaccactctcttcccctctcacacacccctcacccccagcctctggtaaccaccattctactctctacttctacgagttcaatttttttagtttccacatataagtgagagcatagggcatctgtctcattatgcctggcttatttcacttaacataatgttctctaggtttatctatgttgtcgtaaatgacagaattttctgtgttttttttttcaaggctgaatatattatattgtgcatatataccacatcttttaaatcctttcgtcagttgatggatacttagattgtttccatatcttggctattattaataatcctgcaatgaacatgggagaggagacatctattcaacacactgatttcaattcctttgagattcttggaacatatggtaattctatttttagttttttgaggaacctccatactgttttccaagatgtccgtactaatttacaatacagccaagcatacaaggggccccttttctccacagccttgccaacacttgttatctttctttctttcttttttcttgagacagggtcttgctctgttgctcaggctggagtgcagtggtgtgatttcagctgactgcagcctcaacgcctcagcctccccagctcaagtggttctcccaccccagccacctgagtagcagctgggactacatgcacgcaccccatgcctggctaatttttgttgttttgttgttgttttgtagaggcggtgtttcaccatgttgcccgggctggtcttgaactcctgagctcaagtgatcctcctgccctggcctcccaaagtgctggaattacaggtgtgggcaaccacacccagccaagatctctttatagggacactcaagactgattattttgacaaggctgatgttttgctgaatgtgaaggtgggcttcaggccagtgagtagccctgggtggggagccaggagttaggagaggaaagtctctgctctagcctcaaggaggagaaactgcagggtgaccaccacaacctgtgggatcagccccattctggggcatcatgcatgcctataggggagctggagcaggtgatcagaagctggagcagggcataggcagggatgtgcttgggggcccatgacacagttttaattcagagacctgcagttataaagaaagcagattaatcctgatatcatggatagttccactttgtgctcaagtttacgattctaggcccaggactaagcagagccatgggaaaaggttcccagctcagctgggtccagatatccactcccctttagtcccacatcatactgtccttgtcctttgttctccgatccagcctcccaaccaggtcttagcctttttcccatactgagccccacacccttaaggaaccccctctcttggtgtatctcacctgtaagccatggaaaggcaagcttcagaacaaggaatatagacaacctaggactctgtggtcctctcccctgccccctcagtgccctgaagtatgtgagactggggttcctcctgccactgtcctttccccacggctgagagggtgaagtgagggaagggagctgcccatctctgctccaccaggggacagctgaaggtgagacaggacaggagcctcagacccattgactgaacctgggaggtgggcagagcctgggagggggacagcgctcttcagctttcctcccagccttggtccccaccccaatccatgtcggcccttttaggagcttttagtggaaatgagctcagacccgcagcacaggcccccggctcccctcctgtctcagctcctcccattgctctttgatcgtctcttctgtccgacctctgggccatctctccaccaggcacatctgcgagcagcccccttcatccccagcatcgccttttcctcccgtttctccttccactcccagctccacatcctcctcctattctcccctctcccctcttcaaacccccaccttccagttccctcacctcccctttcggctggtcccctggggcttgcagcaagagggagagagagctcctgacaggattgatggtccttccccaccctgtcctctcatccgc

SEQ ID NO: 5784 - DNA, 2300 bp, Homo sapien
cactgcaactttcgcctcccgggttcaagcaattctcctgcttcagcctcccaagtagctgggactacaggcacttcccaccatgcccagctgatttttgtatttttagtagagatgggatttcactttgttggccaagctggtctcaaactttttgctgtcataattgttgtaactattgttccttttgctgaggtagggcccccagaccaaaaaaaataaatcttagaatccaaatcagtgtgttggtttgaccactgtcacttgagaaccacagtgtgaccagggcctcaggagtagaggtgatctctgctcgaaagagaaatagaatgaaaatattctccgggccaggcgtggtggctcatgcctgtaatcccagcactttgggaggccaaggcatgtggatcacctgaggtcaggagttcaaaaccagcctggccaacatggtgaaaccccgtctctactaaaaatacaaaaaattagctaagtgtggtggcgcatgcctgtaatcccagctacttgggagggtgaggcaggagaatttcttgaacccgggaggcagaggttgcagtgaagcgagatcacaccactgcactccagcctgggggagagagcgagacttcctctcaaaaaaacaaaaaacaaaagaattaagcaaattagacattgcagagagaacctgaagggggtcagaccacgtacagatttctgtgccacatgccaagtacttctgaggcatgactggatgagctgtccacatctgaaatcatccagtcttgttcagaactttcacaccggacagggagccaggactggaatgcagtctcctggtcactggccagagagttggcctgaccctgagaccagtggccaacaaaggagctgcttagtctacctcccaggaaatcccaggtgcttgtcttcctgggaagtgaatcattggcgcagcactccgtattttctcctcttcccaggggaaggatcctagggcagtatttgggaaagacatgggcatggaaggacaccgggtgaatgcatagcctgcctggttctgagctctcatggtaaggctcctacagacacggaaaagatgggggcacagggacagatcagtagggtcagagcatctcagggaccgagggcaatatggtcctgagcagggattaagagcttgggctctcatatggtgtttctgggctcaactgccagctccatcacttactggttgctgtgaccatgggcaagttattccatctctccatatctctttcctcacttttaaaatggaataatggggtacccacctcccagggtcacagagaggcttacagaaaacgattcttgtgaattggcttgcagtaataattcaatacctgccagctattcttattccacatccaagccctttcgcctgctgctgggtgaaaacacatgtcagtgtttcctgacggtttccacaaagaagattccaaaattacaacctgccagtctgaagaatctccaaaacatcccgcacgcatcctggaggcgcgggcttggggatgggactgcccgcccgggtcctgaacaggatgcgtgcgcgcaggcacacacacaccagccagcctgtgtgtgcggccggagtccggtgcggtcccgggtgagcagcgcgtggctggtgggcggggcagagccattgttcgcaggcgtaccgagtcccccgcgctcgcccgggagggaggcggggcttcccgcgtcccccaagctccagatcctggggtggctgccacgtctccctgccacgcgcctggggggacggaagacgggacggagatgttagtggtgggcgccccccgagggttcaccactgtttcctgagaaacttccccagtgcccacccacccgttctccgtgtgcccgagggccggtcctgggctaggctccgcgccccagccccaaaccgggtccccagccccttccagagagaaagctcccgacgcgggatgccgggcagaggcccagcggcgggtggaagagaagctgagaaggagaaacagaggggagggggagcgaggagctggcggcagagggaacagcagattgcgccgagccaatggcaacggcaggacgaggtggcaccaaattcccttcggccaatgacgagccggagtttacagaagcctcattagcatttccccagaggcaggggcaggggcagaggccgggtggtgtggtgtcggtgtcggcagcatccccggcgccctgctgcggtcgccgcgagcctcggcctctgtctcctccccctcccgcccttacctcca

SEQ ID NO: 5785 - DNA, 2300 bp, Homo sapien
catttccaatcttaatagagcaaagccagacttctgctttgatgactgagctacagggacaggagtggtccaaggttctcaaattctgtttttgtttttttccagacttctatactattgtctgccctaggctgtagggaatgctggttagtttgctgaacagacactgtgttcagcagggtttgtggtatctcaaatcccaggtctcagccaaagctttgcagttcaccctgactccagggaacagggcctcctttcgaggtgaggcacttgggttcttgcccttgcttcttcccagtgagaactgtttcctcctacttctacaagcattgcactgccagctgagagcactgactcaggcggggcaccctcaccaagtaagcagggggcattcagcatgccctctggttctgacccagagagaggggactgaaaataaaccctcttttgctctgtggctggcccactggctcaacatgagcgcttggcttggctgtgcctcatgagagagggagggagagagaggctttctgggccagagatgtttctgggagggtttgccagccttgtcttgagccatcagtgtggcaggggagcacaggggtgtaggtggagacactgcggaggccacgtgaaagtggcagctagctctactttcaaaagagaagcagtggttcagtgaccctgagcattctgtgtgcaggagggagctgcctggacagcaagtcatcactgcctctgaatacacacaaaggaggctgcctgtccagggaaagaagaaaacgttcagggaagagaaagatctggtcaaagaaaagggacagacagggtagagccaggaatcaagaatcagggtagtgaagagattcctaaccctgccccccaggcagttgtatactttaggctagatgttaacagagacccccttctcctcaaaaaaaaatgagtgaaggggcacaacactgtggagagaagccttctagtttttactcatttcaaggagaaactggaactaattaatgaatggacctaatatctagtttattttattaagactcccaataactcactcagtaaccttctcaagcccctggcaacgtgttctcagatcccttcctatgtgaagttcgctcttagaagctgcctatagatcctgtccctcagcctctccatctcatgtccagcagtggagaggaaattggcatcccaactaattcctcctctccttcagagttttttccaaacatccctctttggaagggaaatactctaatagtttaacgttctaagcaatgtatatatgtatatatattttatttttgacccgacttcacctccttaaatccttccctttttttggatgtttggaaatgccacagccatcttattactatgaggggaagaaccaatatcctgaagatggcagagcagaaagaggaaagaactgtaatgagcagctcatggaatactcaaaattctatgagctgctgtttttaccaattctggaaacacccaacttcaagacttcttgatatatgaactaagaaatctccttgttattaaagaaaaaaagaaaagaaaacccttccccagcagagaccacttttactacaaacttaaaatgtcttttctttatcctcggcctcaactatatgttgcggcattgaattagcattgccaaacaccgcagccactttttaccccgagccaggagagaaaggaagcatgctatgtggtggggcttgaagtcctcattaggtaggcagctgtatgtctgatcatggcgagaggttcctcttgcttcgcttccctcatccttacattcatacatgctaactctctcccccgacaatttacctgctttagaagctttgtgtcaaatgaagttgcttttccattccatctagcaaaagcctgggctgaagataatcaacaggggactacccagaagattctgttttatctctagctcaagccacctacttcaaagctcacaacagctcaaggaaagagagttatctggagcaaagaccattcgttttaggctacagaaaggttgtctaggctttggaagctggacactgagcaaagactgaccagctgcttgcctgggaggcaataagggaaaggagggcgatagcaataaagtgaaaaggaggacaatgggcctagaagagagagaggataagagaagaaataatatcagcttagcatcataaaggcagagttgttggctttcaatacttttgaattttaaaagaatactgtactggaatgggttaacatcatcatctttagca

SEQ ID NO: 5786 - DNA, 2300 bp, Homo sapien
ggaccttctcagaggggcggaaggggccctctccctcctggccattttccatggggagcagtcagtaaccaggaccatgccagacttcaaaaaacagagaggaaagtggaagtgaaaggcagcagaggactcagaattgctgtttcttatttctttcttagagaattatggacagcaggaaggactcaccttttagtctgtcagtttgtttgcgagagagagagagagagagagagagagagagatacattttaattgagagacaattcacacaatataaaactaaccactttatttattgagataggggtctcactatattgcccaggctggtctcaaactcctgggctcaagtgatcctcctcccttggcctcccaaagtgctgggatgacaggtgtgagccaccgtgcccggctaaactaaccattttattttatttatttattttgagacagagttttgctcttgtcgcccaggctggagtgcaatgggatgatctcggatcactgcaaccttcgcctcccgggttcaaacgattctcctgcttcagcctcctgagtagctgggattacaggcacctgccaccatgcccatctttttttttctttctttctttctttttttttttttttttaggagagatggggtttcaccacgttggccaggctagtctcaaactcctgacctcaggtgatccgcccgccccaccctctcaaagtgctgggattacaggtgtgagccaccgtgccaggccgaactaaccattttaaattgaccagttctgtggcacttagtgcattcataacattgtgcaaacactaccttttgttctaaaacattttcaccccaaaagaaaacttgaacccattcaacagtgattccccatcttcccacccacactcggcccctggtgaccatcagtctgctttctgtctctgtggatttaccacttcaggatatttcctatacatggaatcgtacaatatatgaccttctgtgtctggcttccttctcttggcataatctttcaatgttcatccccattggagcatatatcagtacttcattcctgtttattacctattcatattccattgtatgaatacaccacagttggtttactgatttatcaattgatgaacactggagttgcttccaccttttggttattgtgaatagcactgccatgaacatttgagtgcaaatatgagtacccgtttataatttattagggtttatatctaggagtggagttgctgggccagatgctaatttgatatttaaccttttgtggcaccatcaaactgtttccccagtggctgcaccactttaaattttctccagcaatgtatgagagtcaccctcttcttaacgtgtacccatttgtccctttcctctttcctactttttacaaagccagttccccacagacttctctttcccctggagtagagggtgggagaagttgcatctctagtagaaagactatccaagcctccattcttaccttttccgcaaatagaatacggtgaccaggaggaggagaggacaggctgccacctccctgtggtcactaaggtacacccactacagccattaacgcgactccgtaaaactaccctcctagcgacctccaacgcctcggtcctcacccagaacatcacattaaacttttcaacagtcacagataggaaggggctcggtgtggaaggtgccagctctggctcagccctgcgggtgagtgtttaactttcagcccagcttaagatctccgaagacacccatcgcctcgtcctgcccagtcccctccgctaaagggccggcctgcccgggcctggctggcagctgacatgaatggagaggaagcgcctccctctccacccactctcgccggggttactgccggtcacagacccgggccttcaagagctatttacacctacaacagcccaccagcgcctgaccacgccggagccaatcagcggcccccaagcttgtctgattctgtctgctccaatcaggaggcgcggtccttccagcctcttgctcctgtgaatcacaggtcggcgggagccttttttcctttttttttttttcccggggagtcggcctcggggctctgctctcctacctcagtctgccctaccctggaatggggaaaatgcggacatgccactcagtccggccgcgaacagtgctccagaactcagagagttttccagacgggtggagatcgcgttccctgcccgccgaggtcccatcgcttccctgctgggaagacaaatgaggcgctttagcc

SEQ ID NO: 5787 - DNA, 2300 bp, Homo sapien
ctggctaattttttatttttagtagagatagggtttcaccatattggccaggatggtcttgatctcctgacctcgtgatctgcccaccttggcctcctgaagtgctgggattataggggtaagccaccatgcccggcccttaatgttagttcttattatacttcatatctatatcattcattttgcatactatggtacaatagagaaaccattaggctaggagtcagtgtgacccagtttcaagtactggttctactacttaatagatgtatggctttggggaaaggcatttatgcagaggttttcgatgtgtagtccatggacccctgagcgtaccccaaataattttcagggtatccataagaccaaaatgatgttcatggtgatattaagccttatttgccttttttcaccatcacattgacatttcttctgatggtgggaaattctttgcaccttgataggaatcacggtagtagcaccaaactgtaccagtgggcattacattcctcactgccctgcacttggaggggaattcagtcccccaggctggaatgcaatgatctcggctcactgcaacctctgcctcctgggttcaagcgattctcctgcctcaacttcccaagtaactaggattacaggtgcctgccaccacgcctggctaatttttgtatttttagtagtttcaccatgttggccaggctggtctcgaactcctggcctcaggtgatccacctaccttggccttccaaagtgctgggattacaggtgtgagccaccatgcccagccaagatgttcttgataaaataaaaattattaatttattaaattttgatccttaagagcaccttttaaaaattctgtggcatgaaatgggaagtaggaagtacttataaagtacttctgctatatgtcaaagaacagtggttgtcttgagggaaaacattagtgtgatcattatagttgtgagctgaattaacccctttattcatgtaatatcctttttgtttgaaagaatgactgacaaactggttgttcagactttggtattttgcagcttcaagaacattaataaagtaaaattgttacttcaaagtaacaacttgcaatatttgttccaatgataaaatttgagcttttggcagtggctcatgcctataatcccagcacttagggaggctgaggcgggaggagcacttgagctcaggagtttgagaccagcctgggcagtctctccaaaaagaaaaaaaaaattagccaggcatggtggcatgcaccagctgaggtggaaggagcacttgagcctgggaggccaaggctgcagtgagccatgattgtaccactgcactccagcccaggcaacagagcaagatcttgtcaaaaaaaaaaaaaaaagaaaaaagaaaagaaaaaatagctttcaagcaaaactcagaattgtagtgatcttgcatgtggtactaagcttgacagcttcctaataattaaaaactcttctgatgctatcagtggtgatgttcaaaaatgtcaatttttaaatattatagaataaaatgtgccaacattttagaagatttgcataactcagtgaaccaatacttttcaaatgaccaaaacataatgttacaaaatcatgcatggataaaaggtgcattgaaaatgcaaatgaggccaggtgtggtggctcatgcctctaatcccagcattttgggaggcagaggctggaggatcacttgaggccaggcatttgagaccagcctggccaacatagcaagatcctatctctaaaaataataagagtaagagaattagccaggcatggtggcatgcgcgtgaagtcttagctacttgggaggctacggtgggaggatggcttgagcttaggagtttgaggttacaggaagctatgattgtgccactgccctccagcctgggtgatggagtaagaccatgtttcaaaaacaaaacaaaaaaaaaagaaatgcaagttagaccaatgaagtataatgtaatgaaatacaaaaaattcattgctatggtttcaaattcccagtgcaattaacctttaagatactacgtgtcaggcctctgagcccaaactaagccatcatatcccctgtgacctgcatgtatacatacagatggcctgaagcaactgaagatccacaaaagaagtgaaaatagccttaactgatgacattccaccattgagatttgttcctgccccaccctaactgatacgatatattctcccccgcccttaagaaggtactttgtgatattctccctgcccttgaga

SEQ ID NO: 5788 - DNA, 2300 bp, Homo sapien
atagcgagaccctgtctctaaaaataaatagatagatagatagatagatagatagatagatagatagatagatagatagacagacagacagacagacagacagacagacagacagatagataaacaaacaataaaagtcttaactttctcctttgtggaagaaattctaaggggataggacagtgcctcaatgaactcattttaaattagctctccctttttacacaaaaactgcccaaatctgctctacctcccaatgaatttttgcatcccttaggagttctctagtcaagtaaatggcaaaaactgtggtcagggaagaagtcaaggctgaaatccaggagtcattgctccttatcttcctagaacctgactcttggcctgaaatagactctactgctccctttctgaatgaagagagaggaggacctaaagttgtttgtgtaggagccacaactgaccaagctcatctcacaataaggtttggagccccaaataaagacttggtctagaagattccatgtggacaacaaaattacacagttaagatactgaggtgaagaccccctaaatcgtctggcctaggtaatggagaaagtgaatttgtgtattaattctttattttctggttcagtctagccagagagggttttggagcaagaggaacaaggttaaaagaaaagaacaaagaccattgtctcagggagaccttaagaaaggtgatgcggatgctaaagtagaaggtgtgaaaatagttagaaagaatgaagaagacctagtattcaacagcacaacagggtgactatcgtcaataataatttcattgtacatggtaactaagagtataattagactgtttgtaacacaaaggattaatgcttgaggtgatggatactcatttaccctgatgtgattatcatgcattcattgtatgcctgtatcaaaatatctcatgtacatgtactccataaatatatatacctactatgtatccacaaaagttaactgaaattttttttaaaagatggggctatatggctacatagacatcagtctggagccctttgaggatccccagtgctgtggctgaggccaccctcctccctagggaacagaaggagcagagtcccagagaagtgtgagcgagggcctgggtgccctcctggctccgccacctgagtttaagaaagtagggattttgagatcacctttgtgtgcctattgaaatctctttccttcttcgaaactcaaattctaccttcttcagaaaacctcccctaaataagcctacactattataggcagtttgtagctttctaatactttattaaactgcgttattttattgtcaccttactaggctgtaaatgttgttagggcagaaatcatgttttggtttttaaaaatttccacaatgcctagggtggtgttgagaataaaataggcatttggtaagtaattgtgtgatgaaaaagttgaaaggaagaaaaaaccatcgggcttcctgaagtttctagcctttctaacttagacagagaatacactagatggtaggactgcatccccacattctcaaatcagagggtggaggttcacctgcacctggtgtatttttttctgaaaaaacaaaacaaacaaaaaaatgctatcctgaatgcaaattcagtctcaaagtgctacagaggacaaccaggaaagcacagtcctttctggatcccttttggggaccaggctgtgtgtgtgtgtgtgttgtgtgtgtgtgtgtgtgtgtaagtgtgcataggtgggaaaaggttgtggtgtgatgggaggggataggcaagagggaggaaagagactccatgcagtgattatgtggaggggatttgctatgtctcttccccccgcttctttctttgtcctctttctcctggtccccttcttctgcatttgtctgggaggatcctggagtgttcttttgatcgactcaatctttctctggcacttgagttctgattggctgaaggacttagaggggaaaaaaaactttaattaagtagataatctcttctttggacgtttggcagctccatttcacctccccttaactctgtttgggatcgcttacacaccaaggaagttgggctttgagaattccatcccactggcactgaggagaatatttctccgtcttgcttacccatctcccagttttttggaattttctctagctgttactccagaggattatgtttctttcaaagccttctgtgtacatctgtcttttcacctgtgtcctccaactcagccacagctggtaa

SEQ ID NO: 5789 - DNA, 2300 bp, Homo sapien
ctggcctcatgaaattagttaggaagtgttccttctattttctggaagagattacataaactttgcattaattctttgactggtgaaattctccagtgaaaccatctaggcctggagatttcttttttgggagcttttaaattacaaactcaatttctttaatggttataggactatccagatcttctttcattgtgactgagttttggtagtttatggttcttgaggaatgggtccatttctgataagttgtcagatttatgaatgtaaagttttctgtagtattcgtttatatttttaatggcttcagggtctgttgtaatagtccctgtttcatctctgatgatgatttatatcttcttgctttttatctttatcagtttttagatgtttatcaattttattgatttttttcctcaaagaactagtttttgtttcattaattttccctattatttttctgttttctattatttacctttctctttcctttccaagagctgatgtttttttctcttcataggtcccaactccatctccaaggccaagggttttcacccctcagtcatcaccagcgatgcccttggcaccttcccatcctagcccttatcagggtcccaggacacagaatataagtgactacagggcacctgggccccaggccatccagcctttgcctttgagccctggggtaaggcctggtgagtgagtcactgaagatctatctgggcagagcacagaggtctcaggaaagcaattggcatggccagcatggatttgggaagctgtatgtctgtctagtgagaggagcttggaagttgaagtctgaattcctaatgctatcactggcttcgtacctttggcaatataccaaagtgttgtgttgcttatttcaatgctatgggattgttttgaaggtcaaataaggaatatagttaaaagtattttgtaaattatagatttccatatacatgtattaatcatttattatttttttattgcaatcctgtttctccctgatatgctctgagttgctcctgaaatgaagtttagtgacaaatgacctatttctgttctgcttcagcttcatctcagccacagctattaggagggcaaagggtgcaagttcctaacccggtgggattccctgggacatggcctcttcctggttcccctctacccatggcatgcccaggcatcatgcgacctggctctacctccctgcctgagactcctagactgttccctctgcttcctctgagaccactaggtcccggccgcatggtctcccacaccccagcccctcctgcaagcttccctgtgccataccttccaggggacccaggtgccccatgctctagtgtcctcccaaccactggcatcttgactcctcacccaggtcagtcttccttccatggatccctcttctgggttattgcctcccctgctcctctcactactttgggagtctttcctcaagtcagagggctagggccctgttgggtggagggtggctgggagtgtagatggtctgcagagggaggtatggtgaactccaactcaaagaatgcttccagccttcagataaaaaacttccagtgtttttcactatgcgccgaaaaacctctatctttttattctataggacctcaagattcctggaaagaagccccagcccccaggggaaacctccagaggaacaaggtcaatgcatctttccctacccactccctcgcacattcaccaatgaccacgttctaattccttggaggattcagtcagtccttccccttctcagactgtccccgccctcctcccacttactcttctttcctcagaaccctcttctttctctttccctcttacacacatacaccagtctcctcacttcccagtttcccacactcactcttctgtctccttgttcactgtcattcctgccactccccaaaaccagagccatggagtctctcaggttagactcatgtctttccttctgtctctttagctgccagagacatttatgcccccagcaccaattactgctccagttatgagcctcacccctgagctacaagggattcttccctcacagccccctgtctccagtgtgagtcatgctcccccaggagttccaggagaactcagcctgcaggtgacaaggacaatgtattcccctcccttgggaaaccttccagccctccttgggtgcaggtcatggtagatgggcctcattcctcaaggcatgtgctgagggagactgggggcaggtaccaggtgtccttactgcagagaaaggg

SEQ ID NO: 5790 - DNA, 2300 bp, Homo sapien
gacagtcatgctgtctacaaatctgcaaatagatagttttctttcttttcaatctatatgcatttaatttctttcttatgccttattgtagtgactaggacttccagtctctgttaaataagaatagtgaacataagccaggcgctgtggctcatacctgtaatcccagcactttgggaaactgaggtgggtggatcacctaaggtcaggagttgagaccagcctggccaacatggtgagaccccatctctactaaaaatataaaattaaccgggcatggtggcgcatgcctgtaatcccagctactcaggaggcaaggctggagagtcgcttgaacccgggaggtggaggttgcagtgagctgagattgtgccattgcactccagcctgggcaccaagagcgaaactctgtctcaaaaaaaataaataaatagtgaacatgaatgttcttgccttgtttccagtcttagaggaaaaacattcaatatttcagcattaagcatgatgttagctttaggtttttcacagatgctctttatgagaccaaggacatttccctctattccttgtgtcttaatccattttgtgccactataacagaataccacagactgggaaatttataaagaacagaaatttatttcttatggttctggagtccaagatcaaggcaccagcaggtatggttccagcaggtacggttccaccctctagttgcaagatggtgccttgctgctgtgttctcacatggcagatagcagatgtgcaagagaaagcaaacccactcctgcaagtcatttttgtagtggcattaatccattaatgagggcagagccctcatgacctaaacacttacaaaaagtcccactttcccaacactgttgcattgaggattcagttttcaacacatgactttggggagcatattcagaccataacaccttgtgtactagatcatgaatcggtgttgaattttgtcaaatgttttttctgcatcatttctgtcatcatgttattttcattctttagtttgttggtataggggattaaattgattggtttttaaatatcttggatcagctttgtatgacctggaatcaatcccactttcttgtggaatattattttttatatacattatttgatttgctaaaattttgttgaggatttttgtgtctaagttcatgagaaatattgatgtgtagttttattttctgctatctttttctgttgctggcatcagggtaatactggcctcatgaaattagttaggaagtgttccttctattttctggaagagattacataaactttgcattaattctttgactggtgaaattctccagtgaaaccatctaggcctggagatttcttttttgggagcttttaaattacaaactcaatttctttaatggttataggactatccagatcttctttcattgtgactgagttttggtagtttatggttcttgaggaatgggtccatttctgataagttgtcagatttatgaatgtaaagttttctgtagtattcgtttatatttttaatggcttcagggtctgttgtaatagtccctgtttcatctctgatgatgatttatatcttcttgctttttatctttatcagtttttagatgtttatcaattttattgatttttttcctcaaagaactagtttttgtttcattaattttccctattatttttctgttttctattatttacctttctctttcctttccaagagctgatgtttttttctcttcataggtcccaactccatctccaaggccaagggttttcacccctcagtcatcaccagcgatgcccttggcaccttcccatcctagcccttatcagggtcccaggacacagaatataagtgactacagggcacctgggccccaggccatccagcctttgcctttgagccctggggtaaggcctggtgagtgagtcactgaagatctatctgggcagagcacagaggtctcaggaaagcaattggcatggccagcatggatttgggaagctgtatgtctgtctagtgagaggagcttggaagttgaagtctgaattcctaatgctatcactggcttcgtacctttggcaatataccaaagtgttgtgttgcttatttcaatgctatgggattgttttgaaggtcaaataaggaatatagttaaaagtattttgtaaattatagatttccatatacatgtattaatcatttattatttttttattgcaatcctgtttctccctgatatgctctgagttgctcctgaaatgaagtt

SEQ ID NO: 5791 - DNA, 2300 bp, Homo sapien
gcctcttcagcctgtatggaaaaacatccttctgctgtattaagatcattgcaaccttagaaaacagcctttctggcagtagcctcttagctagcattgtgttggctctgctgttttgcttcagatgctgacctggtctgagctggttctccatactttgcttctgaccagttggctctgctccagtgactggcctaacaagttcctgcctatcacctactcagttgctttgctgactgttcgcagggaatatttctttgcagttggagatcttgtaacctcatttggcgtgatatctggcttctccaaagggctgtggaaatgtccttggctagcagctatgaagtgagagacagaccacctatgaggcttcagggatttcacatgtcttccgtaggggctttgcagaggacccaaacttgtctagaagggatccagggatccaaagggatctttttctctggggcaagacattggcattatcttgttagaagcatcctcagaaatccagaaaagtatttcctgagtgggagtgtatcctttcatgcctctgtctccaggtctggccctttgcagccacatggccactccagtgggccagccacatgggagaggcatggggtggggaggccattgggtcttttctcatttccagtttgagagtgaattgttggtctagggagcctgcttctaatagttacagaagagtttgaatctttctctcaataggagacagtattttatgatgttaagagctcaggctctggaataagatgggcctgactttgaaccttgaccctgctacttcctagcatttatcctaaaatggggataaaattactacctctgtgtatagaaattttataacttctttgtgcctcagttttctcaattgaaaatggaaataatagtaatacttcatgaggttgttaaatgttcagacagctaatacacctagagcacttaaaacagtgtctgatacatagcaagtattcagtcagtgtaagtggttgctattattacctgactatttgagttgtgaggattatgtgaagtaatctatttgaagtatatatcaccagcctatataaccccaatgttaacttaaaaatgtacatatatatgtatatatatacacctccacacaactcagaggcagtggcttcctggcttctggtgtaacgtagatgaaacattttttcagagaaagggcaggactgggcggaggatacatcccttctgtctgggaaatgaaggagacaggcaagttccagctaggggtggggctgcctgcataatggcagaagctgacagagatgcccatcctgtgcttactgacatgaacctaagtttgtactgatgccagttcctcctctttataggtttcacaagctggtctgggggagctttggcagtgggcttctggaaagctccggggttattgttggcggcggggacaatggcatgcttattctatacaatgtgacccacatcctgtcttcggggaaggagcctgtgattgctcagaaacagaagcacacgggggctgtcagagccctcgacttgaatcctttccaggtactacatttcagttagtcaaacatggccaagccagggagcaacagatctgagtggaagcattcatttgtggcctccagtctgtaactctgacccctttccaggctgtttcaggggaggcttttgatagccccaaatttgggcttctttcctcctttcttgctctgtttcttcctagggtggtatgtctccaaacactttttattcatacagggcaacctcctggcttcaggggccagcgattctgaaatcttcatttgggatctgaataacttgaatgtgccaatgaccctgggatccaagtcacaggtgagcagcacccccactacccaaccctggagtgtgcagctgattctcctaagtaaaagtcttgagttctggagccaatcagagctcaagagatatcaaactttaccactggagggcaataaagctccacagactaacatgctaccagccagataagagttaggatggctggtgggtggagggtgtatatggggtagttggtttgtgctcattactcgttctaagagtttctgggaggcagatgaaagttggggagagcaaaagacaccacaagaagggatgggagtgctgtttatcacagtagagctttcgcagggttgggtagggcattgggcccagcaaagagggaggaagagtaggaccccagacataccattgtcctttttatggaggggggggtcagctttgttctc

SEQ ID NO: 5792 - DNA, 2300 bp, Homo sapien
taatcatttccttaacaaacacctgtgtgtctaatatgtatcaaacactgataagccctggagatataaaactgagcaagacaaagtaatcaccttcaaatattacataggagaccagcagttataatacaaagtgaaaataattctttatcattattactattgagacagggtctcacgctgttgcccaggctgcagtgtagtggtgtgatcacagctcactgcagcctctacctcccaggcccaagcggtcctctcactgtagcctcccaagcagctgggaccacagggatgcaccaacacacctggctaatttttgtattttttgtagagacagggtttcaccatgttgcccaggctggtcttaaacttgtgggctcaagcaatccacctgccttggtctcccaaagtgttgggattatgggtgtgggccactatgccaggccaaaaagaattttttttttttttttttgagacatggtctcactctgtcacccaggctggagtgcagtggcatgatctcagctcactgcaacctctgcctcccaggttcaagtgattctcatgcctcagcctcccgagtagctgggattacaggcacatgccaccacgcccagccaattttttcggtattttttggtagagatgtagtttcaccatattggtcaggctggtcttgaactcctgacctcgagtgatctgcccgcctcagcctcccaaagtgctaggattacaggcatgagccactgctcccagcaagaattcttaagaggtgtgagttgagaaagtgcacttttaatttggcttaatcatgtcctacccgaaactgtgacttaagcttctggttcaaatttctttaggagtattccatcagtaactcttctgcctccttctctcaggtttagtttttaaccctgtttacttttcctcaggcttcattccctgttgtgccagctaagaagttcaggaaatacttgagtacttagtaggtaggaagcgtgggctaggcacagataatgcactgaattaccttctgtctaacttcaaaattgccagatccacatggaagggaactggagtcgtgtcacaatgagttgggctccatcatgataactggccccccatctttggaggtgtatcaggcaggaatacagagaattcatgcgttaagcataagtttctaagatttaaagctgcctacagaattttttttttttttttgagatggagtctctgtcacccaggctggagtgcagtggcgtgatctcagctcactgcaacctccacctcccgggttcaagctattctcatgcctcagcctcgtgagtagctgggactacaggcctgcaccaccatgcccggctaatttttatatttttggtagcgacggagtttcaccatgttggccaggctggtctcgaactcctgacctttggtgatatgcccaccttggcctcccaaagtgctgggattacaggtgtgagccactgcacccgacctgtctacagaacatttttatttggaagtggcacaatttcttcaacataaaaaatacattatcggctggaatatcacctgtgttcttgcagctccagaggataacacccctcctatgttcctcaaatatttcaggaagcccctggccctgtagtctcaccctccatacacttatagcccttaattcaaccaagttttgggcaccagtttctgctgggctgcagtgcaacactcactgccatttacagcctcgattgctttttacgttttcaactaaatggattccactgagggctcctggggccagggccgggtcttctcccgcttcaatacatagataatgagttagtattttcccttttcagagactggccctagagcctggctcaaactgaatagaccagaacttactggtccagatctgacccgctgcgcaatcacagggtaggtgagggaggcccggttaaaagctataatcctgtttggaaacgttctccgtgggtctgtcagtgtctcgggctcggcgcccgcggagcgtgtttccgacggtgccctgccggggtccgcgccgctttggtcctccgcagccgccgtccacagcgcccggctccgcgcgagagccctgccagaggagcggctccggccgccgcgcctgacccttgtccggggtcttccgcacaggttggttcgccccgccggtctggggtccctggtagcagagattgcgctggggacccggagcactgctcctttctcggcagagcgcggaggggagcccgcttgctgcggagcccccggcccgc

SEQ ID NO: 5793 - DNA, 2300 bp, Homo sapien
ggatgtaacatgtcacagctgctttgaaaaacaatttggcagttcttcaaaagttaaaccacagagttaccctatgacccagcaattctactcctaggcatataaccaaaagaatagaaagcatacatccagacaaaaacttatacaagaatgttcacagcagcattattcacaatagccaaacaagcagaaacaactcaaatgtccattaactgataaatgtataaataaaatattgtactgtacattcatataatggaatattatacagcccaaaaaggaatgaagtactgatatgtgctacaacacagacaaactttgaaaacattattctaagtgaaagaaaatggacacaaaaggccacatattgcatgatccatttatataaactgtctgaataggcaaatccatagaaacagaaagtaaattagtggttgccagtgggtagaggtaggggcaacgtgctaatgtgtatgggttttttcggaagcaataaaaatgttttagatagtgatgatgattgcacaactttgtaaatgtactaaaaataactactgtacactttaaaaggtttttttgtttttgtttttgtttgtttgttttttgtttttgagacagtctcaccctgtcacccaggctggagtgcagtggcgtgatctcggctcattgcaacctccatctcctgtgttcaagtgattctcttgcctcagcctcctgagtagctgggattacaagtgtacaccaccatgcccagctatttttgtatttttagtagagatgggtttttgctgtgttggccaggctggtcttgaactcctaacctcaagtaatcttcccacctcagcctcccaaagtgctgggattacaggcgtgagccaccgcacccggcctaaaagggtgaatttatggtatgtgaataatatcttaataaaaataaataaattagatcaactctgtttcttgacctaaattggatcagggtttgctattggttgaatgcagatgttgtgcaattattctgaacatcaactagtgatgtcatttacaagacagcaagttgctgtgtagtccttcccaaaatttatatattaaatagtatatatccatatttgtttactttttataacttaaaaaaaaagagacgaagtctcactatgtcacccaggctggtctcaaactcctggtctccagccattctccaacctaggcctcccaaagtgttgggattacaggtgtgagccacagctcccagcttatatgcatttttattgctctgatatatacttgagaatgtttataataataggttctgctccaaaacagtggtcacctgaaaagtcactggaaatacgtgcatatttataatgtgtaagttattcaaatcccaagtgaaaacattcatatgcaaacataataatgtctccaattcttctgttgagttagtttgttcattatgggccggtttgtaatttgttttatccaagtcctaccaactctgaggctttaagctgtctctggagagctgcctctggtgataagtttaattttacatttgttgggttgaggtgactgagacatgcagatggaaacacggactgaaactaaggagccaattcagggccgaattgtgtgttgcactggcgtctaagtgaagatcaacccatttggagaacagaacaacaagcaagaccaacaggtgaatttgaagaatgatcatgtttggggatggaaggaagtgcccgtgaaggagaggaaagcaagcagccagagaagagagtaagacaggctcatttcactagtacagctcctgggggaggtggttaagctgtctacctgagttgctcaggttccgagttcccatcatccctggatgggtctaagtcagctcagggagaaaaaggacacaacattctgaaatgtcagagacctgcctggttttcccttcttcccgcttatccttcccagcctctatccaacccttggcttcccaactgcgtatttaaaccccgcccctgttgaacccttcggcttttcttcactcccggcttcctccgtcacgtttggcccggctcagccgccgtgacaggcctttgcgcatgtgcagaagggaaacgtgaagaaggtgaagatggcggtggccagggccggggtcttgggagtccagtggctgcaaagggcatcccggaacgtgatgccgctgggcgcacggacaggtccgcgagaacgggcgagacctcagtgtgggaagggggtacctgaaatttggtgtatcgggaggggggatcgtagatgccgcggcg

SEQ ID NO: 5794 - DNA, 2300 bp, Homo sapien
tttttttggggggtaaagtcagcagtaatatccctgtttcattactgattttagttcttttaatcttcttgatcttaattaatttatttatttttagtaagacaggatcttgctctgtcatccaggctggagtgcagtggcatgatcatggctcattgcagcctgcacctcccaggctcaaacaatcctcctacctcagcctccctagtagctgggactacaggcatgcatcaacgcaccgagctaatttttaaaattttttgtagagatgaggtcttgctatgttgcccaggctgatctggaacacccaggctcaagtaatcctcctgcctcagccttgaaaagtcctgggattacaggcatgtgccaccatgcctggcctaatttatttttaattcccaaggttatgaattaatacattcttgtaaaaattcaaacattcagcctgagcaacatggcaaaaccctttctctacagaaggaaaaaaaattagtccggcatggtggtgtgtgcctttagtcccagctacttgggaggctatggtaggaggattgcttgagctggggaggtggaggttgcagtgaaccaagattgcatcactgcactccagcctgggtgacagagtgagaccctagctcaaaaaaaaaaaaaaaattcaaacactgcagataaaatgaaagccttgattgccccctgcagcctcaaacacttccacagaggtagccctattatcggtttggtgtagcatggttactatgtagcataattacatagttaagccagtgcattcatttctattactgcataacaaattactgtaaatttagcagcccaaaacaccaatttattttctcacatattccatgagtccaggtactggttggctgagtcctcagctcagggtcttatcaggctgaaatcaaggtgttggctgggttagcgatctcatctgaggctccgtgtgtgtcctttcccaagttcagtggttgttgccagaattcagttacttgcatttgtaggattaaggtgcccactttcttgttggctgtcacccaggagcctttctcagctcctagagtccacctgccatttcctgccatatggcagtttgctccttcaaggtgaacaggacagctgtgctgtggcttcaaatctcttagattctgtctctgacctctagccctgatttaaagggctagagtgataagatgaagcccaccaggataaatcacctctttttgactgccttaaagttaattgattagggactttaattacatccttgtcatataagctaacctaattacaggagtgatgctctatcatattcacagtcgtgttttcttttaaggggagaaatgtatacaggatgtgtacaccgtagggtacaaatcttgggatacatcttagaattgggcctctcacagccagccataagaactgtccaagtaagcaatagaggtattaatatggccttttataatcagtatagattgtttgaaaatgtgagatgtccatggttggcctctaataacattcgattcacggcaaacatatattcaagtaggagacatggtgatataggcagaaaaatcaaatgatgctaaacaaaagaaaactgtctttgattttgaaagaattcaacttgctgtatatcttttgcctaagccttcagtcagcctttgctctacatctaccaatgtgatcactgcttttccttctgacttctttaggtgggtcaagagtttgcttttctccccattcatgagtgtaaagtttaatgcctaactgaacttgcttccttctttgactcttgtgtagactcgggcacatggggcaactttttttgtgttttgctctaccaggtcgtccctattccgtgggactagtgtctagccccatttcttcagcagtggagcctaggatgtagagctgcatactaccattaggaggcgcaccctcaggcctcggctccgcgttctttatgtctctggaccgctctctctcgcagctcatctctatggtttccgttgggtgtgtggtttttttgtttttttttttttggggtccggaataggcggagcttccggttccggtgggggccgtccctggcggcggagatggcggcgacagcggcggaggctgtggcctctggctctggagagccccgggaggaggctggagccctcggccccgcctgggatgaatcccagttgcgcagttatagcttcccgactaggcccattccgcgtctgagtcagagcgacccccgggcagaggagcttattgagaatgaggtg

SEQ ID NO: 5795 - DNA, 2300 bp, Homo sapien
tatgtctttctgttgcctgcgtttcctgtggtagggtgcatggaagtggatccctcaggtagagatgagagagcaagtctgctttgaggatgcatgtggactctcatcacttaagaaagcatctgtcttggcatacccagacagagctggggaagattgtctaaattccatgccctgcaaaagtgtgtgttcaactcatggactgtgcaaaggccaaacaacacacgtggtcctagttagaaaggagtagatggaacatacactagggcacaactaattcaaggtggcatttaaaataatgtgccatatttaaattacacagcactctcttcagtcatctgatattctttcctccaatgaaaatcacttgcaccagtgagccccaatgttgctttaagaagtgttgtcttggctagatgtggtggctcacgcctgtaatgctaacactttgggaggctgaggtggacaggtcacttgagcccagaagttggagaccagcctgggcaacgtggtgaaaccccatctcttaaaaaaacaagtattgcattcgttaggtgtattgaagtgggaggaaaggttgagaatctttgagttccacagagctacccaaaataaatacagagctacataatcatacaacttagaatgactggttaactcctcatgtatatgttgttgataccagtcatttctgttttgctttccttgaattcctgccgtagtcaagaagagtacacggtgtacacagttgattaccctacctgatttttgaggatcattttgatgtgctcttgcttccagtaagggcagcagccttcatttagggaagttgacttagctgatagtggacccttaaccagtgatgtttgctagagttattaccatacaagcttaacacctaattttctgagagttgtaattggaatttccctgattctgcctaaattttgatttggaacttttagctgggagggcaggctgggtttctctttagcactgggtcctgtattccagcttatgcaatagaaccactgctctgcataagaaaatgcctttcttcttacaggaaatgtgacacctgctcactatgatgagcagcagaacttttttgctcagataaaaggttacaaacgatgcatcttattccctccggatcagttcgagtgcctctacccataccctgttcatcacccatgtgacagacagagccaggtgagcttgtgtggtctgagaagggtatagaactctagattctagtaatgcctaggctggaatgtctttccccttccccgtagtgatatgccaggttcggattacaggctgttcttgccttaacacaccaagagggtaatttcattgtagctcacatattccaggctccctggagtggccaccagatgtttgtaagtataactagccccacagagctaattctcaggacagacactgtcattgatgctgatggactctggttactctgtttgattggcttataagtttatggaacaaaatgtgtatgtctccattggatttaatcattgtttgcttttgtcatggatgctatttctttttgataagaagggtgaataaaactgagctatgttgtttaatgtatttcctagatctaaatgaggtatgtggttaactgtggccagccaaagatatcctttcctttcttcagaaagctgtctagctacttcatgtgggagtctttgctggttagaatatgtttttgggaaaagtttctgaaggtttaggtggaggataattcctaattcctcatatcctcagctgtggagtaggtcgtctgacctcaggagcactgaagcctaggattctttatcacttaacattcaaatgtggactgtcttatattgttctctctcagggtttaatgtgcattatatcttctgctggatataaattccaaatactttttttaaggcatcgttttttttttgtttgtttgtttgtttttactgccaaactggcatatagtagttttactggtgaagatttggtgattgatattttttttctttctcttgaacctcttaggtggactttgacaatcccgactacgagaggttccctaatttccaaaatgtggttggttacgaaacagtggttggccctggtgatgttctttacatcccaatgtactggtgagaagggggctagggctgggggctttttgggagctttcttttccattccctggaaagccttgtctgtgtcgcttctgagttatggcatgattggttttatgtggtctataggaaggttggcatatccagaca

SEQ ID NO: 5796 - DNA, 2300 bp, Homo sapien
actctagattctagtaatgcctaggctggaatgtctttccccttccccgtagtgatatgccaggttcggattacaggctgttcttgccttaacacaccaagagggtaatttcattgtagctcacatattccaggctccctggagtggccaccagatgtttgtaagtataactagccccacagagctaattctcaggacagacactgtcattgatgctgatggactctggttactctgtttgattggcttataagtttatggaacaaaatgtgtatgtctccattggatttaatcattgtttgcttttgtcatggatgctatttctttttgataagaagggtgaataaaactgagctatgttgtttaatgtatttcctagatctaaatgaggtatgtggttaactgtggccagccaaagatatcctttcctttcttcagaaagctgtctagctacttcatgtgggagtctttgctggttagaatatgtttttgggaaaagtttctgaaggtttaggtggaggataattcctaattcctcatatcctcagctgtggagtaggtcgtctgacctcaggagcactgaagcctaggattctttatcacttaacattcaaatgtggactgtcttatattgttctctctcagggtttaatgtgcattatatcttctgctggatataaattccaaatactttttttaaggcatcgttttttttttgtttgtttgtttgtttttactgccaaactggcatatagtagttttactggtgaagatttggtgattgatattttttttctttctcttgaacctcttaggtggactttgacaatcccgactacgagaggttccctaatttccaaaatgtggttggttacgaaacagtggttggccctggtgatgttctttacatcccaatgtactggtgagaagggggctagggctgggggctttttgggagctttcttttccattccctggaaagccttgtctgtgtcgcttctgagttatggcatgattggttttatgtggtctataggaaggttggcatatccagacatgagcgtactgaacctgtgggggatagtggcgggaatgatagccctgtctctaggacaggatgacggttcttcaagtccaaagagattccggaggcttgagcctagaaaaactgttcttggctctttggtatttcgagactgaacaccagtacctctaacccccaagtgtgtgtttttttcacaggatgagtgtaaagatattgtcttcactattttccgtaactggactccacctagtttttcagcccaaccctgccacccccccgcacttcgcccctccgcccccgccaaaagtatcagtagtaaacaggagcctgtttgttttcttgcaggtggcatcacatagagtcattactaaatggggggattaccatcactgtgaacttctggtataaggtgaatatggtttgctttttttgttttttccagatggaactggctcttgggtgaggtaggtataataaatgattttggatgggatggttgactatccctggaagtgattgtcaggtgtctggggagatgaaagggacaggattgaattgggtttcttttttttaaatatattttttgagacagagtcttgctctattccccaggctggagtgcagtggcgtgatctcggctcactgcaacttctgcctcccgggttcaagtgattctcctgcctcagcctcccgagtagttgggattataggcacacaccaccatgcctggctaatttttgtatctttagtagagatggggtttcaccatgttggccaggctggtctcaaactcctgacctcaagtgatccacccgcctcggcctcccaaagtgctgggattataggcctgagtcaccgtgcccggcaagaattgggtttcttagaagggaggatggtactaagaacagtagagtgacactgacgcctgctgctaaaggcatttcctgagctactgcttcctttgtagggggctcccacccctaagagaattgaatatcctctcaaagctcatcagaaagtggccataatgagaaacattgagaagatgcttggagaggccttggggaacccacaagaggtaggtgactgccccaaggtggctcagtgggtgggttgaccaaggaaagtcaggatcagagcgacattctttacagcttctgtgtttcagtgtctggtgtcctctctctccatagaggttatgggtatgttcagaaaaattcttgttttctggtgatagctgggcttgactggcaga

SEQ ID NO: 5797 - DNA, 2300 bp, Homo sapien
gagacaaattcctggatgaccaacttggagagacctggggcaaaggttactttagttctgagctcctctaaataaggaccctttctcaacgttcctttcaccccagttctgggttaattacttcccagaggggaaagccaaggctgtgctagctaataccacctgagatcccttgcactctggcctgggagctgttacttttcggctgcccgaactgttttccttcttcggtccctacacgaagttagtgcgtgttcgtggggttgtgaggccaaagcaaacccgggagcgccatctgcaggcctcaagaggaagagactgaccttagaggctaggccctgcgtcttcaacctctagcccaagggaaccaacctgcctagccacccaagggaagtgggataggggctgggaggggcaggcggtgaggagtgttttcctcccagactttaccccgcaggtggattaagcttattgggctctggaggatacaggagggagggcaaatgccaggatcccagcggacccaggccccacaggagtgagaggctcagaacctcgtcccgctgagcctggcctgagctcctcctgaggaataagggcatcccaaaaacccgggtacaagacgcccagtagtagtagttaggctgagtcaggcaggtgcatctctccccatggtatctgccgcccaggctccggccagagggaggggagcgcgagtccgccgcgcttccgcggggcgcccggagctgcagacgggggctggaggaatctcggattcgggctgcaagagcgctgcgcaagcttcgccgagccgccctttcgcagacccagggaagcggggggagggagcgaaggagggagagagagttaaaacatcagctgaagtgccaagatgatttatgagacgagggaaaatatttcatgaagatctcccggatattctgtacttaaccagttaggagacaaagggcttcttctgcctggtgcgtgcgagcggaccccagcgagcaagggagctagtgccagagagagctgcggaggctccggcaggagtggggacgtccccgtggttgcgcctcctgcgctcgccccggatccaccgagctagcagcgggcggcgctcagccgcgtccgcagcctcctcttctccccagccggggagagccagcctcgtctcccacatcctctgccgccagcgacctgcagctccgcactgtttccctcccctgtacccccttcccagtcacccgagggttcagaaaccaagtcccccggctctcccgccatccgctgggtcccaccgaggcaggtgggtactcgccggaggtcttcagctcgattctgaaccaagcgttctggactgcccagacccggtgggcaaggggactggggaggccctgcgcacagtcgcgtggaacgggaggggacaagacaaactgctggacacttttccgtggaatgagaagtggggggtgcgtgggtgggaaggtacctccggagggaaaggccaaagggaaggaccagaaagagaggaaggaagagccgggaaggaacggaagggaactcagagccgagggtggtggggttggggctagggatgcgcactgggcccggggccgcgcggcccaggcgggcactggccagtggatggcagggctgggcgagttagaactgagagcccggcttcacagcgcagcgcgctccgaggccctctgtcgttacctgaatattcattagactgaccgctctttatccttatctagcgtttatcttatcggcgagtttcgtttctcagtgtagttttaatcccgggctcccattccccctcccccggtccgctcccctccctccctcttccttcgccggctgctccctccctccctccctcccatttctccctcccctgccctcccctagccggcaccggagtgacaggctcggggccctcctcgccgaagctcggggctccagcgctggcgaatcacagagtggtggaatctattgcctttgtctgacaagtcatccatctcccggcgcggggagggggaggaggtctggagggggctttgcagcttttagagagacacacaccgggagccgaggctccagtctccggccgagtcttctcgcagccgcaacccacctggggccagcccagagctgccagcgccgctcggctccctccctccctcccggcccttcggccgcggcggcgtgcgcctgccttttccgggggcgggggcctggcccgcgcgctcccctcccgcaggcgccacctcggacatccccgggattgctac

SEQ ID NO: 5798 - DNA, 2300 bp, Homo sapien
cagtaacccccctgccatcctagttttctctcccctattagctcctcctaagcacgcatctgaactccttaaatcttttacctagtgtagtttcctggtcatctccttttagcccactacaaattgaagtgtaaaaaacccttacaataaacatgtgtgcgtgcacacgcatgcatggtatatacgtacacatttaaactaggagaaaggatataaacacaaaatagactgtccagtactatttgggggtgggaggtggagaagagccctaggccctagaagttcccctggggttcttattaatatgttgaacatatttcaccctgcaacccaaatctgtaccactttcgtacacagcttaaacaaagaagagtcttgatgcttattgaggatttagataactacttcccgttaagaagatatttttaaaattgtgttttcattatgactccatctccatttattgatcgagggatttcttgcctcacttaactccataatctgttactcagattaagaaaatgagaaaactattgtttggtagtttgagtacaggctttaaagtgatactttggaggctggatgattcaagtactataatccaagaaaagcaactaaatgatcatgcagaacgtgtttttatgcattactctttatcgattaggcatgcaaggaaatgaatcggattaaatgtttcgtagatgtgctctgttatagtacagaaacttcctagtgtaaaaacatccaacagaaagcactaagagataggaaataatacatgtaaaatgcaaatgtgtaagtcattcaacacattttgagtatcatgtttttttatgtaaaaaacaatgttacgtatagtaaattctccgctattaggagcagaaaagtaccctctattttggcacttcccttcttccgccaccattagctagtatacagctgtacatatgtgcttttggggtgaatgtgaaacctgtatattcactgtttaccttcgaccctctactttgccagctttttgtccactttattccttattaattcttcctcccggggactaaaggggaagggaaaaggaggtgaacttggagtcagtcaggcatgcttagtgaccagaacagttcaatttcgttttttctaaattttaattaattaatttatttttgagacagggtcttgctatgttgcccaggctagtctccaactcccgggctcaagctatccacctgccttggcctcccaaactgctgggattatagatgtgagcaactgtatcaggccaatagttcaatttctatacaataaacttgaaagacccgtccaaattattttatatcatttaagatttttttccatccaactgattaaataactctgtcaattaaagcttggacatcttgaaattgatattttggttgttaacagttattgcaacagtatttgacctgtctctggaagattttgtaaagaagtaaaattcgctgtaggaatctatctggggaagaaagggaactataatttgctctgtacctgttacatgagagaatctgaactgtgcagtgtacactgttttatccttttatggtttacaattacccagaaaagtgagtaaaatgcccgttttacagatgtggaggctgaggttcagagatactgaccagtctctcggtttataaggaaaaccatggctaacagcctccagagcacaagccctttacaaaggagggttggagattgcaggcagcttttacttatctatgctgcccacgcttaacatggaaaactgaaagctgaccttgtgttcctttaaaaaatctccaaggaagtcggctgcagagacttcatggtaactcatgagaaacaaaatgcttttgtggattaacaactgtctttattccaatggagttttttgggggttttttcttcttcttaaagacaaaaaaataatctaccgctgacactcaacaagaaccgtcgtagaatggacaagtcttcggatcgcgctgtgcagatccctcagcaaattgtgacagtattatggcactttggcctaagctgttaaagagacgatgtaatgaacagctgcggatttctgaggcacaattgtgtgacacaggaagcccaagtgttggccatcctcaacgaaggcagctgccgggctccggtttgcttcagcaaaccctcacccctcgccttcaaccaggcgggtgtcgtcagctgtccgccagctgctgcccgcgcctttccgcccccgcgcgccggccaaggccgaggcggccgggaccagaggcgcgcgccct

SEQ ID NO: 5799 - DNA, 2300 bp, Homo sapien
aatttggtttttgttattcttgttaactttcttccttttctccttgtgtttttcccaagcaatgtgttatttttgtaactatcttaaggattctttgataaaaaattaagaatttgaaactagttgtgacaactcattctaatttctgctgttacttagattaacatcttaatgtataaagagggtagcataagtttggtatttttcttttctgcccttgtccagcaaactcctcttcaactgattccctagatcagccaaatcacctgtattgccattctaccatctactgttctactcttgttatgagagtctgttcaagttttactccatttttataatccccattattcatttggcatacatctattgagtttttttttagcttgttattctaaattttaaaacgcagctgtgcttagataccaagtaattattttgtatcaatgtctgcagagaacaagtaggttcatatgctgatacccaagatgttgcattctaccatgtagccgtgaacatttcagtcttaagaagcactctgtactaattccttgggtctacacaccagtctgacctatttaagtactataaataatataaacctcagttgtatttttataaatgaactcctataggaagtgatacgttatattttctgtttttttaatgaacagtttagcaaagcattgttaccattgtcagaactttattaaaccaaatagtgaaatccagcctttattttataaatctttctccatttaatctgagttatgaaggttttaatatttgcttatatgatgccatattatgcttttattttcaggaagcagtcaattatagatttcttcaaaccagcttcaaaacaaggtatgtacactgttgatgcattttttgtgggctattttgggggtgaggagagagacagattcaactttaaaacctactctaaactgttttagtaaacgtagtgttcaaaattgaaaataaaatgaagatgcagtattttgttttacaaggataaactgaagttctaaatatgaaagtctttttgctgttatgttttcttacatttaaaatattattctagtaaaaaatttaatgttcataatacatactattttgattctctaatacagtaatttatagagccatagggaggttatatgatgtaccaaaagagagctttatgaaactaaggcttttaacaaataaatcatctcttaatttctcctataccccccaataaagtgtgtatcattatccaagttgttggtttgaaaatttttgtggtaacattagtatagtttaatttatattttaaacattaataatttagataaatattaaatattttactaacatgcaatttgtatgtgttttaattggctatttagacagacacatgttggattcaccacaaaaatcaaacatcaaatatggaggaagtagattgtctatcactgggacagagcagtttgaaaggaaactatcctcaccaaaagaatctaaacccaaaagggtgccaccagaaaagagccctattatagaagctttcatgaaaggtgttaaagagcaccatgaagatcatggtatacatgagtcacgtcggccttgtctgtcactagcctccaaatatttagccaaaggaacaaatatctatgttccttcttcatatcacttgccaaaggagatgaagtcactaaagaaaaaacatcgatccccagagagaaggaagtcactattcattcatgaaaataatgagaagaatgatagagatcgaggcaaaaccaatgcagactccaaaaagcagaccacagtggcagaagctgacatcttcaataacagctccagaagccttagcagcaggagcagcctgtccaggcaccacccggaagaaagcccactgggagctaaattccagttgtcactagcttcttactgcagagaacgagaactaaagaggttgagaaaggagcaaatggagcagagaatcaactccgagaattctttctcagaagcaagcagtctttccttaaaatctagtatagaaagaaaatataaaccaaggcaggaacaaaggaaacagaatgacatcatacctggaaaaaataatctgtcaaatgtggtatgtgtaagaattattgaattagcattgctactgctatgtcatatttagaatactaaatttaaaaatatttaagagttgttacatcacattgacgtctttcctgaaggaaatacttatgcacagtttgtgtagaagctggtttcattacatttcctccagttgcccttcatcg

SEQ ID NO: 5800 - DNA, 2300 bp, Homo sapien
ggtgactaatctcagccttaatacttagaattttaaacctttcattagggtgttctagacactgaataaactttactaaagttggaaagtatatttttcactaatctaacaaaaattaaattttagcaggctctaagcagaataaattccctgaaaaaagaaaaaggaactctgtggactcagatctgaaaagcacaagagaatctatgataccaaaagcaagagagtccttccttgagaagcgtcctgatggaccacatcagaaagaaaaatttataaaacatattgcactgaagacacctggtgatgtgttgcgcttagaagatatatccaaggaaccgagtgatgaaactgatggctcttctgcaggcttggcaccttcaaattctggcaattctggccaccattctaccaggaatagtgaccaaatccaagtggcaggtaccaaggagactaagatgcagaaaccccacttacctttatctcaggaaaagtctgcaattaaaaaagctagcaaccttcagaaaaataaaaccgctagctccacgacaaaggagaaggagacaaaactacctttactttcccgtgttccaagtgctggttcctctctagtaccattaaatgctaaaaattgtgctcttccagtttctaaaaaagataaagagcgttcctcatctaaagaatgttctgggcattctacagaatccaccaaacacaaggaacacaaagcaaagactaataaggccgattctaatgtatcttcagggaaaatttctgggggacctttgcgctcagaatatggcactcctacaaagtctccccctgctgctttggaagttgtgccatgtatcccaagccctgcagcaccttcagataaagccccttcagaaggagagagttcaggaaattccaatgcaggtagcagtgcactgaaaagaaaactaaggggtgattttgatagtgatgaagaaagtttaggttacaacctagacagtgatgaggaagaggaaacattaaagtcactggaagaaataatggctttgaacttcaatcagactcctgcagctacaggaaagcctcctgctctttccaaggggcttagatctcagtcatcagactatacagtaagtagttctgtgacgtttatctttacttgaagagggaaagatgattaattagtgaaaggggtggattatcggaacttactttaaaatttagtatttattataactcatatttgtactgaaaatggaataattcttgtttggtaaatgagtttccatatctttagttttattactgtaagtcagtggtctccaaactcttttgatcacacacacttaacaatttttgagcatgtaccccaacatatatgtatacctttagattatatatatgtaccactgtaatactgtgtactttctaaagcatatgcaaaaacagaatttaaaaggaagaagaagagaaaaataagtattttcctgtagaagtgacgtagaagttactatagactaagttctactggagtctctatagaagttccatataaatagaagttctattattttcttcctgcaccccaatggatcaccttgcacaccccctgctttggagaccacatctgtaaatgaaggtagagtgtagaaatgttgttgattgtggtgtgcaattttatttataaagtgcttcattctatcttgggaataagctgaattaaattctaagatgtctgtaaaatttggtggggaaggtgttaatattccatggtaacacctaaaaattagtagtttgattctactaaaatagaatttaaaagtaaagacagggtagccacagagtccttgagtgtttgcagtcacatctcaaagttagcagggttttataagtactgcctttcctaataggtagtaaaatcaaattgtctgcagtgcaaaatactagatttaaagcatgatggtgaaaattatcctttaagaaaggtgttatcctggcccagattattgaaatagaaaatagtctttcgtacccttaattacttaaaacatcccagttcttctactaagacatgtggtaaagtatttctaaatgttcttgttttagggacatgttcatcctggaacttacacaaataccttagaacgtctagtgaaggaaatggaagacacacaaaggtttgttagcataaagattaatttgctaaatttaacattttgcttgtttgtgtggcttacttttaatttaccttttttaaaaaatcatgagaaattagcgtgcattttggactctgttgtcaactgtgt

SEQ ID NO: 5801 - DNA, 2300 bp, Homo sapien
gcaaagcttggttcataaagtgaagttgagtgatactgagcctaccacactggcctactcgccacctccagagctatctgaagtcagcactgcaggttctgtgaacatttgggaagctgtgcctcttagccccctgggcccctacagtttaattgctctcctatctgctactgaaggaccagcagtcttcctaccctgcctccactgttaccaccaacccactttttgataaggactgcagatttatctttcttagccctgccttgactggtcttcccacctcagacgtccttactcagtccatcatctctttcaggattttcttctgtggtctttttcaaactactagctgacttttcccttttatttcccactaggaacccctccccgccccccccccccccccagccatttcatcaaatcaaactcactgccctctttcatgccccttccttagttccccaacacaagcctgtgcataagcttgaacatttctacctttgccaatggtatttccccttctggcttaccctgcttcctccttctcagacttttccagtcttgattgtcctctccataaacacaagaatgaacttcaaggcaagttacttaatgtcttagagcctgtttccccatccataaaatggggctataaattcctcaggatgggatgagggtacaaataaaaaatgaagcaggatattctttgtaaaagtgtgtgtacattttttattgtgtttctccccagctaccttccctctccccgccacacacatcctatttgcagagtgttgggggaggtggaactgtgatgtgggccctgctgtctagcagtctgcagtcacacacagccatccaaactacgagattgtatatgattcagtgccaaactgtgagctttggggaatccagaaagaaggatgaagcctttcccaagtttcctttagttaaatgtgccacttgaatcctgttctgactcctaggcacatgcaagagtcaatcacatatgttcctgtggcctttatcattttggtccatctcttgagcccacatgaatactgtcatggatggaggaggaaggaccaggctgggtcagggcctgaatgcaggttttgtttggactataggggctaagttcactttaataggctgtgacctattaaaggaggcaggaaccaagtttgcacagaaggaccatcctagttgagttaaaggagttggggagttgattgtgaggggtttcctagattgctgctgggtaaggtgattgaatctgggaaggatagggtacttgattgcctagaagggtgcactctaagttctggataagaatggtgcccaagatgagctggaggggaaggcaagtgtttgaatgacccagtccctgaggtgagcctaggttagggttaagatttggtgagtgaacaggtgcaaacgcttgtggcttatttatccagaaaaagcattttctgtgtgcctttcaggtcaggctgttactttatccccttcaggcctgaccccatctcccccacgcatagctcaagctgaacagcccctgaagctgggaatcaagcccctaccttgtgttcagagcttccctaacgtccagtcgccacctagggtagccttccctccacaccctaggccgagagcagaagcgggtggcaggagcacagggagtgaggtccaggttagaggacaggccagaaggccctccgagagggtcccccaaccccgcaacgccaggacaggtttgcacgtccccagcagtaggcaagtcaggggggtcctagggttacagcggaggagaggacgggctataagcatgtggagggtgcacggggtggcgaggccaccaccagggggcgatttcagggccgcagcgcctagaggtggggggtcgcccgatggccgaaggctgtgtgtgagcctcgccctcaaaccgcctctattgtgctagagtagggggcgcaaagaagagagtggcgaccttcccctcaccccacccagtcggccccgcctttcaggaccccgccccacccccggctccgcctccaccaccccccccccgccccgcctccagccgcggccccttcctctcgcagctggtgctgtggggccgcggagccgcgcgtcgctgtctctatggccccggatccgagcgcaaaggtgagcaaggcgaggagtgcgggcggcgccctggcgtgagcctggggctgcgggccgggggtcgggcaaggcctcccccacgtccattctaccctccaagctgggccaggcctttctcaccaccaagtccc

SEQ ID NO: 5802 - DNA, 2300 bp, Homo sapien
tcaagtcaaaggagctggggttcttggagagaatgcctgcttctcccaacaatgagatgcaactcggtcagcagctgcccctgctgcctgcgggggtgccttatgcaggagggcctaaccagagaggtttaatggacctttgtttattttgtcctgctttccctttgttttttcttttccctggcctgagagctccctctggaatttctctttaattataacttcttggtattcctctccaagggggtgcacatctctgcccacgccagtctgtattgcaccctctggctaggcatccacacgtgtccctatctgcaagtaggcattcacaggcattggggtgggtacctaggatccccctggttgcacaggtataatgtctgtgcagaaggctgtagtgtgcaaggccagttgagacataagcaacgtgaagaaggtaaatgatgggatccctgagcccttggcccctcccgacacatcttggaccctccctcaagccaaccagttggggatgggatgggggtgggtggcaggcctctcccaacccctgtaacaggcctcctaatcaccaaggggttccttgaagagttcctgggctgggtgaggtgtggagagacctaatacattccatctcatcagccacccacaggcagggccagagggtgccactggtgcctcctctcccaggtcaaatattaactatctggccttggaaagaggggaggaatcaggaactggccagagggataacaggagcaattattcaagaggtaaaggtcagcactgcaggggcagagccctgaggggtagagtcaaatatgaaagggagagaagaggattccctgaccctgaaagggcataggctccctgtttgggatctgggacagcaggaagcttcaggcaagccggccatgccccacccctccctgtggaggcacacctgtttacctttgggacctcctatttgctcagtgcaaaaggcatgtgtgtggggagcactatggctaggaggaacatgccccaggttagaggagccactcagtgtggtgcatgtcacacttatagtttaagagtcacatgggtgactattaggaaggtgatatacatgcacatgggtgcacacacacacacacacacatgttcacaaggaggactgtgaacacgtggattcacaggggtcattcacacatatactcacagggagttttgtgcacacatatgctcatacagagggccacagccacaggtaatcatacatattcacatgtgacgttgaatttacatgcccatccattcagcaggtcacacagcctcagacattgaggagagataaacccacacatgtgggtttgtgtcaaggactgtgcacctattcaacaggagggtcctatacatacacatgtatgtgtagggacatgcacacaaacccattgatatagtgggccaggcaatcatgttcacagaagggtcaagtacatgtgtgctcacacgcagttcttgaacacacaactacatccatgcagagacaagcacacatgcatacaggggtccagtttttgccataggcttggaggctgccagtgtccactggggtgagatgcagagcagaaccctgcctctgttcctgaaagtcccaattctaaggcccaatttcaagtgtgtgtttgtgtgtgggggtggtgagggggttgtgtgtgtgtgtgtgtgtggtgatgggggaggcttctgaccttggatgggcagatgggatgggtgcatgagtcaaggccgctctacaagggagggaatgggaaagtaactcaggcaggaggaggcccctagcttcagcaaagatggaatggaacgcataatttagtactcctccacccctatgtatattgcggttctaaaggtgggagacgggctggagctctcagcccccacttaacctgtgggagggggcggggctaagtgggcggggcggagcatatcacccctcccttcagtggcgaagtacgggtttaaggtctccagtccacgccccacactccaccccaagttccacagttcgggttcttccccagggccagccccctgaactctgatcacctttcctctattagatcttggggtggagggaactggggaggagagacccttcaaacaggatcaatggaggatcagcaggctctcgaccttcatcccagatgtccacctgcctagtgtaggcggtatttccctctgcctagtaggatggcggtctctcctggcttgagagagcccctcccccgggaccccctccctccaacatcctggacagt

SEQ ID NO: 5803 - DNA, 2300 bp, Homo sapien
tgaagctaggggcctcctcctgcctgagttactttcccattccctcccttgtagagcggccttgactcatgcacccatcccatctgcccatccaaggtcagaagcctcccccatcaccacacacacacacacacacaaccccctcaccacccccacacacaaacacacacttgaaattgggccttagaattgggactttcaggaacagaggcagggttctgctctgcatctcaccccagtggacactggcagcctccaagcctatggcaaaaactggacccctgtatgcatgtgtgcttgtctctgcatggatgtagttgtgtgttcaagaactgcgtgtgagcacacatgtacttgacccttctgtgaacatgattgcctggcccactatatcaatgggtttgtgtgcatgtccctacacatacatgtgtatgtataggaccctcctgttgaataggtgcacagtccttgacacaaacccacatgtgtgggtttatctctcctcaatgtctgaggctgtgtgacctgctgaatggatgggcatgtaaattcaacgtcacatgtgaatatgtatgattacctgtggctgtggccctctgtatgagcatatgtgtgcacaaaactccctgtgagtatatgtgtgaatgacccctgtgaatccacgtgttcacagtcctccttgtgaacatgtgtgtgtgtgtgtgtgtgcacccatgtgcatgtatatcaccttcctaatagtcacccatgtgactcttaaactataagtgtgacatgcaccacactgagtggctcctctaacctggggcatgttcctcctagccatagtgctccccacacacatgccttttgcactgagcaaataggaggtcccaaaggtaaacaggtgtgcctccacagggaggggtggggcatggccggcttgcctgaagcttcctgctgtcccagatcccaaacagggagcctatgccctttcagggtcagggaatcctcttctctccctttcatatttgactctacccctcagggctctgcccctgcagtgctgacctttacctcttgaataattgctcctgttatccctctggccagttcctgattcctcccctctttccaaggccagatagttaatatttgacctgggagaggaggcaccagtggcaccctctggccctgcctgtgggtggctgatgagatggaatgtattaggtctctccacacctcacccagcccaggaactcttcaaggaaccccttggtgattaggaggcctgttacaggggttgggagaggcctgccacccacccccatcccatccccaactggttggcttgagggagggtccaagatgtgtcgggaggggccaagggctcagggatcccatcatttaccttcttcacgttgcttatgtctcaactggccttgcacactacagccttctgcacagacattatacctgtgcaaccagggggatcctaggtacccaccccaatgcctgtgaatgcctacttgcagatagggacacgtgtggatgcctagccagagggtgcaatacagactggcgtgggcagagatgtgcacccccttggagaggaataccaagaagttataattaaagagaaattccagagggagctctcaggccagggaaaagaaaaaacaaagggaaagcaggacaaaataaacaaaggtccattaaacctctctggttaggccctcctgcataaggcacccccgcaggcagcaggggcagctgctgaccgagttgcatctcattgttgggagaagcaggcattctctccaagaaccccagctcctttgacttgagggcctagtggagcttctgacttggccagaagagggtcatgaccttgggtttcgggttgtgggcatctagggtcttgtaaggaaggtaagttccaccccagcctcctgcatcagagcaaagcgatagacagaatgattgtgagtcgatcctggcgtgggcgttctgtggatgctgggcctccttctttcagtgccccctgaagtctgggtaacgccatccatcttccacccacatacagatcaaagggcttttttttccccgttttttcttcagaaaacggacctcagaaaaccaggactagctctactgtcgggggcagggtgaccccatcagtaacctacaacccctctagaacttcacaactccctctcaccatggagtttgcatttgatgcagaaaggcatgtgatccctccctccttctgacctcttagctggggattccatggccacacaaccctgtgactccatgtc

SEQ ID NO: 5804 - DNA, 2300 bp, Homo sapien
cctccaccccacaatgaatgtatttattgtgagaatggctacacttctttaggaatgcccccacttacaaccaggtgggtggaacaggcatgtgacagagtggggagcctgggctcagctcctccccctgccgttggttaataaacaccctttttccccacagctatgactagtctgcttcatctagatgcgcccacccctgatcaccaggggacaggctcctgagcctatacagaaggtgatatctgcctccaggattggctctgctccccaatacaactatttgcagaggaaattgggatcctccgcttccatcctgactccttggcaggcacacaggcctctttagtaaggttcacactattcattgatcatggtgttagggcatgacaagaaaatgacaacagttcaagaattcttacaggggtttctagattttcatttcctgcctctcatttccccaccatcccccctttttaaactaagattagaaaatactcattaatatcagccttcctgcccttccccaaggttctcagcaccccccaccagctggctcaagggacatggattttatttctgcacaaagagggacgtggggggaaggagatgtatagctaagaccagagaaagcttgtcagccaggacttggtctgagaatcactcccctctccctttcaggggtcaggcctagattaatcacttggcctttgatactaaccacctgacagttgttatatgttctgcgtctagttttaaaataatgaaaactgaggcttgtgcttaacatatgcacacattttgaagacagacctgaaatgtgaccttggataagtttattaacctgttttataaatctgtattcacacagatataaagtgcctagcccatcacagcagagctctccgtagctcagtggttgttccaataagacatcagggattcttcagaagccagccttcagacctctcactgtgttttgagatcattattatcaatttggatttaaaaaacaagggccctgtaaaacccttgaagtcttcctcatctcaggttttagggatgccacttgcataaaaatgagtggttcacaaggtcactgcccccagaagcaggcactggaaagaaacaggcagctcttcattatcccaagcagaacctctgtcaacttgcccattgatgggttccatttgcctgggcttggaatcccaaaggggaagaaccacctttaccggagtaacagtccaaagcctggggctgcagttggtggggcaactcttcactgtgcttgcacctgggctggggcaggatcctgaacctctcgggggcgtagcccgcggaacgtggtcggcttgttggtgaaggggtgccactggccctggatgctagggttgtcggtgtggaagggcttgcggatgcggatcacgtccaagcccgactggtcggccagcttctgcaccagcgtcgagatctcctcgaccgacttgcagtggatgctctcctcgcgcacagccccgttaactggcagaagaggggtgagagtgggtggaagctggccggtgcgaccaagcgagaaggaggatagcgggtcgagcccctgatcccgccctccagcccgagcccggccccactcacggtattcggccactactctgggcacgcagcacggacgcgagtttacatatattacgacccctggattccgtcgggcgaagtcgatcacctcccgctccacgaactccctaagcgacccgggacagtgagcagtatgacccctgactgggggcgacctacccggggagtcgttgccacctccacacccaccccgacccgcgcctgcgcacttcccttggctcacctggcgccgcgagacgaggcgccgtcgcggctgacgctgaagctcagacgctgcagctgctgcacatagcgacccagtccgttgtggagaacgctggccaagaagcggctcggagtcccgcgcgccgtcatagctacagcttggaggccgcggagcctaagcagcgaggagaggggggcgggactaaacctcgaggcttccggttccgggacgaccgctcccggagttttgcttccgaggtcaaggcgagtagcatgtgcgggagactcacgttgccggcgaagtgggagagagaaaagtggtaacctggggctgggggccggcgcggcggagctcggagtagtagagcggagtgaagacacgggggaggatagagactggcattcctttgggccgggggattggcgggagtcgtgctgggtgctctcgccgtgttgaggtc

SEQ ID NO: 5805 - DNA, 2300 bp, Homo sapien
ttggatttaaaaaacaagggccctgtaaaacccttgaagtcttcctcatctcaggttttagggatgccacttgcataaaaatgagtggttcacaaggtcactgcccccagaagcaggcactggaaagaaacaggcagctcttcattatcccaagcagaacctctgtcaacttgcccattgatgggttccatttgcctgggcttggaatcccaaaggggaagaaccacctttaccggagtaacagtccaaagcctggggctgcagttggtggggcaactcttcactgtgcttgcacctgggctggggcaggatcctgaacctctcgggggcgtagcccgcggaacgtggtcggcttgttggtgaaggggtgccactggccctggatgctagggttgtcggtgtggaagggcttgcggatgcggatcacgtccaagcccgactggtcggccagcttctgcaccagcgtcgagatctcctcgaccgacttgcagtggatgctctcctcgcgcacagccccgttaactggcagaagaggggtgagagtgggtggaagctggccggtgcgaccaagcgagaaggaggatagcgggtcgagcccctgatcccgccctccagcccgagcccggccccactcacggtattcggccactactctgggcacgcagcacggacgcgagtttacatatattacgacccctggattccgtcgggcgaagtcgatcacctcccgctccacgaactccctaagcgacccgggacagtgagcagtatgacccctgactgggggcgacctacccggggagtcgttgccacctccacacccaccccgacccgcgcctgcgcacttcccttggctcacctggcgccgcgagacgaggcgccgtcgcggctgacgctgaagctcagacgctgcagctgctgcacatagcgacccagtccgttgtggagaacgctggccaagaagcggctcggagtcccgcgcgccgtcatagctacagcttggaggccgcggagcctaagcagcgaggagaggggggcgggactaaacctcgaggcttccggttccgggacgaccgctcccggagttttgcttccgaggtcaaggcgagtagcatgtgcgggagactcacgttgccggcgaagtgggagagagaaaagtggtaacctggggctgggggccggcgcggcggagctcggagtagtagagcggagtgaagacacgggggaggatagagactggcattcctttgggccgggggattggcgggagtcgtgctgggtgctctcgccgtgttgaggtcccagtgaggggaaggagaagcggaagagggtctctagtcggggcctagggcaaagggactacaaaaaggatgcagatgactatagaaatgaggacgacgaggagatgctgtggaggagcagtagaggtgagaagatgatgcaaagaaactgtgtcagtgaggaactgtatagagggtcatagaggtgaggtggcggagagaaactaactaacggaccatagaggtgggggagccattgtagaaggacgtggacgcgaaagggtcgtgtagatgggcatatgtgtgaagcagcaacgtagaggggctgaagaggagaaattcatggagagaaagaatgcacctagagtgagctctgcagagtgctgcgtgggatatccctagagtttggtctagtgaaggcacgctaaccaggcacctaaggcatttcaagtagtgacttcccacatttggctaggaatgtgggtcctcctccgaagtgggtaccccctccgtatcttgttacccctgcgtggggagtggatgggtcggaggggcctgccccgaaacttggccccaggccctcctcgcagacgttacaggaaggagactctccaagccttggatatgccagtgttgcctgtaactgcaactgaaatccgccagtatttgcgggggcatgggatccccttccaggatggtcacagttgcctgcgggcactgagcccctttgcagagtcttcacagctcaaaggccagactggtgttaccacttccttcagcctcttcattgacaagaccacaggccactttctctgcatgaccagcctagcagaagggagctgggaagacttccaggccagcgtggaggggcgaggggatggggccagggaggggtttctgcttagcaaggcaccagaatttgaggacagcgaggaggtccggaggatctggaaccgagcaatacctctctgggagctgcctgatcaggaggaggttcagctggctgatacaatgtttggc

SEQ ID NO: 5806 - DNA, 2300 bp, Homo sapien
aggaggaagtcctacccttgaaaccaagacataggtcagggctttaaaactggggggaaagggccaaccttcttttcaacattgtcatggcccaaacccacttgcttttgtcacctgatcttctgcccctttactctaagtagtgatttctcaaagggttacctgtgaagaccgtcagctcgccctttcgatgtcccttcaagatacgattgaggtctggaaagcggctccagcggaggccagctgcttgctccacatttgacagttctcctagcacctcctcccgaagctgccggaaagatacgatggacttgtgccaggcaggcagggcggtacgaagaatacgagaaagattgaagcctccgttcagggcctccaggggacggggttgctggtctcctggtcgcaccaagaagcatcgtttggggttcagttttcgtgcaaacaacttggcggcttcccaggaccgaaggtcatcccccaaccagaatacaatccgccggaactgttccaggtaagggagtaaggcagggggtaagcaggtcgttcctcggggtagagtaagggtaggcagccccgtggactggttcaaggccaggctgtcaagctcacgactcgtcagtaccacctcagcatctcgacgactaatcagtggtaatccaaacagattgtggtaggcgctgggtcggggaatagtggtttcctcgtagctcactccatccccctggcatttagcctctaggagcttcaggcctcgtaatcctgagcccccaggggagaaccaagggaagacaagactgcgagcaggtcgcagatatcgcacactgaaacgcttgagtgtgtcatctgtaaccttggtaaggccaaacattgtatcagccagctgaacctcctcctgatcaggcagctcccagagaggtattgctcggttccagatcctccggacctcctcgctgtcctcaaattctggtgccttgctaagcagaaacccctccctggccccatcccctcgcccctccacgctggcctggaagtcttcccagctcccttctgctaggctggtcatgcagagaaagtggcctgtggtcttgtcaatgaagaggctgaaggaagtggtaacaccagtctggcctttgagctgtgaagactctgcaaaggggctcagtgcccgcaggcaactgtgaccatcctggaaggggatcccatgcccccgcaaatactggcggatttcagttgcagttacaggcaacactggcatatccaaggcttggagagtctccttcctgtaacgtctgcgaggagggcctggggccaagtttcggggcaggcccctccgacccatccactccccacgcaggggtaacaagatacggagggggtacccacttcggaggaggacccacattcctagccaaatgtgggaagtcactacttgaaatgccttaggtgcctggttagcgtgccttcactagaccaaactctagggatatcccacgcagcactctgcagagctcactctaggtgcattctttctctccatgaatttctcctcttcagcccctctacgttgctgcttcacacatatgcccatctacacgaccctttcgcgtccacgtccttctacaatggctcccccacctctatggtccgttagttagtttctctccgccacctcacctctatgaccctctatacagttcctcactgacacagtttctttgcatcatcttctcacctctactgctcctccacagcatctcctcgtcgtcctcatttctatagtcatctgcatcctttttgtagtccctttgccctaggccccgactagagaccctcttccgcttctccttcccctcactgggacctcaacacggcgagagcacccagcacgactcccgccaatcccccggcccaaaggaatgccagtctctatcctcccccgtgtcttcactccgctctactactccgagctccgccgcgccggcccccagccccaggttaccacttttctctctcccacttcgccggcaacgtgagtctcccgcacatgctactcgccttgacctcggaagcaaaactccgggagcggtcgtcccggaaccggaagcctcgaggtttagtcccgcccccctctcctcgctgcttaggctccgcggcctccaagctgtagctatgacggcgcgcgggactccgagccgcttcttggccagcgttctccacaacggactgggtcgctatgtgcagcagctgcagcgtctgagcttcagcgtcagccgcgacggcgcctcgtctcgcggcgc

SEQ ID NO: 5807 - DNA, 2300 bp, Homo sapien
tggggagaatccttttgtaagggttgggggaaggtttcctgctccgtttggaagcagggctgccttgtcaggctcttcctttcaacctatgaaggggcttctggggccgatggaggggtctgtggtctctggagtgtgagaactctggtcacaaatgtctcctgaaacatccggagcaaggctgctggaaagctgctctctgtgaggaagaacctgggggggtggggagagctcctccagggcctcccttcttgggggtctctcccagactggctggagccaggcctccctaatcccgcagtaatcattcccagccgttggctggtctaggcctcatccagagtctgtaacgctgaacggcagccatgccttccagaggcacaataccatatcagtcatacctgtaaggatgtgggttccacattcctgtctccctagaatgcctggtgggttctcaggagatcttttaggggtttccagtaggggacctttgtgaggtctctgtgaactggggatagagggatagatacagacttggctgtttgtcttgccccacccttctagcagacacccccacacagcacaaaccagaatgatgagggggaggggaagctaatactccccccagccctacccgctgcacaaacacgttctattccatacctgccttaaataccccatatcatgattccacccagtctgttcagatccctggattctagaaagcagtggggggtccctagggcctgtgcggattccctgggataggactggtctgtctacacccaactggatgttaagaatctccctgactcacaggttcggtggattgggaggaaaaaaaaaaaatttccctgagatctcaggaaaggcctggctaagccaggtccagttggatctacagccttgtcctctaattgataatgtatgtcacacttggccatgaggggacagctttggtcctctggcagcttcctctctgctgtggatgggtttaagaagaaacaactcggccgggtgcggtggcttacgcctgtaatcccagcacttttggaggccgaggcgggtggatcacgaggtcaggagtttgagaccagcctggccaatatggtgaaaccccgtctctactaaaaatacaaaaattagccgggcgtggtggtgcgcgcctctagtcccagctgctctggaggctgaggcaggagaatcgcttgaacctgggaagcggaagttgcaatgagccaagatcgtgccgctgcattctgggcgacagagcgagactccgtctcaaaaaacaactcaccgaggtctcctgtagcccatatgggccagatacctgtagaccttcctacatgctgccttgagtgccatggtgggagggagcccttggggcctccctgcaatacaggccaacttcctgtttgtgcctgtgggtgggactttatgagtcttcgagaagcccagccatgccccgtgggggtcagaacccgcaggcctgctcacctgggcagatacctactctagggagggggctgtgctggttctgcctgggcagccccacgctgaggtgtgtgcgtggtaggggtaggtgggagctgctctggtgaaacttgagccttctttgtctgcttcccaggggttgtccctgtatttggggattgggccaagagtggaccgggttgggctcccatcggagcagggagggtggcagagtcaagctcttagtttaagcttagtttaaggcagccaggtagccgaattctcggtcacgtgatgctcgcccccttccccaggtcaaaaaccaaatccagtaagctgtgaagtcagaggccagaggggcagcctcggccaccgtcgagtcactcttaggctgggcactgggtcggctgctggtggagtgcggggcagaccactcccctccctgggtggggggcgcggcctgagccgccccgccccgccccgctccaccaggtcgggccaggcgggcgccgggagctgggagccgggagcccagagttcggaacctagagttcggagccggctagggagccggcgttgtcgcggcgaggaggtgggcgcgctggagcaggagcggggccggaactggagccgaggcgcaggtggcgctgggtgagtggtggggcggcggaggtgcaggaactcccgcctcccgctcatccccgctcctgaacgaactttccgcttctagggaagctaggggttggggtgaggaggggggtccgcacttggtggggtccccgcgaagagtccgaacagggaagtgacacgaaaacgcacgccga

SEQ ID NO: 5808 - DNA, 2300 bp, Homo sapien
tccaccctagtccggggcgcgtttgcttggtcccaggccggacggcgttccattctccgcctggagcggggataagccctctcccgggaaccggagcacagcgccccctggagccggggcggagcaggagggcccggctgctgggcagggctggggttaactcgggctcctggacgtccttctccccagcacattcttggtgtctgcatccctgaaggtttcggagacaggcccttgatggcagtggacagctgcccccgcctgttaccgccagcccagagagcagctgcctgagcgcctgcgggtccccttcctaccctcacctccactccttgcgggagtcggagtctcctccccccagaaaatgcatgagtgtaaacgctccctcaataccagagtgggcctgcccccctagaaaaaggaggacgagcccctccccccagggaatgagggagtgggcagtagcccgatgcctcctcctcgccccaccccctacccctacacacacgctgagcccagctgccgcctgagctgggcaggctgccagaaagaggaggaggctctcggtgccccaggaggcagggatcagggcaaggccagaggagggggctctgctggggagaggggctcagtctgttcttgtgaggctgagggtctggggtgagtcagggtggctgggctgtgtttccctttccagggaaaaagaaagaaaaacaaccctgtccatggagctaaaaatagagctgagagccggccagggctgtggcctggaagggggggatgctccttcctggggcccgggcgagctccggcaggccttggccctgcgggggagggggtggttaggggagaaaggctgcctttgcccagggatgcaggcatcagctgacctgaccgggtcaccgagacccctaggggaaaggctgtgcggtagaatatttgtgaagcacggcgtgtaagaagttgtctgtgtgagtgactgtgaatagaggctgtcaatgcgtgaaagatggttaggagactaagtgcacttgagactgtgactgggtgcgaaggactgcggattgttgtggaagcctgtgcccaacaggcctgtgacaccgtgtctgtgtgtgaggtggactggaagattatggaaagaaggaacgcggacccacgtgacggctgagactgcggctgcatgtgggaaaggtcttgtgggtgttagggagactgtattgtgtgcgagaaggtgagactacttgaccctgaggaagtggaatattgtctgccgtgaggctggtgtaggtttgggctgtaggcttgcaccggttcgccccagtgattgttggggagccaggggccgctcctctccgataaatgacctctctcttagcaagtgatcccgaggggaggctggggagcacgcggtcgcgccagaggccggcctgggttcgcggggaaaagggcaccgtgccggggagtggggcagggcccgcgtgttgggggcggctgggtgtgttctccgagccggccgccaggtggcgtcgcctccgcgaagcccaggttgccgcctccaacccgccgtggggcaggcgcggatcgagcctcggcctcctactcgggctagggcgcggggtcccggcaccggagagtgggggacggccggccatcggcctctcgcttgggactctgaggctgagagcgtgtcagggaagcttcgcctggagaagcggagggggaggggcggccgccgccgcgccgtggccctttgtgctggaacaatgaccagctgccgctggccccggggccccggctggggttgagggtgaccaccgccgccgccgcgtcgagccgaaccgagcccccagacacgcagtcacagggcgtcggagggagggctcccgactgccgccgagcagcccctacgtgcgccccggcggattcgcgtgacgcgggtgcttgcgcgtgtccgcgccccggggcggagacgcccctcggaccctcccctgcgcggtgccgcccactcgcaccgggcgggggctggccagggccgggggcgccgcggaggcggaggcggggctgggccgggcagctccgagtggcggcgcgcgggccagggccggggccggggccggggccggagccggagccggggccgggcggcgcgcctgtggagcgctgggggcggcctggggctgagcatggagcagcgcggcggaggtgaggggggccgggtctgggaggcggcctggggagcccccaacttatgcgcggtggaatccagccggggggacggcgttccccagtcgcccccactt

SEQ ID NO: 5809 - DNA, 2300 bp, Homo sapien
tctgagcctgtctccttccttcaattttcactttctccgtgctcgctgaagtggggaaatgcaacagaggtgccagcccccttggccccctaagaagtcccttccccactgttcactccacaccctggagtgggcccagagaggggaggggagggggttctctatctgctctgctgggggctggggtgtgtggggtggtctgagccccagccctacagaggggcctgtggtcactccctgctcctggcctacccctcccccagctccccgcagctcctgccccagcgtggacacctcttcctggttcgcagtgtcttttgacttgggtgggaaggagggcggtggatttaatggagggcatgcgagaaagaaggggaacagatcaggcaaaggagttagataatgtcccacctctccccacacgccgaagagagaaggaaacaggctccccccaccaatgggccctcaagccacccaggctcccaccactctcatacctgcgtgcccacgttcacaggctccactgcaccactcaccttcctagtcacacacaaacacaggagctcacacataaactcatgaacttactgacaagtctgtccaggcaccgtctctcccacacaccacaaattcacttgttagatccacatttataactttcacaggctttctaatgacccctgatccacatactcttctaagatatacacatgtgaattcacacatgaactcatatgtatgtgaatgaactgatatatcaaacatgcatagactcacatgatgttttcacacacattttcatacacacgtgttcattttcatgctcctgtgcatgtagtcacacaacaaataactaaatgcacacactcctactcccagtgcaattctctgtccacttcttggccccgctctgcatgatgacttcagcagatgcctaagtcctggtcatcagcggcctcgggactgggactagggagggggttccgggtggaggcttgcagctgcttccaggaaggagcagagcctggggaggtggagccctcttgcctgggctctgtggaagtgaggttttggagcagcctccagaggtgaaggcagggcatctaccttcctcccctcagggttagtttggggaccttctgaagctgtagggtttcagagaggttggcagtggggcagagcctgtggaggctccttcaggccttcaggcctcaccgattgggtgtgcagaggctaggagttgtcatggaaactggtatgagcctgcatccacctctgggaggcaggagaccccaaaggacacctgtggactccctaagagccgcgggtttcttatttagccagatcgacagagaggcagtttagccgcctttctgtctgagagaaactgaggcccagcagagggaggcagggcactgcctggccttggctctttgttccctaattaccatctgaggtgctgattgcacccctgaggtacctctgcccaaactgccctgtaatgaggccacctggctgagaggaccagggacctgtgcttcaagctggtagagaaggcccctccctcacctgagtcctggcctctgtggaggatgcaggattgggcttgggcctgggtctttgctgccaggtggccctgcggtaatcatccaggcctcccatgcctctcagcatctctgctgagtgaattcactcctcagccctgttcagaccagcattgggcagtgtggtttggggcccagggggaattgagattcattccagcacttgaagggggagtcttggtggggatcagggcttgttactgatgtcaaggaggtgtttggtcaggatcagtgggtcaggaggggtctcaaggtggagggactctgacaccactgccctgcttacaggtcgcctgcgaggccgctggccaggcctgagcctctgccaccatggccattgtgcagactctgccagtgccactggagcctgctcctgaagctgccactgccccacaagctccagtcatgggtagtgtgagcagccttatctcaggccggccctgtcccggggggccagctcctccccgccaccacggccctcctgggcccaccttcttccgccagcaggatggcctgctacggggtggctatgaggcacaggagccgctgtgcccagctgtgccccctaggaaggctgtccctgtcaccagcttcacctacatcaatgaggacttccggacagagtcaccccccagcccaagcagtgatgttgaggatgcccgagagcagcgggcacacaatgcccacctccgcggc

SEQ ID NO: 5810 - DNA, 2300 bp, Homo sapien
acctccaccagtggccgcaattgttatgaatatatgggcactggggacccaagacgggagggcagggagtgtcataagggctctgcaagattgggcagctcatctccagtgtcacatggcacctcatttcagaacatggagaagatcctgatccgcccaacagccttcaagccagtgctgcccaaacctcgaggggctccgtccctgcctagcttcatgggtcctcgggccaccgggctgtctgggagccagggcagcctgacgcagctgtttgggggccctgcctcctcctcctcctcttcctcctcctcttcagctgctgacaaacccctggcatttagtggctgggccagtggctgcccatcagggacgctatccgactctggccgaaactcactgtccagcctgcccacctacagcaccggaggtgccgagccaaccaccagctccccaggcgggcacctgccttcccatggctctgggcgaggggcactgcctgggccagcccgaggggtccctactgggccctcccactcagacagtggccggtcctcctccagcaagagcacaggctccctagggggccgtgtggctggggggcttttgggcagtggtactcgggcctcccctgacagcagctcctgtggggagcgctcaccaccacccccgcctccacctccttcggatgaggccctgctgcactgtgtcctggaaggaaagctccgagaccgggaggcagagcttcagcagctgcgggacagtctggacgagaatgaggctaccatgtgccaggtgtggtcagaggcaatgatggggaaggggcatggcaggacatcccaaggccctgggatgcaagcggcatttccattttggcagggaacgggggttgggtagttgtagttgtgacccccctgccctccccaccagttgtctggtttaatgtgtggagtagccaggtgtggtggctcacatctgtaatcccagcactttgggaggccgaggtgggcggattgcttgagctcgggagtttgagaccaacctgggtaacatggggaaaccccatttctactaaaaataaattagctaagtgtggtggcatgtacctgtagtcccagctacttgggaggctgaggtgggcggatcactggagcccaggaggaggaggttacaatggactgacattccaccattgcactccagcctgggcgacagagcaagactctatctcaaaacaaaaaacaaaacttgtggggtggaaaggagtcagagtgcatggattcaaacctcccactgccaaatactagtttttgggcttgagcaagttgcttaactttactcagcctttatttcttcatctatatagggatatttctagcttcgtaggattattatgaggattaaataaggcaaaaggtgtaaagtgattagactaatgcctggtacctaggaagtgctatataaatgcttgccttttttaaaattttttattattttttatttttagtagagacagggtttccaccatgttggccaagctggtcgcgaacccctggcctcaagtgattcacctgcctcggcctcccaaagtgctgggattacaggcgtgagccactgcacccggccaagtgcttgctttttttattttttgagacaaggtctcattctgtcacccaggctagagagcagtggcgtgatttcagctccctgtagcctcaaccccctgggctcaagcagtcctctcaccccagcctcccaagtagctgagactacaggcgcatgccaccacaccaagctaatttttggtctttggagaggcagggttttgctgtgttgcctaggctggtctcgaactccggagcttaagtgatccacccacctcgcgtgagccaccgagcccggtctgcttgctcttgtgtttgtttctatgatcatcataaaagcagttagtattgttgttgcaattactattgttgtttaatggaatccacccttcctgagccctcggaagtgggctgccagagcagacactgagtggggagttgggaaaactgcccaggagccaggtctctcttctcgcctgcaggcatacgaggagcggcagcggcactggcagcgagagcgtgaggccctgcgagaggactgtgcggcccaggcacagcgggcacagcgggcccaacagctgctgcagctgcaggtgttccagctgcagcaggagaagcggcaattgcaggacgacttcgcacagctgctgcaggagcgcgaacagctggagcggcgctgcgccaccttggagcgggagc

SEQ ID NO: 5811 - DNA, 2300 bp, Homo sapien
ctaggtcctgtcttgctcatcagctgttagtcacctcacatctgtcactacagccaggctggctcctaagtgcccacctaccatgctccatgcttttcacttccagcctttgttggtgacagctcacccctgccaccagctgttcttattgctctgtcctgctacactgtagattcctggaaggtgaagagggagcctgatttctctctaggtcccttgtaacacctccccagggctggtatagaattgtgctccatgaagcggcattaagcaactacataagcttaggtctccccttccctgatggagctccctctccaccctcaaccctcctcttctgaacatttgctgtgctgccttcattcccctccttcagcacggaagccctgaattctgtctacccgcttgggcactgactcctcgcagcccagcacagagcttgtcacacaatggactggttgatggaggatgtccttctttatcctgccccatcccccagaagtacacacaatggatctggagaagggcagagcccatgggagagaggccagttcaatcccctgccttgtccaccaggggctagcataccacacgcatgcctgtccctgctgccatggccttctttccctcctctgacccttctacgaccctggacccctgcaggattggcctggaggagaggccaagggcaggtgaggaagagtgtatgggttcccaggcggcctgccacctccctgtgactcccatctcttgaattcccccaatcatactggctctgcctcctcctgctgagttcccattgtcccctacccccaccctccccaacccaggccagtggctgggtcccgcccctaccttcgatgggggagttgatgaggatgacgcgtcccatgggcgatgaggctcggattccgcgggggggcccgttcagcagccgttgttgcttccttagcaggtatcgcgttgcggtggagcctgagtcgctgcctaggtggcctcgggaggagagggagctcagagagccggagctcaggtctcctaggcccagtgggtcgaagcccactgcgaaaccctgcgccatggcggctgggctagggcggcaccctacaggtccagaaggaatctgctagctctggagaggccagccctgcgtgcttcgagctccatgagcctctgtgcggggctggggtctcagtaacgtgaaggccctcgcttgcgatgcctctcagaagtgtgagctccaggcctgggcagggagagcagggatgagggaggggtgtaaatgtttcccctgctgccccctaaaacttccacccctccccctggtttaagcatcctgccctcccatgccttaggcccccctcctgtctcaccctaggccagagaactgccccgtccaggcaccatcttggactctcgctgactttatacaaggcaggtgggaacctttcacccctcattcctgctcggggctgagtcatctactcccgtccccagtcctcagtagaggttgagagtggagttgggattactgcgggccctggggcttagagaggtgtgagacaaaagagaggtcaggacagctcatggcatcacctctctcatgcatatgcgggcatggaggtggcccggggtggggcgggggctgcgtggggcgggctgggcctcgaggatagggcttcaggaccttagacagctgaggcccaggaagacccccagacacccgcgggctccaggctgcggctccgggtctaaagaggctgcatgaacctctcccaagctttggggaggatctgctggagaggggtcccacgacatcccgcgcaaaacccagggccagttccctcagagaagctctgggacctagaatgaagcaccccaacatcaactcggccctccaggccccccacccctttgtgcctggtcggcctcacctggtcgctggtgtggcgccgccagccttgtcaaaccacccgcaggcgagagctactgccgcagccggcaaaccccacccacgctgcgcggaggctgcgggaattgggctggcctgcaccgccccgggctcccattggctggtagggccgccagtcattctattccggcacctcccttaggcgccagggacagccgagcgttacctggtcccgggcagcggagttctttacccaccccagttctggttctgacgccctagctcattccgcaaatttagggcttgggtctggcttgttcccctccggctcgaaccacctcttctctgagccgagccagctaccggggctcctggaattgccacccct

SEQ ID NO: 5812 - DNA, 2300 bp, Homo sapien
acttacgctttccatcgctctctgaagctctcagaaccgccttcctctctgcctccgctgtcgccgccgggccctcccagccatcacgcgggacgtcacgcgtgacgccgaccagcagggaggggcaggagcttcccggccgcgcccacccggtgggcacggggattggcagaacctgagggcggtgggtgtcattcgaggcgatgcccccagcctgggccacctggaccaggccctaagctgcttcccagagccaatcccacctcggggatcagttctggccccctccccagccaaagggaggaggggctggagccgcgggcgctgctcccttggtttacagtcccctggcgggcctcagcagacccccagccctgcagcaagcggtctaggtgcccagagagaaagccccgggcgcaggtgggcggtgtggaggggcggtcctctgctggcgcgccgggagggactcgggttaccgcctggcttgtttacttgatggctgccttggcaatggcctttggcttgcttgtccccctgggctcctaccccagtatccacaagctcctcttgtagcagcgcggcattcgcatcacttcacagccccgttcctgtcgtgcctgtgcctcttctatgtccccagccctctccctgctccccctctgtaacccctagctccactgtgtccctggtctccttacgctcccaacccctagccctgcaccccagaccgtagccccacccctgagatgtggaggggcagacgaccccaggaacctcgcggtctgcatccgagcaagtgcatcagaaggattcttaggattcttccggtcctgggaccagctgccccaccctgcgaccattccagaactgggtagccagagacgccttctgacagaggaggaggatgcaagtgaagaaggcaccccctccgccacgcacatactcacaactcacccagccaccacacagagcacgcctgcagcaaactcaggctcacgtcccgctctgccccgtgacgtccctccacggaggcctcaagggtgcccagggaggggtggcaattccaggagccccggtagctggctcggctcagagaagaggtggttcgagccggaggggaacaagccagacccaagccctaaatttgcggaatgagctagggcgtcagaaccagaactggggtgggtaaagaactccgctgcccgggaccaggtaacgctcggctgtccctggcgcctaagggaggtgccggaatagaatgactggcggccctaccagccaatgggagcccggggcggtgcaggccagcccaattcccgcagcctccgcgcagcgtgggtggggtttgccggctgcggcagtagctctcgcctgcgggtggtttgacaaggctggcggcgccacaccagcgaccaggtgaggccgaccaggcacaaaggggtggggggcctggagggccgagttgatgttggggtgcttcattctaggtcccagagcttctctgagggaactggccctgggttttgcgcgggatgtcgtgggacccctctccagcagatcctccccaaagcttgggagaggttcatgcagcctctttagacccggagccgcagcctggagcccgcgggtgtctgggggtcttcctgggcctcagctgtctaaggtcctgaagccctatcctcgaggcccagcccgccccacgcagcccccgccccaccccgggccacctccatgcccgcatatgcatgagagaggtgatgccatgagctgtcctgacctctcttttgtctcacacctctctaagccccagggcccgcagtaatcccaactccactctcaacctctactgaggactggggacgggagtagatgactcagccccgagcaggaatgaggggtgaaaggttcccacctgccttgtataaagtcagcgagagtccaagatggtgcctggacggggcagttctctggcctagggtgagacaggaggggggcctaaggcatgggagggcaggatgcttaaaccagggggaggggtggaagttttagggggcagcaggggaaacatttacacccctccctcatccctgctctccctgcccaggcctggagctcacacttctgagaggcatcgcaagcgagggccttcacgttactgagaccccagccccgcacagaggctcatggagctcgaagcacgcagggctggcctctccagagctagcagattccttctggacctgtagggtgccgccctagcccagccgccatggcgcagggtttcgcagtgggcttcgacc

SEQ ID NO: 5813 - DNA, 2300 bp, Homo sapien
tgagcctctgtgcggggctggggtctcagtaacgtgaaggccctcgcttgcgatgcctctcagaagtgtgagctccaggcctgggcagggagagcagggatgagggaggggtgtaaatgtttcccctgctgccccctaaaacttccacccctccccctggtttaagcatcctgccctcccatgccttaggcccccctcctgtctcaccctaggccagagaactgccccgtccaggcaccatcttggactctcgctgactttatacaaggcaggtgggaacctttcacccctcattcctgctcggggctgagtcatctactcccgtccccagtcctcagtagaggttgagagtggagttgggattactgcgggccctggggcttagagaggtgtgagacaaaagagaggtcaggacagctcatggcatcacctctctcatgcatatgcgggcatggaggtggcccggggtggggcgggggctgcgtggggcgggctgggcctcgaggatagggcttcaggaccttagacagctgaggcccaggaagacccccagacacccgcgggctccaggctgcggctccgggtctaaagaggctgcatgaacctctcccaagctttggggaggatctgctggagaggggtcccacgacatcccgcgcaaaacccagggccagttccctcagagaagctctgggacctagaatgaagcaccccaacatcaactcggccctccaggccccccacccctttgtgcctggtcggcctcacctggtcgctggtgtggcgccgccagccttgtcaaaccacccgcaggcgagagctactgccgcagccggcaaaccccacccacgctgcgcggaggctgcgggaattgggctggcctgcaccgccccgggctcccattggctggtagggccgccagtcattctattccggcacctcccttaggcgccagggacagccgagcgttacctggtcccgggcagcggagttctttacccaccccagttctggttctgacgccctagctcattccgcaaatttagggcttgggtctggcttgttcccctccggctcgaaccacctcttctctgagccgagccagctaccggggctcctggaattgccacccctccctgggcacccttgaggcctccgtggagggacgtcacggggcagagcgggacgtgagcctgagtttgctgcaggcgtgctctgtgtggtggctgggtgagttgtgagtatgtgcgtggcggagggggtgccttcttcacttgcatcctcctcctctgtcagaaggcgtctctggctacccagttctggaatggtcgcagggtggggcagctggtcccaggaccggaagaatcctaagaatccttctgatgcacttgctcggatgcagaccgcgaggttcctggggtcgtctgcccctccacatctcaggggtggggctacggtctggggtgcagggctaggggttgggagcgtaaggagaccagggacacagtggagctaggggttacagagggggagcagggagagggctggggacatagaagaggcacaggcacgacaggaacggggctgtgaagtgatgcgaatgccgcgctgctacaagaggagcttgtggatactggggtaggagcccagggggacaagcaagccaaaggccattgccaaggcagccatcaagtaaacaagccaggcggtaacccgagtccctcccggcgcgccagcagaggaccgcccctccacaccgcccacctgcgcccggggctttctctctgggcacctagaccgcttgctgcagggctgggggtctgctgaggcccgccaggggactgtaaaccaagggagcagcgcccgcggctccagcccctcctccctttggctggggagggggccagaactgatccccgaggtgggattggctctgggaagcagcttagggcctggtccaggtggcccaggctgggggcatcgcctcgaatgacacccaccgccctcaggttctgccaatccccgtgcccaccgggtgggcgcggccgggaagctcctgcccctccctgctggtcggcgtcacgcgtgacgtcccgcgtgatggctgggagggcccggcggcgacagcggaggcagagaggaaggcggttctgagagcttcagagagcgatggaaagcgtaagtgctcgctctccccggcgggcggggttctggaatgggggtcagagaaggaggcctgccttgaaactgtctgtcctggtgcagtcaatgtcctcggctctgtggaggtccaagtccac

SEQ ID NO: 5814 - DNA, 2300 bp, Homo sapien
gctgttttggaaaatggcacaagacatcccacactccagtccctgattggaggagagcaaggccttactggccacccagggcttatctgttccagatctcaatcaggggactctgatgtcagccatgtgtgtgcatgtgggcacgcacaagtcctctctacagacccatttttctccaactcacactgaatgaccccaggctctccctggtccctggccaggcagggctggcacagacactcatccacctctctctgggccacttgcctccggataagagcaggattcagtggctgctccctccacccagcacagagaggaaagcctggtgcagccatctggctgagttgggcagaatcctacagaatgactaatcctctccagccacacttcctcccgcagaggcagagacgccctcccctcacactcacatacccacacacaaagacactatcatgcacaccctgcccagacatacagacagagtggaggtgtcctgtatacaccggccttcaaacacctttacaggcgcacactgtgcccatctgcagacacttgaatgtgtgactacacacagccccaccctgacattcctccccccaacctcccttgtgccctgtggacttggacctccacagagccgaggacattgactgcaccaggacagacagtttcaaggcaggcctccttctctgacccccattccagaaccccgcccgccggggagagcgagcacttacgctttccatcgctctctgaagctctcagaaccgccttcctctctgcctccgctgtcgccgccgggccctcccagccatcacgcgggacgtcacgcgtgacgccgaccagcagggaggggcaggagcttcccggccgcgcccacccggtgggcacggggattggcagaacctgagggcggtgggtgtcattcgaggcgatgcccccagcctgggccacctggaccaggccctaagctgcttcccagagccaatcccacctcggggatcagttctggccccctccccagccaaagggaggaggggctggagccgcgggcgctgctcccttggtttacagtcccctggcgggcctcagcagacccccagccctgcagcaagcggtctaggtgcccagagagaaagccccgggcgcaggtgggcggtgtggaggggcggtcctctgctggcgcgccgggagggactcgggttaccgcctggcttgtttacttgatggctgccttggcaatggcctttggcttgcttgtccccctgggctcctaccccagtatccacaagctcctcttgtagcagcgcggcattcgcatcacttcacagccccgttcctgtcgtgcctgtgcctcttctatgtccccagccctctccctgctccccctctgtaacccctagctccactgtgtccctggtctccttacgctcccaacccctagccctgcaccccagaccgtagccccacccctgagatgtggaggggcagacgaccccaggaacctcgcggtctgcatccgagcaagtgcatcagaaggattcttaggattcttccggtcctgggaccagctgccccaccctgcgaccattccagaactgggtagccagagacgccttctgacagaggaggaggatgcaagtgaagaaggcaccccctccgccacgcacatactcacaactcacccagccaccacacagagcacgcctgcagcaaactcaggctcacgtcccgctctgccccgtgacgtccctccacggaggcctcaagggtgcccagggaggggtggcaattccaggagccccggtagctggctcggctcagagaagaggtggttcgagccggaggggaacaagccagacccaagccctaaatttgcggaatgagctagggcgtcagaaccagaactggggtgggtaaagaactccgctgcccgggaccaggtaacgctcggctgtccctggcgcctaagggaggtgccggaatagaatgactggcggccctaccagccaatgggagcccggggcggtgcaggccagcccaattcccgcagcctccgcgcagcgtgggtggggtttgccggctgcggcagtagctctcgcctgcgggtggtttgacaaggctggcggcgccacaccagcgaccaggtgaggccgaccaggcacaaaggggtggggggcctggagggccgagttgatgttggggtgcttcattctaggtcccagagcttctctgagggaactggccctgggttttgcgcgggatgtcgtgggacccctctccagcagatcctcccc

SEQ ID NO: 5815 - DNA, 2300 bp, Homo sapien
gtggctataagggaaatagaaataggagcctccacttctgggaaactttggccctctcccaaagataaggagcttccttatgctgagactgggggctgaagttcctggttctctgtccagagttaccctgagctgggcaggtggggcctgtgagggcagatctgccccctggcatagcctgtctgctccttgccaacttctgcagggccggcgtggtgaccccagggatcaccgaggaccagctgtggagggccaagtatgtgtatgactccgccttccatccggacacaggggagaaggtggtcctgattggccgcatgtcagcccaggtgcccatgaacatgaccatcactggctgcatgctcacattctacaggcaggtcttgtcccacgtccccttcttcagtgccctaagctagagcatagcttgactaggtgcgcttcttgtctgggccaactgggtgagtgaaagattgtgtcagaatcgcttccattcctcagaattcagcctcaggaggtctctcaccccagagacagtaggtgtgtttgtataaatgggggtgggggtacataggggttaccagaacaggttctagggccattaactgggtcccttcttaggcttggggaataacctttggtttcattacaggggtctaaagatgagggccactgtagacggggcagaagtgagtgtctttgttccctcaggaagaccccaaccgtggtgttctggcagtgggtgaatcagtccttcaatgccattgttaactactccaaccgcagtggtgacactcccatcactgtgaggtgagagccagcccccagcagcagctgcactgtcccatctgaccctctcctcccagcctgcagtgccctctcctttctctccggttccctgtggaccatgcagccagtgctcagcgccctctcctcagcctgccccaccccgaattaccctgcctaactgaaggcatgaggtcctcttatgtatgctgtgggggacccacccctcttcacagggtgctactggggcttctagacaagtttacgccggagatggagggaaggcttcttctgcaaggagcttccccttttatgcctcatgtattgaggacttggcatatccctaaaggaaagggccacctgctggacttgtcacctctccccgtgacctggcttttccacccacaggcagctggggacagcctatgtgagtgccaccactggagctgtggccacggccctgggactcaaatccctcaccaaggtaaaggcccctcactcccctgaccaccccattcatcctctatctgcctccttcttcctcatcacacctccagttctgacctatatgccccctatatctccccagagtccctcaccaccccatggcccttagggccactgaacaacacccttcctccccagcacctgccccccttggtcggcagatttgtgccctttgcagcagtggcagctgccaactgcatcaacatccccctgatgaggcagaggtgagtgaccccggctcctggcatgtgcatgcccagaatgtagcacactgtccatccacgcagaccacctcagaatggggacatccctctccctccccagacatgagctgctgggccctggctcagtctgaccctgggatcctcaggtgggagaaccagcctttgagcctggggtgtgtgaggggaccctgaggagccgctgctcattcgggcattgcaggtgggatccggggcctgtgatctgaccccaacccccctcccttgcagagagctgcaggtgggcatcccggtggctgatgaggcaggtcagaggcttggctactcggtgactgcagccaagcagggaatcttccaggtggtgatttcaagaatctgcatggcgattcctgccatgggtaaggcgggagtggctgggtggggcataggagactctgagagaagcaggtgcagttctcagggactttggaggactctggggagagagggaggagctttgaggggggtcacccttcacagttcctgactttaactccactactaatgttctccttcttggccctgctctccccacagccatcccaccactgatcatggacactctggagaagaaagacttcctgaaggtaggcgactgtacctctcttgtcctggaatgggcgatggctgggagaagtgaccaggccccaactctctctccagcctcgcctgattctctaagacttgccagcccttctcctgacccctgcaccgcctcctccaccttcgttcattcagcaagaatga

SEQ ID NO: 5816 - DNA, 2300 bp, Homo sapien
gtgggggtacataggggttaccagaacaggttctagggccattaactgggtcccttcttaggcttggggaataacctttggtttcattacaggggtctaaagatgagggccactgtagacggggcagaagtgagtgtctttgttccctcaggaagaccccaaccgtggtgttctggcagtgggtgaatcagtccttcaatgccattgttaactactccaaccgcagtggtgacactcccatcactgtgaggtgagagccagcccccagcagcagctgcactgtcccatctgaccctctcctcccagcctgcagtgccctctcctttctctccggttccctgtggaccatgcagccagtgctcagcgccctctcctcagcctgccccaccccgaattaccctgcctaactgaaggcatgaggtcctcttatgtatgctgtgggggacccacccctcttcacagggtgctactggggcttctagacaagtttacgccggagatggagggaaggcttcttctgcaaggagcttccccttttatgcctcatgtattgaggacttggcatatccctaaaggaaagggccacctgctggacttgtcacctctccccgtgacctggcttttccacccacaggcagctggggacagcctatgtgagtgccaccactggagctgtggccacggccctgggactcaaatccctcaccaaggtaaaggcccctcactcccctgaccaccccattcatcctctatctgcctccttcttcctcatcacacctccagttctgacctatatgccccctatatctccccagagtccctcaccaccccatggcccttagggccactgaacaacacccttcctccccagcacctgccccccttggtcggcagatttgtgccctttgcagcagtggcagctgccaactgcatcaacatccccctgatgaggcagaggtgagtgaccccggctcctggcatgtgcatgcccagaatgtagcacactgtccatccacgcagaccacctcagaatggggacatccctctccctccccagacatgagctgctgggccctggctcagtctgaccctgggatcctcaggtgggagaaccagcctttgagcctggggtgtgtgaggggaccctgaggagccgctgctcattcgggcattgcaggtgggatccggggcctgtgatctgaccccaacccccctcccttgcagagagctgcaggtgggcatcccggtggctgatgaggcaggtcagaggcttggctactcggtgactgcagccaagcagggaatcttccaggtggtgatttcaagaatctgcatggcgattcctgccatgggtaaggcgggagtggctgggtggggcataggagactctgagagaagcaggtgcagttctcagggactttggaggactctggggagagagggaggagctttgaggggggtcacccttcacagttcctgactttaactccactactaatgttctccttcttggccctgctctccccacagccatcccaccactgatcatggacactctggagaagaaagacttcctgaaggtaggcgactgtacctctcttgtcctggaatgggcgatggctgggagaagtgaccaggccccaactctctctccagcctcgcctgattctctaagacttgccagcccttctcctgacccctgcaccgcctcctccaccttcgttcattcagcaagaatgaactgggctggggtgaaggaactctgcaggggcaggaggagaggacaaaggaaggaaaccaacttcatcagtgttactccagtggcttctgacacacagaaggggactgtcatagtcatgcttgatctcatgctcattcttttaccccctagtgcctccatactgagaggtacacacgggtgaacacgcacacacagacatgaacaggacacgaaagcaaagcacaggaacaagctctggctcattcacagaatcatttattcacaaatgtattgagtgccatgcaccaggcatgttttagggctgaggagatggcactgaacacaatggttatggcccctgtcctcatgaagtttatagtctgatgcagaaaccaataaacaaggaggcacccaataaatacattcttagaaagtgtaatatgtgctttgtaggaaagcaatgggggtagtgtaattgagattcatgggggagagctgtttagataggatgatcagagaaggggtctttaatgccgcaaaggatgaggagagagccaaataacgcagagaagagtgtttg

SEQ ID NO: 5817 - DNA, 2300 bp, Homo sapien
cacccaggctggagtgcagtggcgtgatctgggctcactgcaacctctgcctcccagattcaagcgattctcctgcctcagcctcctgagtagctgggattacaggcgtgcaccaccacgctgggctaatttttgtatttttagtagagacagggtttcaccatattgaccaggctggtctcaagctcctgacctcaggtgatccacccgcctccgcctcccaaagtgctgggattaagaggtatgagccaccacgcctggccctaaacttctatttttaaagagacatggtctctcgaacccttgagctcaagggatcctactgcctcagtctcccaagtagctggtgctacaggcgtgcaccaccacactccagctcatcattctgtcattatacttcagttatttcatgtgtcagtgactgaaagtgaacgtatgataatcttgtgaacacagggcttcacagtggaaagaaaactacattctatacctcattccttcttcaatacaagcatctgcaggaaaaggggaaaaaagaggcgggaccatctattattcaacaaatttcaacttcaccctgcccatctggatctagtctccctcattaaatgcaaaggatgctgccacctggctcctctccctagcagtattcacatcatctaggctagaaaatcccttccctttggcctgttttgcacaaaaccgagtaaacattttcaaagtatatatacgcaaaatcatttgctatctctttactatgtatgatgcgcataggtgttactgaatattttggagccttgatggataaagtatgggatgttgaggatcggggaatgtatctaaactttcaagttgtgtcctattcaaaaaactcccttctaaaagcatttttacggtatgtagggttttaatgtaacaaaatctctacttaataacagcggatccccttttattatctttgtgcctacctggatgcacggttccagcatgttctcgtcacgaaccacaagcccaccagagggcgctggttccccgtctacctactgttctccatcagcgactcagaaaatccaggttaaacactcaggcagtctttcacatttaatccacaaatatttaccgagaatttgacgtgccaccaggcgcggggctaggttcacaagatacagtagtgagttaggcacgattcctactaccagaagcttagagcatagggaagactaaaagtaagccaccgtctacaatagtaggataagtggagagtttctaggtccgtggagtttgttgttgaatatctgctccaggccttagaagccggcagcaattcactaaaagatcccggacttgtctgctctgtatcccagccaaggagctccgtccccaaggtgttttgttagagtcagagacctctccttgggtgattccattcgtcagccccacaagtccccgtctctggcctttttcagggtctccggcagctctctgacagttccccttctgtctcaggtcgacacttattccaaggaccagggattactcacaactatccgccagagtttgctccgccctttctttttcctgtttaaaatccgcgggctcttagtgttctcggttcctagatttcctgttctgattctcgcgacagttgcgaggcctcgcgtgaagttcccttctagtccctatttcgaatttgagaccgggagagagtgtctgcccttgcccacctcctcagaacccctctggccagggatggcgcctacgtggctcgggagcccctgaatgaatgggcttggcccaacttaggggcgcattccgacgggagagtcctggctgtattccgaggctccagtgcgcatgcggagtcgatcccgcgcaggcgggcggggacggcagccgggtcttgtgggcggagcctgactaagtgccgcccccttgccggctgcagattgctatttctgccccccaccctcgcccatccccccgcgagctggactgcgccaaggcttctgtgagccgcttggggccggccggggcggggcctgcccgacccgggtttggctggcgggcccctaggaatgctctcctccccgcccccggcccaaagtgccacggtggcggtggtggcggccgcgaggccgagtgtctccggccctgccagcctcgcaaccgtaacctgtaatcccgacccgagggacgcccgccggggaggcgccagcccgcctctccctgcggccgctggtcggctccgacctcgaatcacccggctcacccgcgggtcgcagcacctgccggatgtgggg

SEQ ID NO: 5818 - DNA, 2300 bp, Homo sapien
cctcattaaatgcaaaggatgctgccacctggctcctctccctagcagtattcacatcatctaggctagaaaatcccttccctttggcctgttttgcacaaaaccgagtaaacattttcaaagtatatatacgcaaaatcatttgctatctctttactatgtatgatgcgcataggtgttactgaatattttggagccttgatggataaagtatgggatgttgaggatcggggaatgtatctaaactttcaagttgtgtcctattcaaaaaactcccttctaaaagcatttttacggtatgtagggttttaatgtaacaaaatctctacttaataacagcggatccccttttattatctttgtgcctacctggatgcacggttccagcatgttctcgtcacgaaccacaagcccaccagagggcgctggttccccgtctacctactgttctccatcagcgactcagaaaatccaggttaaacactcaggcagtctttcacatttaatccacaaatatttaccgagaatttgacgtgccaccaggcgcggggctaggttcacaagatacagtagtgagttaggcacgattcctactaccagaagcttagagcatagggaagactaaaagtaagccaccgtctacaatagtaggataagtggagagtttctaggtccgtggagtttgttgttgaatatctgctccaggccttagaagccggcagcaattcactaaaagatcccggacttgtctgctctgtatcccagccaaggagctccgtccccaaggtgttttgttagagtcagagacctctccttgggtgattccattcgtcagccccacaagtccccgtctctggcctttttcagggtctccggcagctctctgacagttccccttctgtctcaggtcgacacttattccaaggaccagggattactcacaactatccgccagagtttgctccgccctttctttttcctgtttaaaatccgcgggctcttagtgttctcggttcctagatttcctgttctgattctcgcgacagttgcgaggcctcgcgtgaagttcccttctagtccctatttcgaatttgagaccgggagagagtgtctgcccttgcccacctcctcagaacccctctggccagggatggcgcctacgtggctcgggagcccctgaatgaatgggcttggcccaacttaggggcgcattccgacgggagagtcctggctgtattccgaggctccagtgcgcatgcggagtcgatcccgcgcaggcgggcggggacggcagccgggtcttgtgggcggagcctgactaagtgccgcccccttgccggctgcagattgctatttctgccccccaccctcgcccatccccccgcgagctggactgcgccaaggcttctgtgagccgcttggggccggccggggcggggcctgcccgacccgggtttggctggcgggcccctaggaatgctctcctccccgcccccggcccaaagtgccacggtggcggtggtggcggccgcgaggccgagtgtctccggccctgccagcctcgcaaccgtaacctgtaatcccgacccgagggacgcccgccggggaggcgccagcccgcctctccctgcggccgctggtcggctccgacctcgaatcacccggctcacccgcgggtcgcagcacctgccggatgtggggaggaagaaggaggccagatgagggaaggcggatgtaggcgcccagtctgtccgcgccttggtggggcagctgggtgggcaagcctgcggtcgctcccgggaaccagccctgggctgcggggagacgaaggtggttggtcctgccctccaggagcgccccgacatcgacgtaaaatgacttggcaccagagctcctgccgcctcccccttatgcagctgccctcgccgacgccagggactgtaaaatcagatgggacagggcctagccgttcagccaacactttgagcttcccagccaaactcctacccccactccccgcctccggtcctcacccccttcctctctcccagcctcggtgtctggttacggctcctctgctcgcattgtgactttgggccaggctgggggaaatgacccgggagggtcccatgcggctacataaaattggcagccttagaactagtgggaaggcgggtgcgcgaagtcgaggggcggagagagggggccggaggagctgctttctgaatccaagttcgtgggctctctcagaagtcctcaggacggagcagaggtggccggcgggcccggctgactgcgcc

SEQ ID NO: 5819 - DNA, 2300 bp, Homo sapien
ttgccagactggatgcctttgctgggccatgctattctcagacctcccgccttcacccccagggccccagatcgtgtcacatccatatgacacttggaatgtgacagggcaggatgtgatctttggctgtgaagtgtttgcctaccccatggcctccatcgagtggaggaaggatggcttggacatccagctgccaggggatgacccccacatctctgtgcaggtagactggtgggagaggcttccctcaggcagcccagggccctccagaaggaccctgctgattccttgcctggctccagtttaggggtggaccccagaggtttgaggtgactggctggctgcagatccaggctgtgcgtcccagtgatgagggcacttaccgctgccttggccgcaatgccctgggtcaagtggaggcccctgctagcttgacagtgctcacacctggtaaggggattcctgagttctgggggttggggggatggtgctggattccagttgtgaatgtgtaagaaacagaccatgtgtctgtatacacaagcatagccttccgcagactgggctatgtgggcaccgacagcccctctctcctgttctctcttctttgcccatgtgtgtttgcagaccagctgaactctacaggcatcccccagctgcgatcactaaacctggttcctgaggaggaggctgagagtgaagagaatgacgattactactaggtccagagctctggcccatgggggtgggtgagcggctatagtgttcatccctgctcttgaaaagacctggaaaggggagcagggtcccttcatcgactgctttcatgctgtcagtagggatgatcatgggaggcctatttgactccaaggtagcagtgtggtaggatagagacaaaagctggaggagggtagggagagaagctgagaccaggaccggtggggtacaaaggggcccatgcaggagatgccctggccagtaggacctccaacaggttgtttcccaggctggggtgggggcctgagcagacacagaggtgcaggcaccaggattctccacttcttccagccctgctgggccacagttctaactgcccttcctcccaggccctggttcttgctatttcctggtccccaacgtttatctagcttgtttgccctttccccaaactcatcttccagaacttttccctctctcctaagccccagttgcacctactaactgcagtcccttttgctgtctgccgtcttttgtacaagagagagaacagcggagcatgacttagttcagtgcagagagataggtgaggccagctcgagatcttataccactctgtattggacaaaggctagcacagggctaggcaccaataaagatttctaatgatgcacagacagtttatgcagatgtgcacatgaaaactgaatatccctgggaggcctcccacactaacagaactctggcttccagaagctgcagggcctgctctctaagcacatgcctgccagatgtacaaagagaaagtttgaacttgggcctatcccgcctttgagggagggaggctggagccatatggctggagggaagttatcttccccgtctgccctccattggggctgatatacattatctgcttctttgctcatcttattccaaacccttccccaggccagaatggggaacagggctatgtgggttggcccccaaaatgaaagcataaactggatagaggagggtggaagtttggtcacctgtgtggtccatacccttccccagctcccataggaatctacccatttcctgcagaagccagagtcatggtaaggctgtttcctatctgccccaattgtgacctgtcctctctggcttggggtccccaaatctctttcctcattctccttacctatcccagggacactggtgagactcaatgtttatttaatgattggaggaaagaatgaaagcataagtcagcgaggccgaggcgctgtgtgtagatggcgacagcctcctacacgccagggctccacccggatcctggcgccactgcgggagggcctgcccttggctcagcgtcagagtttgtcctctggggcccaacgcagggagcctggccacatgggaggggtgtggtccggaactccaaccccaggtcctgcttggccgcccctcccgcggctacgcactactccatctactgctggcttgccccgggtccttaagccagcgacagtttttattgccgaacccaggctggaagcgggcggccctaggagccgcgcacaacagcgcaagcgggc

SEQ ID NO: 5820 - DNA, 2300 bp, Homo sapien
tacgtttactgactcaactggggctcagctatttggctgggagcggttcatcttttcttttctttcccttcctttctttaaataaaaataaagcatgcttcatagtaaaattaaaacaggacaaaagagaataaagtgaaaagtaaaaggctccctccttcctcctgttattcccatttctggaggtatgcccttccaaaaattgtcagtgcacacgtaagtaaacagtaatagagattatacatggcttctcattcttgcgaggaagtctttgtggagaaccccttgttctcctcattttacacattaagaaatctctggccgggcacggtggcttatgcctgtaattccagcactttgggagcctgaggcaggtggatcacgaggtcaggagttcaagaccagcctggccaagatggtgaaaccccatctctactaaaaaatacaaaaatcagccgggcgtggtggcaggcacctgtaatcccagctactcactcaggaggctgaggcagagacttgcttgaactcaggaggcagaggttgcagtgagccgagatcgtgccactgcattccagcctggtcgaagagcaagactccatctcaaaaaaaaaaaaaaaacaaaactcttaagagtggggtactgcgttttatttttatttttttttgagatggagtctcgctccatccacaggctggagtgcagtggtgtgatcttggctcactgcaacctccgcctccagggttcaagccattctcctgcctcagcctcccgagtagctgggattacaggcatgtgccaccacacccggctaatttttgtacttttagtagagatggggtttcgccatgttggccaggctggtcttggactcctgacatcaggtgatccgcctgcctcggcccccaaaatactgggattacaggcgtgagccaccgcgccggcccggtactgtattttaacaagctctctaggaaaaaagtggcatagctctccaaggccactcaggtactaaatggaagttaggatttcagcccaagtcttcccgacctggagcccatgtcccccactgcccttgccccagggcccattgcctcctccatcccctgttggcacctgctggctcaacacccctagagccaagactctgctgctctgagcctttcagggtagggcgagggccgcgctggaaaaggacattccctttggaaacttaatctaagggaggacttgctgagctaagccctgctgagggggaggccagggagcaggcctggggacttgactgagacccagatcagccaagggatgggctcccaggatgccccctcaagcccccggcaggcttcactgcggccttgagggctatggagagtggcaggtaacaggcctcagtctccacagtagctccagccagggactcaggatagggagaggaggcggggtctggggctcccagggagaagaggggcctgtagatgagaactgcagccccccaacaacatccgcctctgggagagggactgagcgggggcaagaagagtatcatttccagcttctggggtgaaagggggctctggaagcccctgcccctgctgtgacccctcctgggtaagtttccccaagggccgctcagacccgtcctcagctcttccattcagggcctgggtccctggcagggctgggaccttaggagacaaaattgctaagactcagccataaacccagctgctgaggatgtatgtgtatttgttacgaatgtctccaagtggctggccacagtggtgccacggcattctgacccaggtggcctaggctggtcatgcaggactttgctgggtcttgcgtgcctcaggcctggacccagtcctcacacctcccgtcctagtgtggaatctggagaacaggccagggccaaggccaggatggaacctatcttcccccagaggacactttggaacagggtactcagtgaggtgcccccttcctatctggccaagagggagcttgccaggaatcagggattcctgaggtcagtactcggtggagggagagacagccacggtgagacttgcagaagccagagggagactgagattggactcctctctccacaatttccaggccaggccaacccaggggacaaggcaggcctccctgaaagcccaccctctccctccttggttcatggcagagcctccccagtccctatcaccttaaggatcatgcctgcacaccctaacctagacatgctacctttgaagcgccacagctctgttgtgatcaaggtgggcctgcatgg

SEQ ID NO: 5821 - DNA, 2300 bp, Homo sapien
aagttatgtaaccatcaccactatctcattccagaatgttttcatcactccaaaaggaattctgtatccattagcagtcaatttccattccctgctgcccccagttcctgaaaaccactaatctattctctgcctctgtggatttgcctattttggacatttcataaaagtggaatcatacaatatgtggcctttgtgcttggcttctttcacttagcagaatagtctcctaggttcatccatgttatagcatgaaccagcatttcccttcttttcctttttatggctaaataatattccatgtgtggatataacaaattttgtttatctattcatcagttggtggacatctgagttgtttccccttttgggctatcatgaataatactgccatgaacattcattcaattctctcaattataaaaaattgggacatttctattaacttgcctgggttgttataagtcttaaatgagataagcatgatgtggtacctggcacaaaactgtctttcaataaataatttatttctgctttagttccctcaagataagaggcaggaagagattcattcgggttcagacaacttccaaagtaagttatggaactccttgggaaggggtagagtacctggattgggtaagtgggaagaagagaactggcgagggagcggagccctctcatgtttctgcttagtgtttttttttgtttgtttgttttttgagatggagtcttgcactgttgcccaggctggagtgcagtggcgcgatctcagcttactgcaagctctgcctcctgggttcacgccattctcctgcctcagcttcctgagtagctgggactacaggtgcccaccaccacgcctggctaattttttgtacttttggtagagacggggtttcaccgtgttagccaggatggtctcaatctcctgacctcgtgatctgcccgccttggcctcccaaagtgctgggattacaggtgtgagccaccatgcccagccttctgcttagtgtttacaaacaactaccaatttcacatttggctttgtcttgagtgggcctttgtccacctggctagagctcagacaaggttttccccacagatacaaacttccaaccagcacgtaggtttccaggctaacccacaaaagcaagttgagtctagctcctccatattgatccacaccaatcatagctattctgaaatgtactttcctcacatctgtaaaatagggagaatactcatctcgaaggattggtgtagagtttatattgttctccataatactaacatctgtcttgttgtatttgcttctttgcttattgtctgaccccctctatagaatgtaagcttcatgaggtcaggacctttgttttgttcactgctatgtcccccatgcctagaacagtgcctgacacatagtgagtacagtactcaataaatattattgaataaagagatacattctttgttattcacccaagatgaccatattttgttgtttggggctgtattcttcaggagagaacagaaatgaataagccactctctgcctccaagaagatctcttcaagtggaggtgacagacatgcccaaagcaaatagattgcaataagacttgatgggagagaatgtgagtcttcacatcctagcatctttccagatagagacagggcctacccaaaagtctaatctgaaactgaactgaaatagaacagaaatagatcccaagtgatggaacctgtgcctttcccaaagcttggcttctaaaaggtagcaaacattttctactggagaggggaaagacaggaagaagaaaaagggagtttcctccttttctcttgggctctcagccagacagccactggcaaaacgttggaaaggcctaaatttgtcctggatgcacttccctgatcctagtcccaccaatcccagcccccacggccttaagcccctatggctccctcccaagattccaaacgtaagaaaagaacacacaccacagtccaaaggcttcttgtctggaatagccaaccctggggtaattgttaggtggaatgcaatctggttgaattcattcaaacactgtaggaattgcctctttcgaaccctgtaggattttacttcttgacgcatctgtttatttaaaaccaaaggggtatgttgaggcatgggcaccctggcagcagaccccaaaccaaccctcttgacttgtgcctgcctttcaggatatgttcccttcctgaatttgtctaagaaggctgagttggggggtggttgctgatttttataacata

SEQ ID NO: 5822 - DNA, 2300 bp, Homo sapien
tgctttggaatctcctggcccagtatctagctctcagcagcttctcccaagtagttatgtaaaccccccttccactgttgggcccttgaaccgggggacccccaggaggccccatctctgccagcagcagccagtgcctcctgcctcctctctctaagatcggctggctaacctgggctcaatttgtggctgcttcccagcccggacggaaggatcgtggtctaggatccagggaaccctaaggggagcagaaagtgagaacgggggaagggatccacgccagagggagagttgagtgcccagagtggaaacgggagcagagggagccagggccagcagaggaaggcgggagcgggcagcagagaaggcggcagcggccaccacttagtacccaatgtcccgggagtagtcttcccgccaccgatcaccagcctaccggtgcattgttcgtgcccaagataacagggctgggcccggggtaggacacccagccgggagagaacgaaaatgaaaagctagctgtcctgggcggctaagccccgctgccatcctcccagatgaagcctgctctccggaaaaaaaaaaaaaggccactggttctgctgatttaccggggctcagagcccccactggccccgcagcaccacgggcaccggagctaggggcgcgaagtgcatgtgtgtaggggactggaggtgggggaacctgttcttttcttgtgtctgatcctggggctcgcttcctgggtcctagaacagcagccaggacggaagaaactgttcacgttgcacccctttctctaagattcccaggccaagagtagctgcagaaggtggtcctgaatctatggcctccttctctctgcctgacccggctagtggatccggagaggggaccagggagagctcctccgagcaggggtccttcgggagacagagaggggtccaggctgagagaactcttcaagcatggcgagtctgcgttatagaatcgggcgggcggctcaacttgggggaagcaccaagaagagctgggcgacctggagcgcagaaccggctttggggagccacccggcggggcaggggtagcacggagcccgggccgcggccaggcggggagcgcgcgggccggactcacctgtgaacctgtcctttgtgtatctgcggttactctccatccaggggaaggtgaggccagtgaggttgttgacgcccggcatggcaggcacagagggcacggtgggcaagccggtggccaggggctgggggtgggccacggctccggcgagcggcctgtgtgccggcacccggattacccccgcagcgctgagtgccccggcaccgccgctgctgccgccgccgccgccaggaccggggccgcctgccaaggccatgttcacgttgtaggagccggtcagaggacccatgctgcaggcgccgccgccgcctgccgggcctccggggccgccgggacctccagtaccataggcccccgctcctccagcccccgtcgcggccgcggagcccccgccgccgtaagtgtaggcgcctccgaccaagcagccaaggccgtattctccgtcctggaggcgcgaggcgggtcccatgcagccaccctggtccgggctgttgaggatctggtcgatgccgaagctaatgggctctgcgtgacccgggtggaggtggtgcggacccaggtgctccatgctggccctggccccaccggggggcccgggcggcggcgctcgctgcgctcggctcggggggcagctagcaggggctgggaggcaacagcggctcctggctgcgcggagacttggaagcgaagtgcgcagaaaggctaaagtagaagggggaggggagggagagagggggcgccgtattcttcccctctctggcttctgcttccccgctccggctgctcgctcgctgttgactctgggacatcaatcaccaggcgaaaaagcccggtgcaagagagcttcgcggtttcgactgggtctctccattggctgtgcgcggagaggagcggggtgaatgacagcgcgagggaggggaggggagggggagaggaaggccagaagccgagacagatgcaggagccagagatagagggacggagaccaagactcggagtagttcatgaagagagagaagaggggaacaaggcgaggcttaaaaggaaaagggaaaacaggaagcgaccattcccagagacggacagacagacaaacccaaggagggtgaagtcaactgtcttcccggcctgttgggagccctcccctcactttgaactgggcc

SEQ ID NO: 5823 - DNA, 2300 bp, Homo sapien
caagtgattcttgtgcttcagcctcctgagtagctgggattacaggtgcacaccaccacacccgtatttttagtagagacagggtttcactatgttggccaggctgctcttgaactcctggcctcaagagatccacccacttcagcctcccaaggtgctgggattataggcgtgagccaccatgcccagcccgaaagtgtttttcaaagagggtctttaggtagtaaatcttctgagaacttgaaagcttgagaacatctttctttctagttttgtaccagaattatagtttagctggatataaaaattctagttctaaagttctttttcttgtatcaggcattgctattgaaaaaactaatatcagtatgatacttgttcctaatgaatggcatatggggatttctttttatgtttgttttcttgcttgtatgtcttaattcttgagaagcttttggaatttttgtctctcttaaatttttctttaatgtgttaagtatttttccaaatctatcttgttgatattctgtctgaaatcttacacttttctctaattctgggaaattttaggattcttcggaattctttttttcattattttttaaagcatttccttccaggtttctcatccctcttctcttctggaactcccattttaactatatatcttccatatttaataactttagccttatatctttcatcttcttatctcttcctgataatttctgggagagttcgccatccttatcttctagtttatgaattcattcttagtctgaatctatttcactattcaacttgtatattgccttccttctttcagctattatattttttacacttgttaacttttttatacagtctcatcctatttcaaatttacaatatactttagccaggcatggtggcacctgcctgtagtcccaggtacttgaggctgatgcaagaggatcctttaagcccaggagtttgaggcttcagtgagctatgactgtgccactgcattcctgcctgtatgacagagagaaaccctttctgtataaaaaaaattagataataatttttttaaaatgtgtaacattctccattatttcctagaagaattttattttgattattttattttatttacttatttatttttcagagatgggggcttggtctgtcactcaggctggattgcagtggtgcaatctcagcttactgcagcctcaacttcccaggctcaagtgatcctcccacctcagccccaggtggctaggactacaggggtgtgccaccacacccggctaatttttttaaaatttttttgtagtgacaggttttcaccatgttgcccaggcaggtctcaaactccttagctcaggcaatctgcccgccttggtagcccaaagtgctgggattacaggcgtgagccaccgtgctcagcctataaggattattttaaattcttgttctcactggtccattaattccgcttcctctcatataggttcttcattttcggggtcctcttttaaaaggattacattatttggatgtattatttttctttctgagctcatattactctggatgtgtcattctcttggctggtgataggtatctggggagagagttactatctgggtctaattctgccacaccctcaacctcctctcctatcccttccctcccagtttacttaagcagaagaggatgtgcctttggatgaacctgttgggtctccaggttctgctgctcctgaaataccacttcccaaggctgactcctcccttatgtaggcacaaagtggaggaattagcaggaggaggggatgtcaagtggtgaactacagggtctgggtcctcgtggtggttttgtattgtgtcgccttggttaagttgagactacttttcccagaatacccttccctgcatggttctgggttggagttggcctaaggaaatttgctcaagatttggaagttagaagtaaagcaagtctgaaggttttatgcttctgaaggttgtcatggctacaggcagtgagagagcaatgcaaaggttccagagttccaactgttttggtttgtttgtttgtttgttttgagacagggttttactctgttgcccaggctggggtgcaggggcatgaacatggctcactgcacccttgaccttctgggctcaagcgatcctcttgcctcaggcttctgtttagctggggccacaggcgggcaccaaaatgcctggctaatttttttgtttttattttggtagagacgaggtctcactttgttgcccatgctgttctca

SEQ ID NO: 5824 - DNA, 2300 bp, Homo sapien
gcgccacgatgtccatctgcccgctggggcccagtttcttggcggactctacgtcggccttcatctcctccaggtcccgcttgagcttagcgcgccgattctggaaccaggtgatgacttgcgcgttggtgaggcccagctgctgcgcgatttggtcgcgatcggcgggggacaggtacttctggtatagaaagcgcttttccaattcatagatctggtggttggtgaaggccgtgcgcgactttcgccgcttcttaggggtctgccgctgcccaaagatggtcataccgtcgcggcctgggaggaaaggacagtgtaggctcgcgttgggagagaggaagcccaccctggctctcgcccccgtaactccgtaacccacccaggcctgtccggcctgcagtctaccaatgttcccttctcagatttaattcagcctccaggaccagggcaagtcttggctatggcaaaccatctcctgtctttggtctcccagaagtccctaggaaaaattgttttggtctctgccccctacctaagagttggtttgaaagacccaaagtctctaagggtatgagaaagccagacagagacaccctaattgcggtgtgaatgttggttctccatcccttcccaatcacttcaactctaccctacccataaggtccccggcaaaagactctcgattccccacgccgagtagccgggctaagagcgcccaggacactgggaacgcaagggagcccggcaaagcaagcagactgcggaaagagcttggccacccttctcctgccaccccccagctctggcctacccagaggtccctgggaaataaggattgggtcccgtcccacatatcttcactcccataagcagctgctcaggctggaaggccctggcggccggagagggcagaggcgagcagaggcataggggacgaagcgcgcagggcacagggcgcgaggcgctgggtgcaggggaacccagcagctgcgcctaccttcggctgcctgcagaacgctgacctccagccccttaaacgtcttgctggcgagctcctccagcgcgcacagcggcgaggtctgcgagagcagcgcgcggcccgccaggggcaagccgccctgcgcgtgcttgtccgcggcggccagcaggtgcgccgccccgcacagcgagtaacttctccgcacagacggcttgttgaggatgtcctcgatgctgaacggcgtcagtggcttgttggagttggcaggcggaggcaggtggtccagcgggctgcgccgccgctcctcccccggcgccgccttgccgtcctccttggaagtcatctcggccttgttcggggtcccggccggggcggctcgggccgcggggacccagcccgcgggcagctcgggcgccggacggcgcgggcaggcagcggcgggtggaaaggaggccgcactgggcagggcgcgggccgggcgcggggccgattagcgcggcggctgaggaggggagaacagcgcggggccccgggaagagggcgctgacgcgggcgccgctgctgctggggcttccagcaatccggggccggagccggggcgcgctgcgcggggctccagtttcgccaaccccggtgctatttaaaggtgtcaggtggctcggcagtggctcctggccccgggtcctggcggccgcagttggaagagccgaggcgagggcgccgatcccggactgcgagggaggcggagagacggggcaattgactattgctaacaagttagccttgatcgcggtgtaatcaattatctgcagcggcacttctttctctttctctctcctttctccctttttcctctcttctttgcctctgttctctcctcctgttctcgctctccctccctccctctctcttctctcttctctgctccccccttctctctccttctctccctctccctcgccctctctttcactctctgtctgtccaatgcaggcggctgtaagttgggaagctcattaattagcgggccgggggtaggaggagccggctggaattagcctgcctaatgcgcctgtcagtccgggcgctgcgctgcgttcggcccgagctgtttgtaaattacattagctgctcctttattgcacccgaacctcgggcgactgaaaagccaccgcccccaccccaaactgcgagccgcgctcctggcgcacccgcctcccgccggcctagctgcaatgaccgcaccggcccgaaggtctcggtctctccgacccgggatgtggagcccgaaagagtggtgggaaccccagcccgggaggga

SEQ ID NO: 5825 - DNA, 2300 bp, Homo sapien
gagcccagcttagctcactccctctctggggttagatatgaggggagagggggcaagaaatcctaatcttcccattccaacccttggcctgggccacaaatcctcactttggcctctctgggcccttttctggtccaagcggtgctgcccaatgcccaacctcaccgcccacccaggagtttacaaacaaagccagggccagggctgtgtgtgtgtgggaggggaacagcccttctccctggactccaaccccctctaggtcctcccctcctttctccaagggcagaaatggaaaattagtaaggaggccagtggccccacataaacagaatggggtagcaagacaggaaggcctgagggcacagccctgctggaatgcctcagggaaatgaaagaaatagctgagttcaaacacacctatatacccacaggttcacacacatttacacaaatatacgcatggagaaacacacacaaacacacattcaaaaacacaaacaccttcaagtaacaatgcacacaacatgttctcccgatattcacagatcccgggccctaaggtctttagccccagcctaactggaagcctggcctccctgcgagttcctgagagcaaagccccagccgcggcctggctcccgccgggcccccgccccgcatccggaacagctggagtcggcctggccatgcactcaagccgggcgctgggctaggcggggccggcagcggggccccggccggggcccgggcggagcgcagcagggaggcacggagccggccccgttagccccggcacctggcctggctactcttcagacgcccatcatcaggccgttggtggccccagccagcctggggagcggctgccggaggaaagtgagcaagattgccggaggaggtagggcggccgcttcggaatcaggccggggagaggcgtccagagccgccaacaattccctcctccgcctctccgcgtggagaaggctgagctctccgactagccccctcccccaacccctggggtcctccacccccttcccgcgtcgcccacccaaggctgcgcagccggctctgacctcctgcgggccagcgcaggagggcttcagattccctctccccaggcgcgtcgcccaggcagtggggtgaggggcaagagggtcagaggtagaggcgctgggctcttgatctcagctccgcaaagtccactctgggtggcagcggggcccacccgggctcctggtcctacctggcccgagcggcggccgcgtccctcccgggctggggttcccaccactctttcgggctccacatcccgggtcggagagaccgagaccttcgggccggtgcggtcattgcagctaggccggcgggaggcgggtgcgccaggagcgcggctcgcagtttggggtgggggcggtggcttttcagtcgcccgaggttcgggtgcaataaaggagcagctaatgtaatttacaaacagctcgggccgaacgcagcgcagcgcccggactgacaggcgcattaggcaggctaattccagccggctcctcctacccccggcccgctaattaatgagcttcccaacttacagccgcctgcattggacagacagagagtgaaagagagggcgagggagagggagagaaggagagagaaggggggagcagagaagagagaagagagagggagggagggagagcgagaacaggaggagagaacagaggcaaagaagagaggaaaaagggagaaaggagagagaaagagaaagaagtgccgctgcagataattgattacaccgcgatcaaggctaacttgttagcaatagtcaattgccccgtctctccgcctccctcgcagtccgggatcggcgccctcgcctcggctcttccaactgcggccgccaggacccggggccaggagccactgccgagccacctgacacctttaaatagcaccggggttggcgaaactggagccccgcgcagcgcgccccggctccggccccggattgctggaagccccagcagcagcggcgcccgcgtcagcgccctcttcccggggccccgcgctgttctcccctcctcagccgccgcgctaatcggccccgcgcccggcccgcgccctgcccagtgcggcctcctttccacccgccgctgcctgcccgcgccgtccggcgcccgagctgcccgcgggctgggtccccgcggcccgagccgccccggccgggaccccgaacaaggccgagatgacttccaaggaggacggcaaggcggcgccgggggaggagcggcggcgcagcc

SEQ ID NO: 5826 - DNA, 2300 bp, Homo sapien
agcggcctcctcccaggcctggggagcagggaggcagctgcttcaaaattcaggctgggctccaagcctgctcctggacctgccctgctttttctggccacacccagctcttaggacctcagctggcaggaagacgtggggcaccatctgagggcaggacactcctttggtcccctccctgattctccccttccctacttcttttgtgagctgaattccttcagagcactgtgacaaggtgaccataccacatgcaccagcctcctccaggcactgtaatcctgcttggaaggagcggggagtgcttgccctttggaagtactgggggacatagacagaccactgagtgacagagacaggaagggaggagaagagacaagttcccagagatgctcaagtcctgggtgcccactctctgcagcctctagaacagccttctcttttggttccaagcttttgctcccctcatccaagggttgggatgatttgtgtcccttcctttcctggcacctcctgctctgtctctagtgctcaactcatttcctgggggaaaccttctctgccctgttcagctcctctgcgctccttagcacattcccctggatgtcactgtcatattgccaagaatgtgttgctttgtctgtctgtcctgcctctctctctccatctgttgtgaacttgggaaggaaggacctgaatcacctctccatgcccctatgccagcccagcatacaccaaggggtccaagcatttgttgagtaaataaactaaataaataaacaagggacaaaaatggagccagacagggaacttagcctgtgcctcagagagaggaccaggggtaggtgtattggttttgccagctgcctgcagatgcgtgcggtgctcctactgctcacaccaatatactcagaggggcccagaagcctcattctctaatgctttttggctatggagtgagtttcctgggttgtggacccagctgtggtggtgtggtctgacttagtaatgaacttccttcatttgctttttttgtttgtttttgagatgaggtctcactatgtcacccaggatggagtgcagtagcacaatctgggctcactgcagcctcgacctgctaggctcaagtgatcctcccacctcagcctcccaagtagctgggaccaaaggagcatgccaccaagcccagctaatttttgtattttttgtagggatggagtttcatgatgttgcccaggctggatttttttttaaataggattaaggccgggcgcagtggctgggcctgtaatcccagcactttgggaggtcgaagagggcagatcacttgaggtcagcagtttgagaccagcctggtgaacatggtgaaaccctgtttctactaaaaatacaaaaattagccgggtgttatggtatgctcctgtagtcccagcttctcggaggttgaggcaggagaactgcttgaacctgggagttggaggttgcagtgagccgagatcgcaccactgcactttagcctgggtgacagagcaagacgctgtcaaaaaaaaaaaaaaaaaaaaaaaaagaaagaaagaaagaaaagaaaaggaaaggaaagaaagaaaataggattgacccccccatcattcgttgggcccagaagcagagaggaagaatggacagaagatgggaggtgatgggcaggcaggagtggcaggaaacagacacccacacgccactccagtagcccaggggtctgtgaagaggataaaggaacctaagtgagcatgtgtgtgtgtgttgggggggggggcgcggtgtggggggagagtctggttctgttcctgatggaggtggcatttgagttgaactttgtaaaaccaggagcatgtaaataggtgcaggagcagggaccatcctggaggcaaagggaacagccgagcacaagcccgaagatgccaccctaagagaggttccagagttccctatagctcctccctctgttgtcctggcggtgagctactgggtaagggtgaaacccttagtctcttgtttatcggcagcaggtctgcagcctagagccaggggctgctggactcctgggatggctatttacttatttatggggtggggtgaggggtggggatgggatgagagaggctgctttcctgggcctacaattggagttcccttctccttgccatccccagaaactccaagagctgaccctctgtcttactaactcaaacggcccagaaacatcaaagtctgaccaaaaaccgttaatggtagtcagctccctccctttcacagaggtc

SEQ ID NO: 5827 - DNA, 2300 bp, Homo sapien
gggagagtcgcttgaactggggaggcagaggttgtggtgagccgagatcatgccattggactccagcctgagcaacaagagtgaaactctatctcaaaaaaaaaaaaaaaaaagcaaactataggattatttttgctccataaatgggatcattctatacctagtgctttgtatcatatttttaattttctctaaaaatgttcctgtgtgattaaaagtttgaatttttagtgggcattaaggtgcacaagctcccctctcttccaactgcaattccctctcccccgacaatcccccagctttcaagggctcctagtacctggtctatggagctgtagctgcatactcttccaggggtttgggatctctttgggggcaagaggaggaccagagccaggccacagggactctcaaactcatggtgggggcagaccttttagctctgactggagcctgctgcacccactccccatacccaggcacagagaaattggagagattctttgctttgggttcatcttcccaccctagtcatgcaagaaatattaccctgtctcctttcacctcccattttccttgggaattgggtctccagggtttctgaggctgcccagtagctccaggccactttgagcagcctcagccattccccactacctccccacttccccttggctctggcagccctgggcttgagctgactttcctgggaaccattggtgggaacagttaaatggaaggaaatggtgggtaggggtcagaagacaaaaggggacttagggctaatgtttgatgtttgaggttaaagaaaaactctcacccctccccttctggggagctgctgggagccttagaatggcccctgcaatgacacagggtgggatggggagggagaattggtaagacctggaaagaaagggggcacagctttggtgccttgacttggttaagcagagacaaggggcccttcccttcaaaagctcctcccctcccaagcccccttcccagcccccaggcccctgtccttactgtgcatgtccaccagcccaaagcctttcctggagtcatctccacattgtggatcctttgcacatctggcagctgagagaaatgtgcaaatccctttcttattccatgaggaatctctaagctcagactccagaggcaggccagtgacagtcgcccatccttgtcgtccagtttaacctgacccagagaaataatggggctttgagagttgttcccagagctccttccttcacccaattcagtaataattttatccatagctcatcttgtgcagtactttattttattattattagtttttgagacagggtctcactctgtcatccaggctggagtgcagtggcatgatctcagctcattgccaacctccacctcctgggttcaagtgattctcctgcctcagcctcccaagtagctgggattataggcgcccgccaccatgcccagctaatttttgtattttcagtagagaaggggttttgccatattggccaggctgatctcgaactcctgacctcaggtgatctgccagcctcagcctcccaaagtgctgggattacaagcgtgagtcaccgtgcccagccttgtgcagtattttaaaccgcgtgttcacatgtatcttctgacttgatctgctaaccttgctctcaggtaagtagaactggtcttattttccttattttatagctgagaaactgaggtctgaagtctgaagtcagactgttggtaatgtcaaaacgtggatcccctgatcctcagaccccaaccccagccctcctgcctctatactcagctctcctggacactgagaggtcaagttacctctgtctgtggtttccatacctgcagatttcagagtgagacagcctctggctcttccaaatctaaatgctgctgaaatctccacccagaaaaacctttctgtctccagacatctctgtcttaatccgttccccttggtggatcgtggctgggaggagggaggaggagctctcgttgtgaagcctctcctaattgatttctctctgatgaggtgacataatcctttctggctgcccttacagcttctccagtttcttgaaacagctccatattctttcttctggcctcccacatattccttgggctagaaatctctttcttgattttaatcttggcagccaccctccatgacagccttaggtctgcacattcatcgagagagccttgcttccttcccagcaccctgcacacgggtgtacatgggtacacatacatgcacacacacatgc

SEQ ID NO: 5828 - DNA, 2300 bp, Homo sapien
ttctgcagtctcatctagggccactcttcctctaaagtcccactgatcttgttttggttctcagaatcaatcaccaaaaatgcagttacctttgcctggaatactcttttccagtggctgcaccatcatcccaccttatcttttcatttatttatttatttattttttttgtaactccatcctgttactgccttagtcctctgaaaacctccagctagttttcatacgaatgcgtttgaagtcttctccattttgcacttgtgtagaatttttttaaaaattcaagaacaaaactttttattaactgaaagcctattatgtattaagtatcatgctgagttttgtggatataggggctaggacaaagtatcaacagagtaaaagtgtaagctccacgaggaaataactgggtctgtcttgttcattaatgaatccccattcctttttctttttgtttaattaattacttttatttttatttcaatagtttttggggtacaagtggtttttggttatatagatgaattatagtggtgaagtctgatattttagccacccaagtagtgatgaatccctatttcttgagatgatgtctgcacacggttatatgcttaccatttgttggatgactgagtgaataagatagtttaaaatggagattttttcctataagtcaaaaagtattttcctagttcatttattttataaattcagatattttgtacaaggctgtcacaatctaactcacttttttttttttttttttttagacagagtctcgttctgttgcccagcctggagtgcagtagcgtgatctcggctcactgcaacttccgcctcccgggttcaagcaattctcatgcctcagcctgccgagtagcttgaattacaggcgcgtgccaccaggcccgactaatttttgtatttttagtagagacgggggtttctccatgttggccaggctcgtctcgaactcctgacctcaggtgatccacccgccttagcctcccacagtgctgggattacaagcgtcagtcaccgcgcctggccctaaatcacttttgttgttgttgttgttgttatactgttctttttcattgctaagtaatattccactgtgctacatatggaatatgctacaatttgttcatacaaccacctgctgaggggcatttgggtgtgtgtcagttttttaggctgtataaccaattatcacaaacatagcagcttaaaacaacctaaatcacttttaaccaaaccctagagttttctcctcctaaggtagacccaatttccaaaataaacccatattgtaccttttcaggccaaagaaaatatttatatgctttatttgctggaggccattatattccaccgttgaaggacttttgttaagtacctgtttgacccttagtgcagggcttacatcccacagttagcaatagcaagttatgtgctttttgagctctaaacactgagaatttcttgaaccgagttctattcggccctgacttgctgtgggggagaaaagattcctcgggagaagtgtgggtggcgatggcttaggaggaccttgaaattccgcatttgtctgtgagctgctgccaggtgcccattggcccagctactctgggtcgcaaacctgcagatgccagatacatgaaatttggggacgttcagcttcctaaaaccacagttaggcaggtcctaggacccgtgattcttgccacagtttttcttagtatttgggctacaagtgaggcattggccgccatcttgatatcaaatgccaggcaagccgctactggcgtcgctcggtaaccacggagacacccgtgcccctcccgtttctcatccttagaggctgtaaactacaattcccatcagccgatttcctctgcgtaatggcaacttatctaaatctggcttgtgggcaaccgcaacgctgccgcagtgaactgtgggagttgcggttcacggcgtagcctcagtttttttcctgggggaagttccagaactacaaatcccgtgagccagtgggctttcgcctgcgcacggagaagccgattctccttggcccctcagcctgcgcctgagaggtaagagagggcggggggaaggaagaggaggcgggatccgggcgctgcgttggctgcggcctggcaccaaaggggcggccccggcggagagcggacccagtggcctcggcgattatggacccggccgaggcggtgctgcaagagaaggcactcaagtttatggtgaggagacggtggaggccggggaacggtggaggcgct

SEQ ID NO: 5829 - DNA, 2300 bp, Homo sapien
gaagtatgtttctcagtctccccagaccagcaagggccttcctgaggaggccaggccttgacactgcgtgtctagagcagtggttcccaatcctggctctgcccacaatcaccagggcagcttggtaaggatgaagatgacaaggtccatcctcagactgatggaatcatgaacgagcatcttaggatagtggcagggctggatgatggcatgtttcccatgctccctgcctttcccaagtcctgctgagtacagacccaactgcccctaggttggtcctgcctctagccttccctagagtctggggcgatggaagccttgtgtgtgtgctcactcatgcctcttcattggtcctggatccttacagcttcccatctggctgcttttttccagggcttccgaagtctggaagacatccgcagccaggcctccctgacaacccagcaggccatcggcctgaagcattacagtgacttcctggaacgtatgcccagggaggaggctacagagattgagcagacagtaagcaggtgtcccagagcagtgaggacagccaggtcctgctgtaaggtcttgggtcaaagccaagaacccccaactcctcagctggggaggacagcaggcagaggaaactgtggatcaccagaggttgagcacagagcaagttaagactgaagctccaggcccagaggtgggggtggggagctttgggaggaaagagctgtaacaccagccctctagattctggttctcagtagtcaggcctattaggattggattcaattctagactgattggtgttaggattgggttaatgttagggttagattacaggtgaattatatctgtactgaggttagggtgggtcagggcagagggttttaatattttattttatcttttttttttatttcaccaacttctttgagaacctgatgaaaactgtggactgttttctccccaaaatgcacaaatgtgcaaaggtttatgtctttttccagatgtatggaccttctaaagcccacgcaaggctggctcaggatttggggtagagttggtgtaaaagcacagtgtcagtaggatttggtttggggctggaagaaagctccatcaagatggagttaagaccaggcacagtggcttatgcctttaatcccagcacattgggagaacagggtggacagatcatctgagctcaggagctcgagaccagcctggccaacgtggtgaaaccctgtctctataaaacatacaaaaatttccagcctggcaaacatggcgaaaccccgtctctactaaaaatacaaaaaagttaggcgggtgccgtggctcatgcctataatcccagtttcttgggaggctgaggtgggagatttgcttgaacctgggaggcggaggttgcagcgagccaagattgtgccactgcactctagcctgggcaacagagcaagactctgtctgaaaaaaaaaaaaagattgagttaaagttaggctttaattaggcgtaggattttcttaatgttggttgcttttaagttaagatttgtagttgtccaagaaataagatttgggtttggtttagagttgggttagcgattaggttcatgtaaaagctagattagagagacactggactgcatttagggctagatgtatcatttgttcaatgggcattaggattaggagctgcttgtaataggcaagttttgctcactttggtcagggattctgatagagtgggatcccatggagactggcctagtttgattgaaatcagcccccagctccattccaggccacaaggctatgaggccggtatgagatggatggacaggcctctttgtctgcccatcaccaggccttggtgctagtgatgacaccgtcactcagccatggtgtccgggcatggagaatgcctcagtcagtacccagcccattggaacaaaagaggcttcccacctggcctcctgtgcccccatttaagggctccagccataggagttttgatgggattactcacgtggacctcctccttccattctcttgggaggctcaagaagggagtaaggggattagcggagccctcctgtcaggatacttgaggtgtccggggccccagaattttcagtgtcctggggtggaggcaggaggccatctgcatatgaaagaacctcagtgtctcaggggtggaggctaatgggtttatttttcctcagagggacaatccttcagctggcagttgctgtctcagctccctccccaccaagaaaggatgtgggtgttggctcagaactgccccc

SEQ ID NO: 5830 - DNA, 2300 bp, Homo sapien
atttatttagcagagatggtgttttgccgtgttacccaggctggtcttgaactcctgggctcaagcaatctaccctcggctcagccctgcaaagtgctgggattacagccatgagcccttgtgtcccgcctaaaaagttgtttaaaagaagtttggactctgaagcctaacagaccagggtttgaactctggttcctgtcattcactaactgtgtgactccagacaagttacttaaactctcaaagcatcagttttctcattagtaaaaaggggctactattaaatgaaatggtccctgtagcacaggacctgacatagagtaagccctcagtaaatgttagctcttgctgttggaatgatgatgatggtggtggtggtggtggtgactaatatcatcattattttctacttcttactgctggtctccatccttctgggaaccaaaagacaaattacccagccctcattctatccaaaattctcatcttcaactacacccaagctttacacagccacacagttgccaagcagccaggctggcttttatgtcagcatctgctagaggagtcagcttcctttccactggctctacctcttccatctcctcactcttctttcttgcctctgcctcctcctcctctaggaggcctgcagtatccctgggattgggaagcggatggctgagaaaatcatagagatcctggagagcgggcatttgcggaagctggaccatatcagtgagagcgtgcctgtcttggagctcttctccaacatctggggagctgggaccaagactgcccagatgtggtaccaacaggtcacaccctggctcagcccctacttcagttttgctgtgtctcagagttcctgccccagatgtgtgctgtgctctgccccagatccctatgctgtgctctgatgggaatgcacccacagtatagggagaccatttttcaagcggaccaggactcatatagacccctcagctcccagaacagccttgttgcttggtatccttaagaaggagtagacagggacaagaagtatgtttctcagtctccccagaccagcaagggccttcctgaggaggccaggccttgacactgcgtgtctagagcagtggttcccaatcctggctctgcccacaatcaccagggcagcttggtaaggatgaagatgacaaggtccatcctcagactgatggaatcatgaacgagcatcttaggatagtggcagggctggatgatggcatgtttcccatgctccctgcctttcccaagtcctgctgagtacagacccaactgcccctaggttggtcctgcctctagccttccctagagtctggggcgatggaagccttgtgtgtgtgctcactcatgcctcttcattggtcctggatccttacagcttcccatctggctgcttttttccagggcttccgaagtctggaagacatccgcagccaggcctccctgacaacccagcaggccatcggcctgaagcattacagtgacttcctggaacgtatgcccagggaggaggctacagagattgagcagacagtaagcaggtgtcccagagcagtgaggacagccaggtcctgctgtaaggtcttgggtcaaagccaagaacccccaactcctcagctggggaggacagcaggcagaggaaactgtggatcaccagaggttgagcacagagcaagttaagactgaagctccaggcccagaggtgggggtggggagctttgggaggaaagagctgtaacaccagccctctagattctggttctcagtagtcaggcctattaggattggattcaattctagactgattggtgttaggattgggttaatgttagggttagattacaggtgaattatatctgtactgaggttagggtgggtcagggcagagggttttaatattttattttatcttttttttttatttcaccaacttctttgagaacctgatgaaaactgtggactgttttctccccaaaatgcacaaatgtgcaaaggtttatgtctttttccagatgtatggaccttctaaagcccacgcaaggctggctcaggatttggggtagagttggtgtaaaagcacagtgtcagtaggatttggtttggggctggaagaaagctccatcaagatggagttaagaccaggcacagtggcttatgcctttaatcccagcacattgggagaacagggtggacagatcatctgagctcaggagctcgagaccagcctggccaacgtggtgaaaccctgtctctataaaacatacaaaaat

SEQ ID NO: 5831 - DNA, 2300 bp, Homo sapien
aacaaatatttacaggttacttacaatgtgccagacacttctagattgcaccaaggaacaggacgtatgaaaatccttgtcccttacattcaagtgctggcctgtgagaaaatttgctatatgtagaaggaaagctgtctggatggaagggaaatgcttattttcagggtaggggactgtgaacacgtcattcagatcatgttagaagttatgtcgtggccagggggtggcagataaaaattaaaaagttacaacagtagtcatctggatgttccttccacagagtggctgagctcccttcgggcccatgttgtgcgcactggcattggacgagcccgggcagaactctttgagaagcagattgttcagcatggcggccagctatgccctgcccagggcccaggtgtcactcacattgtggtggatgaaggcatggactatgagcgagccctccgccttctcagactaccccagctgcccccgggtgctcagctggtgaagtcagcctggctgagcttgtgccttcaggagaggaggctggtggatgtagctggattcagcatcttcatccccagtaggtgggctgatcccagtctttttttcaaatgttttctagtagcatcttgagctcttttcttgaattattaaaaataactatcattaattaaaaaattagccaggcatggtggggtgtgcctgtagtcccagctataagaggtttaggtgggaggattgattgagccagggaggttaaggctgcagtgagccttgatcgtaccactgtactccagcctgggtgacagagcaagaccctgtctcaagagaaactccaaaaacctcaaaaaactcgttttcttaattggacacactgggaaaccaagtatttcagagtacagaaggactggggacagatacagggtgagacctttggtgtcttaacctcccatcaccatccccacaggtacttggaccatccacagcccagcaaggcagagcaggatgcttctattcctcctggcacccatgaggccctgcttcagacagccctttctcctcctcctcctcccaccaggcctgtgtctcctccccaaaaggcaaaagaggcaccaaacacccaagcccaggtcaggagcctcccatccctcagaactcccttcccctaggaagcagatcacagaaatggggtgggcctggtggctgttcagaaagtcccaggcccctgagagaggagggctctattgtgaagccatttagctcttcccaacactcatcactgctgcatttatctaggccatatctaacacataccactggggatcctagggctaggcactgcgtggagccaaagggaacgtggcctcacacccaaggagatccaagtctgatgcagaaggccccgcctcattcttaggtctgactagaagaccctccccccgcacaaagaagatgacccccacctttaaggatcccttctcttggagaacaagaatttattgttttcttttcttctctatcccaagcccatctctgatgatgaagccagtgatggggaagaaacccaggttagtgcagctgatctggaagccctcatcagtggccactaccccacctcccttgagggagattgtgagcctagcccagcccctgctgtcctggataagtgggtctgtgcacagccctcaagccagaaggcgaccaatcacaacctccatatcacagagaagctggaagttctggccaaagcctacagtgttcagggagacaagtggagggccctgggctatgccaaggccatcaatgccctcaagagcttccataagcctgtcacctcgtaccaggtacccaggggctagagtgggaggaggggtctttactggccagtggttagtaaccccagtggggttcaggtacagtggtgaagattttatggggtctaggacttgcacaaaagaaaaaaaaggaaaattgatgaaagcagattggcaaaatcttgatagttgttgaagctgggagatgtacgatacttgggggttatatggatctctctacttttgaattttttaacataattaaaagttttttatttttaattttgtttatttatttatttattcatttatttagcagagatggtgttttgccgtgttacccaggctggtcttgaactcctgggctcaagcaatctaccctcggctcagccctgcaaagtgctgggattacagccatgagcccttgtgtcccgcctaaaaagttgtttaaaagaagtttggactctgaagcctaacagaccagggtttgaa

SEQ ID NO: 5832 - DNA, 2300 bp, Homo sapien
ccctaggatccccagtggtatgtgttagatatggcctagataaatgcagcagtgatgagtgttgggaagagctaaatggcttcacaatagagccctcctctctcaggggcctgggactttctgaacagccaccaggcccaccccatttctgtgatctgcttcctaggggaagggagttctgagggatgggaggctcctgacctgggcttgggtgtttggtgcctcttttgccttttggggaggagacacaggcctggtgggaggaggaggaggagaaagggctgtctgaagcagggcctcatgggtgccaggaggaatagaagcatcctgctctgccttgctgggctgtggatggtccaagtacctgtggggatggtgatgggaggttaagacaccaaaggtctcaccctgtatctgtccccagtccttctgtactctgaaatacttggtttcccagtgtgtccaattaagaaaacgagttttttgaggtttttggagtttctcttgagacagggtcttgctctgtcacccaggctggagtacagtggtacgatcaaggctcactgcagccttaacctccctggctcaatcaatcctcccacctaaacctcttatagctgggactacaggcacaccccaccatgcctggctaattttttaattaatgatagttatttttaataattcaagaaaagagctcaagatgctactagaaaacatttgaaaaaaagactgggatcagcccacctactggggatgaagatgctgaatccagctacatccaccagcctcctctcctgaaggcacaagctcagccaggctgacttcaccagctgagcacccgggggcagctggggtagtctgagaaggcggagggctcgctcatagtccatgccttcatccaccacaatgtgagtgacacctgggccctgggcagggcatagctggccgccatgctgaacaatctgcttctcaaagagttctgcccgggctcgtccaatgccagtgcgcacaacatgggcccgaagggagctcagccactctgtggaaggaacatccagatgactactgttgtaactttttaatttttatctgccaccccctggccacgacataacttctaacatgatctgaatgacgtgttcacagtcccctaccctgaaaataagcatttcccttccatccagacagctttccttctacatatagcaaattttctcacaggccagcacttgaatgtaagggacaaggattttcatacgtcctgttccttggtgcaatctagaagtgtctggcacattgtaagtaacctgtaaatatttgtttaatgaatgcctcctcccttcttactttgttttttgtttgtttgttttgttttcttttgttttgtttttgtttggagacagtctcactctgtcgcccaggctggagtacagtggcatcgtcttggctcactgcaacctccatctcccgagttcaagcgattctcatgcctcagcctcccgagtagctgggattaccggcgtgtgccaccatgcctggctaattttttgtatttttagtagagacagggtttcgccatgttgcccaagctggtctcgaactcctgagcacaggtgatctgcctgcctcggcctcccaaagtgctgagattacaggcaagagccaccgcgcccagcctctctccatactttgaatcctttatcatttattctttcaacaaagcgcgtttcttgcccttacagtctgacagacccgacaaccctgcctccaaagcctctgccatttatttgccaatttggctgcaaaacaactaacaacaagcctgggtaatggaggggggtttctgtcccagtcctcagggcaaaaattatactggtcattccctgagggcccagggagtcttttctgatggatagaggtcttcgggtagaaaagaaggtaacacagcaaatagcctgtccaagacccaggaccaagcttagcacaaggtagatacaaacagacctgcaggccctggacaggcagagtcagctccaatatctgattctggacataaacaacgtagggctgaagcacatgaaggctgtgggttcaagcacacgagggttctgagactgggtcagctcaccttctgcttcttctccctcttccctcctaggaatctttgcaagtacttttgatgatgcatcagcatgaattttctgccgcttgggaaatgccttcaagatacccctgggatccattgaagtatggctggatcccggcctattggagcgttggtcagggctgctgcacgt

SEQ ID NO: 5833 - DNA, 2300 bp, Homo sapien
gccaccccctggccacgacataacttctaacatgatctgaatgacgtgttcacagtcccctaccctgaaaataagcatttcccttccatccagacagctttccttctacatatagcaaattttctcacaggccagcacttgaatgtaagggacaaggattttcatacgtcctgttccttggtgcaatctagaagtgtctggcacattgtaagtaacctgtaaatatttgtttaatgaatgcctcctcccttcttactttgttttttgtttgtttgttttgttttcttttgttttgtttttgtttggagacagtctcactctgtcgcccaggctggagtacagtggcatcgtcttggctcactgcaacctccatctcccgagttcaagcgattctcatgcctcagcctcccgagtagctgggattaccggcgtgtgccaccatgcctggctaattttttgtatttttagtagagacagggtttcgccatgttgcccaagctggtctcgaactcctgagcacaggtgatctgcctgcctcggcctcccaaagtgctgagattacaggcaagagccaccgcgcccagcctctctccatactttgaatcctttatcatttattctttcaacaaagcgcgtttcttgcccttacagtctgacagacccgacaaccctgcctccaaagcctctgccatttatttgccaatttggctgcaaaacaactaacaacaagcctgggtaatggaggggggtttctgtcccagtcctcagggcaaaaattatactggtcattccctgagggcccagggagtcttttctgatggatagaggtcttcgggtagaaaagaaggtaacacagcaaatagcctgtccaagacccaggaccaagcttagcacaaggtagatacaaacagacctgcaggccctggacaggcagagtcagctccaatatctgattctggacataaacaacgtagggctgaagcacatgaaggctgtgggttcaagcacacgagggttctgagactgggtcagctcaccttctgcttcttctccctcttccctcctaggaatctttgcaagtacttttgatgatgcatcagcatgaattttctgccgcttgggaaatgccttcaagatacccctgggatccattgaagtatggctggatcccggcctattggagcgttggtcagggctgctgcacgtggaaatccagaattgaggccctccaacccctttgcctatggaggtagggtctttcctgaccaggctttgggggtagcagcccagtttggggaagcgggtcgggggagggggtctcttcaaacccggttaaacttcagtggtttagcctagcttcacactccccagcctttcgaagttggagtattacgggaaatgaggggaaggctggtgccatcgggggtacttttgaggagtaggaaacgacaccattcctcagaggggttgcgctaaagattcagcacagccctgctgcggcccacttcgaagggctttaccaaatgggatgctgggctaggaaatggagctttaggggatggagcggagcctggggaggacctgcacataaaccccacatactatttctctacctccaacacagactcgcagaggaaggaggaggactttcgggggtgagtgggaacgccctgcacctgtcctggtctcagcctctcgacatgggggtgctcagcgccgcagctgcggggagatggggcacggccgcagcaggtgtggggagccctccgggaatggaggagtctcgcagctgcgggtgaagtcccgggcaggtgcggtgtactcgccgtgtacgcagctggcgcaggccagggaatcccagctcggggctagaagaaagctggagtgcccgaccccggccccaagagtctctccaacccccagagtcggtccccgggtggggtcgactactggccaagctagtcacccgggggtgggcaggaatagaccacttaccagcagagccaatgagagcggacgaaggggggaaggagggcaaatggccagaatagcttccgagtcagccggaagtgaccctctggaacggttgccatggcagcggctgggcgtgctgcttagcaggggaaagatggcggtgacgggctggttggagagtctgcggacagcccagaagactgcgctgctgcaggacggtaactcgagggtccccacgggctccttcgtttttttccctcagggtccggccctccgggaagggcctcagggcctgggtcggcagagctggaagggtctcggcggtc

SEQ ID NO: 5834 - DNA, 2300 bp, Homo sapien
cttcactctttcctaccattttatacaagactacaacctctatttaacgcttcttattatttaagtacatgtttttcccaaccactctgagtcctgggacaacatatctttttctttctgttctagtttagagcttggcacatagtaaaagtcttcctaaatgttgcacgaacgagtaaatgattttaatttccacaaactccaggcttccctgattggcccctgcctgtgaacatgagtcaccagttgttatcttgaaagcctcaggaacttcagacgcaattcatcctggctacccagtgggtccagaaaggacccaagtgcacaaaggggccggcatcggccaatcctagggtggggaaaagttaggtatccatgcccctgtgcccacttcttccaggcacagcccttggttcttgctctagctcccctaaagacacagaaaatatttagaagttcacttaacaaaaatattacagctggaaaggacctcagagataacaatggtagtccatccacttcattttatagatgaggaaagtgaggcccaaacaagtaaaggagccgactgaagcgcccgtggtgaattaatggcacagtcggaactagagcccaggcctctctcctctctaaagtctaaaacattcttggatttcagtttcctcttctgtaaaacggggtgaaaattagcctctcaggacagtggtgaggagcaaatgagataatgaatgtaaaagaaattactatattagcaacagaaatcagagcggagcgagatggtgtagaggaatctaaggggtgtccggagacatgtgttccagtcatgtcatctctgtgaacctcagtctcctcatctgcaaatgcaggacctggcccggctgaccgccgagacccttccagctctgccgacccaggccctgaggcccttcccggagggccggaccctgagggaaaaaaacgaaggagcccgtggggaccctcgagttaccgtcctgcagcagcgcagtcttctgggctgtccgcagactctccaaccagcccgtcaccgccatctttcccctgctaagcagcacgcccagccgctgccatggcaaccgttccagagggtcacttccggctgactcggaagctattctggccatttgccctccttccccccttcgtccgctctcattggctctgctggtaagtggtctattcctgcccacccccgggtgactagcttggccagtagtcgaccccacccggggaccgactctgggggttggagagactcttggggccggggtcgggcactccagctttcttctagccccgagctgggattccctggcctgcgccagctgcgtacacggcgagtacaccgcacctgcccgggacttcacccgcagctgcgagactcctccattcccggagggctccccacacctgctgcggccgtgccccatctccccgcagctgcggcgctgagcacccccatgtcgagaggctgagaccaggacaggtgcagggcgttcccactcacccccgaaagtcctcctccttcctctgcgagtctgtgttggaggtagagaaatagtatgtggggtttatgtgcaggtcctccccaggctccgctccatcccctaaagctccatttcctagcccagcatcccatttggtaaagcccttcgaagtgggccgcagcagggctgtgctgaatctttagcgcaacccctctgaggaatggtgtcgtttcctactcctcaaaagtacccccgatggcaccagccttcccctcatttcccgtaatactccaacttcgaaaggctggggagtgtgaagctaggctaaaccactgaagtttaaccgggtttgaagagaccccctcccccgacccgcttccccaaactgggctgctacccccaaagcctggtcaggaaagaccctacctccataggcaaaggggttggagggcctcaattctggatttccacgtgcagcagccctgaccaacgctccaataggccgggatccagccatacttcaatggatcccaggggtatcttgaaggcatttcccaagcggcagaaaattcatgctgatgcatcatcaaaagtacttgcaaagattcctaggagggaagagggagaagaagcagaaggtgagctgacccagtctcagaaccctcgtgtgcttgaacccacagccttcatgtgcttcagccctacgttgtttatgtccagaatcagatattggagctgactctgcctgtccagggcctgcaggtctgtttgtatctaccttgtgctaagcttggt

SEQ ID NO: 5835 - DNA, 2300 bp, Homo sapien
tctgtcatctctcttcattttccacaacttcccctcattgctccttgagaaaagggacctttttattctcgcttccatcctggcacctagaatagtacctgacatagttataggtggtttgttctgactgagtgactgctttaacattactaaacattttgttattcctctagtaatcaggcacgtaccttcacaccttcacatagggtccttatatgtgagttgttctttgaatagctatcccctcttcttcactcagcaaacgcctattaattcttttttttttttttttttccagtttttttgagacagggtctcgctctgtcgcccaagctggagtgcactggcatgatctcggctcactgctgcgtctacctcgctggctcaagcgatcctctggcctcagccaccacaagtagctgggactacaggcatgtgccatgatgcacggcttatttatttttttgtctgagacacagtctcactcactctgtcacccaggctggaatgcagtggtgtgatctcagttcactgcaacctccatctcccgggttcaagcgattctcctgcctcagcctccagagtagctggaattacgggtgcgcaccaccacacctggctaatttttttgtatttttagtagcgatggggtggtttcatcatgttggctaggctggtctcgaactcctggcctcaagggatccgcccactcggcctcccaacatgctgggattacaggcgtgaaccaccacatccggccataatttccgtattttttgtagagatgaggtttggccatgttgcccaagctggtctcgaactcctgagctcaaatgatccgcccactttggcctcccagagtgctggaattacgggcgtgagccactgtgcctgaccttattaattctttaggacccagaaacatcatcacttctgttgggtcttcctccaaagagatgtcacttacaccttcactctttcctaccattttatacaagactacaacctctatttaacgcttcttattatttaagtacatgtttttcccaaccactctgagtcctgggacaacatatctttttctttctgttctagtttagagcttggcacatagtaaaagtcttcctaaatgttgcacgaacgagtaaatgattttaatttccacaaactccaggcttccctgattggcccctgcctgtgaacatgagtcaccagttgttatcttgaaagcctcaggaacttcagacgcaattcatcctggctacccagtgggtccagaaaggacccaagtgcacaaaggggccggcatcggccaatcctagggtggggaaaagttaggtatccatgcccctgtgcccacttcttccaggcacagcccttggttcttgctctagctcccctaaagacacagaaaatatttagaagttcacttaacaaaaatattacagctggaaaggacctcagagataacaatggtagtccatccacttcattttatagatgaggaaagtgaggcccaaacaagtaaaggagccgactgaagcgcccgtggtgaattaatggcacagtcggaactagagcccaggcctctctcctctctaaagtctaaaacattcttggatttcagtttcctcttctgtaaaacggggtgaaaattagcctctcaggacagtggtgaggagcaaatgagataatgaatgtaaaagaaattactatattagcaacagaaatcagagcggagcgagatggtgtagaggaatctaaggggtgtccggagacatgtgttccagtcatgtcatctctgtgaacctcagtctcctcatctgcaaatgcaggacctggcccggctgaccgccgagacccttccagctctgccgacccaggccctgaggcccttcccggagggccggaccctgagggaaaaaaacgaaggagcccgtggggaccctcgagttaccgtcctgcagcagcgcagtcttctgggctgtccgcagactctccaaccagcccgtcaccgccatctttcccctgctaagcagcacgcccagccgctgccatggcaaccgttccagagggtcacttccggctgactcggaagctattctggccatttgccctccttccccccttcgtccgctctcattggctctgctggtaagtggtctattcctgcccacccccgggtgactagcttggccagtagtcgaccccacccggggaccgactctgggggttggagagactcttggggccggggtcgggcactccagctttcttctagccccgagctgggattccct

SEQ ID NO: 5836 - DNA, 2300 bp, Homo sapien
atgctttgtatacagaagatgctcgactgaaggaaggagatagaagggaggaaaaacctcccattctctttgcagccatgttgggcccagcttataccttcaagccatctgtcccctaggcagcagagatggaaggtggtcaactcttttgtcacccttccctcctctctctctctccaaaagccattgttgcatttcaaggtagcacatggcagacaggtgcacaggtaggcacagactcaaacagatgcaggaatgagcatctgggtctccagagcataggtctctggagcatagggtctccagagaacagcatcaggaattcagtatgttaaaaatgactgaaaaatggtgtgggagccacggacatgctgagctgtgggttgggaggtggaggaggtggtgactcaggagtgctctagtacaggcggctgttggggaggctgggagaagtgcagcagggcaccaggcttcctagctctgcagacttggtgggcaggggtagggtgccagggactgccccctgtgcccagtccagcttagcactcagggcctgtccctggcgggctatccaggtttttagggccagcccctaccatcagttagctgcccccacaaagatggtgatgggtgtcagcatttcatgtaaatgtccctcctctctgactggcaggaagttctctccctccagctgcagtagagtcacctgggcagcaggatggtttgggccagggggccctgacctctcaggggtgtggccgcactctgcttgcttcttcttgtccaggtagtggggttcccaggagcagcctgcacacggtcagagccaaggaaacaggtctcccccaggttgcccctcctcagcctgtgtctcattcatcaggctcacacagatggccccatctgtctttatgtttccctgggtggagagagaattgctggacttgactcggcggaggctagggtgtggaggcccccagcccttagtggatcctggaggcctgggctttgtccacgggagttggaagggaatggactttttgtctggccctctatagtgacaggctggcccttgctcccgtcttggcctggggctctgagcagcagccctgttcccacacaagctgtgcaacagccaaggctctgcacccccctctcgccccccacagtgagaggccgagaagcattcttaacattctttccagagaaaaggggtgaaatgtctgaatttggggggtcaccacgttatacaaattgcaatctaatcgtttttataagaacacacttgcagtaagaaaagagcccaggaggaggggatgaggagacagacagcttgttttgtccccttttcccccaaagtttggggctattgtcgggccaatctctccctctaccagagcagttgagctagagttttctagttaaataggtcttggggtgggggccgagaagggcccacggtgccatttctgtttgttttcccaaatcaaagccccagcagggctcctgtggcactgctgggttgctattagaagagatgggccttttcccagagcctggcgtgtcagtttatgctctgaacttaacctcacgggcaccacacaacagagccttgagggtcctgggcccaggggcaaaagaaattgtatcttttcattggcccatttaaagtgtgtgtggccattttagagaaccagagaacagcacagcagaaagaaacttctcagcccctgccaggctgtgcgggcagagcaggggctctcaggacttgtgctggcctccagggcctggtgctcactgggcccttggctctccccccgagggcagggaccccttgggctgtcctgtatttctgactgcagatacttacggccatgacattttccagtggtggcatgaatgctggggtaggggcccagcttggcagcccagtctgggtgggccttttatactgctgtccctgtgcagccccatgagtgcccagctctccttccctctgaacccagggaccagggtgggcaggtagagccatgctgggcttcagtcctcccaacccccactgcctttcatcttctatttcaaacaaacatgaaattacttctatagattaaaggggagagctcctcaatcattccttaaggcctcactaatggagggggcagggcccccaaatctggaagagggaggagaactgtggagccaaacagcccctacccagcatgcacccagtatacctgtgaaagagagagaatgactcccctacagggctctggcctgcccagggtggctgaatcttggct

SEQ ID NO: 5837 - DNA, 2300 bp, Homo sapien
tgggagatagaggttgcatgagctgagattgcaccactgcactccagcctgggcgacagagcaagactctgtctcaaaaaaaaaaagggaaagtggtacctactgcatagtgttatgaggattacataggataatgcttttgaaacatgtgctcagcacctggcacatagtaagtgctcagtaaattactagtgttattaagagggcctaagctaatgcagaagcaggaggaatctacctgcctttcaggctgtccgtgcccaactaatttcccttcttaccttgctttcctcttttctatgtcttgttatttttaatctctcaacttgaatacacaaactctaactccctggcatcttcctctggtgagacaggcccctatgtctacttctggagcctgatgatagtctgcatgatgccaggtttgcctgagctagggccaggggacgagtaaggcaggttgaagatctggttaatgtctgggacagggtgagaaattatagaaggctggcttctggtaagggctttctgttccaaaaagagcttatggagtcaaaatgacttttagaccctctagctaagaggggatatgtgtacttgcatgagtgtgcctgactgtgtgtgttttgatgttaatttttaggtgttggtacctctcatctcttacctggttgtggtgcttatgagggacttctcactctcctgatactgtatgcctgtgtcatgtgtcattcaagtttgagcctttggtatttgggaattattcctttaggaagcagagggaccaacttcacagtgcacatgactagctttcccagctgtgtaggctttgggctctggaaggccctcttagttcagttccacaaatttttattgagtgccttctctgggccaggcactgtgctagacagtacagtacccaagagcctctaaaggattctgatctcaaaggggagatgggaagataaaccaaaaatgccatttgtcccatgagtatggaaaggactagaaggatggtcagcctacctggggagccaccagctcttgcctctgtctgttcagcacagatttgatgtccttgtccctggaatacccctgagggaagagatgggactgagggcaaaagccgtttgaattttctttcttttctgagccgagctgggtttttcatcactttcaaacccaaaattgaagttatagcaaaggcctttagtggggaaaagtcactgagcaatcccttgggaggagccacggagggaatgatacacgttttcatttcattgatctccaagtatttattgagagcctttgacacgcctagcacaggagccagcaccgtgagggatgtgacgagaatctggttgaagacatctcgcggattcaaatcgaacaggttatcagagcacagcattttgtttgggttaaatcacctgggttagagaactgaggccagtgagactgcctgtgatgcacagatcccaccccaccagccccttttcaaagcactttatcccgtgagtctcaagggaggagtctgagtgtgggggtaacaggtcctgtgtgcagccacagtattttaagtccattcatggaagcttggcctttgcttcatattcactttctgcacaatgggaataataatatctatcttgtgggctcattgtgagatgtgaagcaccctttgggtgctggagagtagtgaattccttttcttcctctgctccttgtatctgttgtaccctgagattgcatgtgcgcacgccctttctaatcttctgactttgagtgtggctggtctgtagcttttgctcattcttcctaatgaccatgggaataagggagtggggtggggggcaagaatggctgcaggtagtggggagtagttgaaggtgtgcaaaactgtgtctgcacccagcctgacccccaagagtcctgggcaggccccatggtttgggtgtgagtcctggtgagtgtttgctcaaaatctgcttgactattgatggttttttactgagtgttaaatttgattaaactcttaagtcctcctaagtgccaggaagacactctgctttctctccctcttttttctccttgattcatagtggttaggtgagagaaaagggcagcttttggaaagaaacatttatagatgtcacatctaggcagttaagaaagcacttcacaggaggctgagcgccagtggttcacacctgtaatcctagcactttgggaggctgaggcaggtggatcaacttgagcccaggagctcaagaccagcctgggcaacatagtgagacccc

SEQ ID NO: 5838 - DNA, 2300 bp, Homo sapien
tttttatgcttcattggtgctaaatgatttcatagttattatttgactctctaccaaaaaattgctccttgttgattggttgcagtggatagggaacatcatgattccacattccagagtgacctgtacctgtgctgaagacacaggcggccctcttcatctgatgaacctttctttcctgcttgcatccagtttgcactggtttcactggcatcagatactgtgaataatgtggtattgggtagtggtggtgatgatggtaaagaaactacaggagagaaagacggatttttatgatgaaggactttaccctctgcttcccacatttgccttttggggctagtttcaagcagtttggcaaataaacacacagaacagttaccaggctgccctgggattctccactgttcacctggcatgaacctggtttcttgtcctaggcaaatggctgtttaccagatggctctaaacacaaaaattcccaccctctctgtttgctgcctacttgagtgtgccacacactcacgcaaggggatattgaagaggaatgtgcataatgagtgagagagcaggcatctgtacacactctacacatgttccatgtaatatatgcacacacttgtaaaaacctcatgagcagaaactcagttactacaaagtctaagctgcatttaatggcccgtcaagtcaatttgcagaacttttccacattcccatgacacttgtacgagtctggggaagaaacacagcccagtttactcagacaggcttgggaataggagatggtggctgttcttggggatgagtcagctgtccctgtgcttttcttgggacctggtaactccagaacccctatgtagaataggacaggtgggatgtccaccttgggaaaggggcttagtttccaccagagagcctagtatctgacagtcttctttcttcttaagtctcattccctgccacaggacttgtctgtggcttctagcctttcttcctcctgtcagattgcagagggaatctaactatttgtggatttctcttatcagttgcctgtgagagctgactttctctgtagcccctgaactgtagcagaatgctctggggctgtgtttttccattgccacacttactctctaatacagaaatgtagatatccctgtgaggatctaggtatctaatcagtacattagcatcctttcctaaatggcttcattcctttcacttataaatgaccccttagctctaacagaataagggaatggggcttccctaggtttattcttctcttttctccatcacaccttaactgatctattgcggaagaggtatgtatgggaatcctagaaccttgaaacttcccacttacacttcaaattaatgaggatgcagaatgaaagaaagttatttcacttggctagaagatttctttctttcttttttttttttttgagacagtctccctctgtcgcccaggctggagtgcagtggtgcgatctcggctcactgcaacctccgcctcccaggttcaagcgattctcctgcctcagcctctggagtagctgggattaccggcgtgtaccactatgcctgtctaattttgtatttttagtagagacggggttttatcatgttggtcaggctggtcttgaactcctggcctcaggtgatccacccaccttggcctcccaaagtgctaggattacaggtgtgagccactgtgcctggctgaagatttctttttgacccttctcaccccttgaccgttgaattttgtaagctctgcgtacccatgagaagtctaggtagccagtaattgaaatattaaatattctccaattaaaagtggtatttagttggtcttttaattttgagtctcttttacaaagtccagggaagtttagatcaccacaaggctcagttactctagttttctgaggatagctgatgggcaggtaattttgaaggagggtatcaagtatagataataagccttgttggttatccttactaagttggggattggtcagcttcttcaaagattggagttgagttttcatactgtatcttgatgacttttaaattttcttttccatcatttcagtcagatgccctggatgcagctagaggatgattctctgtacatatcccaggctaatttcatcctggcctaccagttccgtccagatggtgccagcttgaatcgtcggcctctgggagtctttgctgggcatgatgaggacgtttgccactttgtgctggccaactcgcatattgttagtgcaggagggtaagtgctatag

SEQ ID NO: 5839 - DNA, 2300 bp, Homo sapien
cccccagccagttttcttcagactaggtttatttatttgcttttggttttggggtgtgagcaaggagaggggaaatgaaaggtcattctagataactgcctagattaatttctgtccctctggactcacttgccaagatttgaaggggccagatagcttactgtgggtgcatgttgtgttgtttttgtttaaaataggtcatatgcccaggaatgcaaactctaatggttactaagtgccggaaagctgagagagaaggggcctagtggaaaaatgagcctgaggcaagagaaggagggctgggaaaatggcagttcagccaggcccacggggccaggtcctctgtgcattaacatccacggagagatttatttacagggcactaatcatttttttgagaggagcaccctcactttacattagtaaccatatggagaaatggctggccagaggcctcttcaaggatgggagcaagggtccctggtgaattccaaggggtacctgctcctgtcttctcaggtacttttcttctgctgccttgttctcctgaccccctttgactggcagtgacacgttcccacagggatggagggatacctgttttcagagaaaggagatatattaaaaatttctttggatttttcaggtgctgaagccaataaaaatatagatatgatttggccaacagctagggaaactgtaaccatccaagatggttagacaaaagatatgaaaaagctgagttgttaaattgtttttaacaaagtagagctttttcaagtcaaagccaaattgaactttttttttttttcaaagtctaaatttgaaggactacagccaagtgttttgattatgatattcttcttgggagaggatgcctgcacctgctgtttggtagcagcttctaaagttcaactttgaaagtttcttggtgctatgatcaaaccctcaggggagtattttgacccctagtaaagtgtcacatggcagttaagtgaccagggaggtgagagaagtgctgtctttattccaattcaggaaatatatccattcttttactttcgttttcttcctgctatgatccagagtactccctttttagtttcatcaccactcattaattttagacctaattcaagagaagagatataactgtaaacagtttcttcctttatatctgggagggatttgcagatacgaggagcagacagggaagtctattttttttttcatttagatttcagttcctttggcccatcctgttaagtatcttttactgtcctcagcagtagtctggtagtgtaggtggctctatagtgatttaaaaccagggactacattcacccaacagaataattcagtaaaagattttagccttaacatgtgtatagccaagtcctaattgttcagcctgaaaaataacaaatgtttgatattggaggaacaatttctaatagttataactaaactaattagaagaaaaacgaatgattattagagtcacattagtgacaacaccattaatggatattatctactacctatacttatgtaaagataattaactttttttgtagtgatttataacatgtattgtacttcgttttaggtgtcattttaaaaaacaattgtgtgaaatattatccttattttataggtgaagaaatggataattggagaagttagttacctgggttgtataattagtaagcggtagaattgggatatagatcccagtttcctaagtctgccttctgtgctttttcagttttatttaatctgctctttagttaaaggtaaataggaagacataactgtcaacaattatgtgatatattttcaacaattgatcacttaataaagcaccatctattaacatctttagacctgttattattattattattattattattattattattattattttgagacggagtctcgctctgtcgcccaggctggagtgcagtggcgcgatctcagctcactgcaagcgctgcctcccgggttcatgccattctcctacctcagccttccgagtagctgggactacaggcgcccgccaccacgcctggctaattttttgtatttttagtagagacggggtttcactgcgttagccaggatggtctctgtctcctgacctcgtgatccgcctgcctcggcctcccaaagtgctgggattacaggcgtgagccaccgcgcccagcctagacctgttagtattattattattattattattattttttttttttgagacggagtttcgctcttgtcgcccaggctggagtgca

SEQ ID NO: 5840 - DNA, 2300 bp, Homo sapien
gtacacaaatgtagcaaaatcaataaatattgaactcatgacatcacctaaatgtgaagtattcctgccttagtagtcttctaacagtatggtacctgtgaataagtaaatttctttataatgatctctaaaacatggcttaaattctttggccgcattgaaatctataaaatagtgctttcaataaaccactgccttgagtttggaaatcgttttctacacaaagtctttgttgcatttggagagggggagggatggcatttttttgtaacaggatttgacctgtaactattattaagaattttcttagaggagttcaaagcattttacagggatcatctcatttatccctcgaaagtaaggcagaggcattatctccactacagattgagaacactaaaaggccaagataggtggggctttttgttgttgttttgctaagatcaaaaagtaattctagggcaaagccagattccggtctgaccttgttacatgatgcttcttgcagcaccataatacaatgtagttgcttccctaggtttctctttggctatgctaggtgttgaataattttcagggtcaatttttattcttccctgctccctgaaaatgagtgttaagatgtagataagtacaaaagaaaactctccaatccttcctacctggatttggagtacaggataaacagacagaaattggcatcttcctcccctcctccaagttttactgcctagcccaatgctaatagaaaaataacccgagccacaaatgcaagtcccatgtataattttaaattttctagtagttacattaaaatatattgtatttagcccaatacagcgtatccaaaatattaacacttcaacacgtaatcaatataaaattattaatgagatattttgcattcttttttttgtatggcttcaaaatctggtgtgcatttctcacttatagctcatttcaatttgtattagccacatttcaaatgctcagcagccacatgtgacgagggaggacactgttggacagcacaggtctagacctcagtagctctcccttcagattaatgccatgtgaatcgaatgggtggtatgaagaatggatgctgagtccttggagaatccacttgcacttgggtggtgactgataagaagccctagctgtgccatttcctgatacatgactgtttttgaagttatggactcaggatctagaagactgcaaatccccaaatacgtctaacacccaagctcacgccaggaccgtgcttccgggcctgtgtgagaacctaagctatggaacctgtcaacttctagggctgcagattcgttgggccctcacatgtggcccgtggaaaggaggcatcactcgaggaagaggagggcttctagaggggcaaggccacccaactaggggcttcttgagggcaggtgctccaaatggccgcttcctgagggcagcgggtcctcttgtggcctcaggcagggccctgaaaccggcctcacgtgtttgcagcgcgaactcctgtgcttccaccaagcgctctcggggatgcgggggtggtgtcagcgccccggccccagcccgcaccccgaagtggctccaaggctgcaggtgtgaggggcgtgcccagggctcggcccgcgccgccccatgtgacccggtccgacatggtgtcgcctcctcccggggcggcggcggtggcggctcgggctgggctccgcgtcgggccggccccgcggccgctcatgggcagccagggccgctcggggccccccgggaacggcgggcccggcgagggcgagggcggagaggcgaggaagctgcaggaagggagggtggcgagggggaagcgaaggaaggggaaggggaagggaaaagcgagagcggggcaaggcggaagaggaagcggggcggaagggaagcccgggccgcagacggcgaaggaggcagccgggccgggggctgacgcgggagcgagggcatgcccaagggaggaagcagagggaggcagaagcgtggaggaaggggcgagaggcatcgtcaagggagtcgaggggagcgcaggggccgggaaggaggcacaaggaagagagtatgggaagaaggaggaatggagggtcagggctaggcggcgggagggcgccaggccgggaagagcacagggacgagggggtcaggcttgggccgacatcgcggggacaggggtggccatggcggcggcggccggggaggaggaggaggaggaggaggcggctcgggagtcggctgcccgcccggccgcggggcctgcgctctgg

SEQ ID NO: 5841 - DNA, 2300 bp, Homo sapien
gagacaggcggatcacgaggtcaggagatcgaggccatcctggctaacactgtgaaaccccgtctctactaaaaatacaaaacaattagccgggcatagtggcgggcgcctgtagtcccagctactcgggaggctgaggcaggagaatggcgtgaacccgggtggtggagcttgcagtgagccgagattgcgccactgcactccagcctgggcgacagagccagactctgtctcaaaaaaaaattctccattaatgaaaataaagtaaattacacttgcatgattatggattttaatcctgatttatgttgggttaaagaagttttagtgcctccactaaaaatgagatagaatatagatgaactactcagctttactatgtatcctgaatgagttaagtactcaaacagtaagaaattacaaacatctctaacacaaatctaaacacaaaatgcaggaaccatattcctgctatatcatttgtcttccttcttgattcgctcatagtacacaaatgtagcaaaatcaataaatattgaactcatgacatcacctaaatgtgaagtattcctgccttagtagtcttctaacagtatggtacctgtgaataagtaaatttctttataatgatctctaaaacatggcttaaattctttggccgcattgaaatctataaaatagtgctttcaataaaccactgccttgagtttggaaatcgttttctacacaaagtctttgttgcatttggagagggggagggatggcatttttttgtaacaggatttgacctgtaactattattaagaattttcttagaggagttcaaagcattttacagggatcatctcatttatccctcgaaagtaaggcagaggcattatctccactacagattgagaacactaaaaggccaagataggtggggctttttgttgttgttttgctaagatcaaaaagtaattctagggcaaagccagattccggtctgaccttgttacatgatgcttcttgcagcaccataatacaatgtagttgcttccctaggtttctctttggctatgctaggtgttgaataattttcagggtcaatttttattcttccctgctccctgaaaatgagtgttaagatgtagataagtacaaaagaaaactctccaatccttcctacctggatttggagtacaggataaacagacagaaattggcatcttcctcccctcctccaagttttactgcctagcccaatgctaatagaaaaataacccgagccacaaatgcaagtcccatgtataattttaaattttctagtagttacattaaaatatattgtatttagcccaatacagcgtatccaaaatattaacacttcaacacgtaatcaatataaaattattaatgagatattttgcattcttttttttgtatggcttcaaaatctggtgtgcatttctcacttatagctcatttcaatttgtattagccacatttcaaatgctcagcagccacatgtgacgagggaggacactgttggacagcacaggtctagacctcagtagctctcccttcagattaatgccatgtgaatcgaatgggtggtatgaagaatggatgctgagtccttggagaatccacttgcacttgggtggtgactgataagaagccctagctgtgccatttcctgatacatgactgtttttgaagttatggactcaggatctagaagactgcaaatccccaaatacgtctaacacccaagctcacgccaggaccgtgcttccgggcctgtgtgagaacctaagctatggaacctgtcaacttctagggctgcagattcgttgggccctcacatgtggcccgtggaaaggaggcatcactcgaggaagaggagggcttctagaggggcaaggccacccaactaggggcttcttgagggcaggtgctccaaatggccgcttcctgagggcagcgggtcctcttgtggcctcaggcagggccctgaaaccggcctcacgtgtttgcagcgcgaactcctgtgcttccaccaagcgctctcggggatgcgggggtggtgtcagcgccccggccccagcccgcaccccgaagtggctccaaggctgcaggtgtgaggggcgtgcccagggctcggcccgcgccgccccatgtgacccggtccgacatggtgtcgcctcctcccggggcggcggcggtggcggctcgggctgggctccgcgtcgggccggccccgcggccgctcatgggcagccagggccgctcggggccccccgggaacggcgggcccg

SEQ ID NO: 5842 - DNA, 2300 bp, Homo sapien
atacgcaactaaacatgcttgagggcctactgtgtacaaggatgagggtaagaccacaagcaaacagacataacctttgcccacttgaagcagtgcagagagggaaacagacactcaatgaattgtgactcaggccttacacagaacacagggaaggcaagggctggcctgggctgtggccacttgtgtccacctgacttgtctccgcctgatggacccacctccccatgggctttagaggagacagtgcctgccaagcctgtggcagatacaagtgctcactaactggtggtgttcctggtgataatctgttgggaggaggtgaaggcaggtcttcctggggaagttgcaaataggctgaagtctacaggctcagccacttcccccatcattcattcattcattcattcaacgaactcttaattgcagaacagctctgcccagccttgtgccacgagctgtgatttctgagctcataagacatggtccttgtgggcaaggtctgtgtgggcaagagcccactgaacagactcctggaggaggatggcaagtgtgctctggaagtctacttctctgaggagggataagatcttggaacgcaccctctaactgttttcccatctctccattgctcagtgtttgcatttatggctgggagttggaaagatggggcacagggaaaggtgggacacagagcagggagggaggcagggcctggctgtgctgctggactagggctgccgctaattttggcctaatggcttcctgggaccacaccaaaccctccagccctacccccaggggaatggagggtcactggggaaggggaggttgtaagtgaagacagcagtctggtagggcatcacctgctcctcacaaggcacctgtcccagagcatctctgtccacccaggctgctcccacagaagcagcatgggggctcagggtttccagaaacctcaggggggaagccacaaggtggggggctaggaaaggcttagacaagtgcctaccttctcctatgccccaagcccagctgaccagcccctgcctagaatacagtaggtgtgtaaatacctgtgaaatgaaaaacgagtggggctttgagggggaaagggctgggtggcctggatggaagtcccttcccccagtaaaagctactgagagtttttttgcccctgctgcctgctgaggtacggggacagtgggtcctgccagggacctccggactctctcttccacacaggtggctcggggtgctcctcaagcttcaggctagtgtgtgtgtgtgtgtgtgtgtgtgtgtgtgtgtgtgtggtgaggggcacaggggaaggggtgatagtgataatgggatggggggagggggaggcatttctggctcccagggcctcctcgggagagtgaaggagactggagagaccgacaggacggggcacgcggccgaaacaggggagcggggtccgggtggcaccggcacgcactgcgcgagggccgggtgcgcagccattcgctgcatggttagcggccgctcccaggggcccggcgggacacacagtaggtggctcggagaccactgcgtagccggcggcggaagcggctgggcccggaggcggagacccagacccgccagactcgggcgctccaggcggtcggggaagcccaggctcggggtctcccggcccgcagagtttgcagccctaggcgcccccatccccgcgcgtccgggaccggggagcgcgcgaggggacaggccggggatagggggaggcgcccagaccggccgcccccgcccctcccgcgggtccccagacccctcccctagcccagaccctcaatcccgaacccgtcggccgcccctccccggccgccccgcccccgccccgggctgcatccaggccccagttcccagccgggggctgcgggctcccgccgcccgccccgcgctcccccctcgcgcccggtgcggcgccccccgcccccacccctccccgccctcccacctccccacccaccccgccagcccgtgaccctcccgcccgctccggctcccgagcagccagcggccaccggctccggcagcggcgcacagcgattcggtgcggcgcggcgagcacgacgttccacgggacccgcggagccgcgtcgtgatcgccgccggcctcccgcacccgcaccctctccgctcgcgccctgctcagcgcgtcctcccgcggcggcccgcgggacggcgtgacccgccgggctctcggtgccccggggccgcgcgccatgggcagcccccgctccgcgctgagctgc

SEQ ID NO: 5843 - DNA, 2300 bp, Homo sapien
cttctggaaattaacctcaatattaggtcagcatgtgaaatgttggatttgacatgtcaggtagggttcagggactgattggtcccatttgccctcaggtcagttgtttaatctcaagacctgttactactgattttattaaatcagagtctttaattcttgcatgtttgtatctaatttctgaatgaatgagcacactttaaccagttatttacagttacctttttcctttaaccggattgtgaaagcttcatgtattttaatttagattctgtgtttttaagggttctgagcatgaagctggcagatagtcggcaggactcattttttcatcatggctggctgatttctccatagattgataacagtattttgttatcttgcttctctgtagttttgcatcagctgtttaactttgagctgagtgaggggagaggggtaaagagaaagaaacttaagttttctttcacagaactccaccattgtgggctttgagagagccctaaagcattgtacctagtggtacctagtgacttccaaccaaagcctttgagtatgcactaaataggtgagaagaaaggagagaaggtttttaggttagaaacctttaaccgatagaaggatatggtatgttgtaaagctggaaccaagtttgcatttttgagggcttgagatgaagggaagactcttaccagatagtaagacagctgagttttcctcagttttctcgtcttaacactagtggacaattctagcattttgtttggaggatttcagagttaacctcatggaattcaggattttttagcaagtttgcttttggttttatcttggcttttagtaatcatgttggctggtctggtcacaggtgactgtgaaacagatgccctggtcttgctttcatcactctaggatcatgaagtgctatgctatttcctggttatgaatattaaggttggaattacatttttattgattgtttggatcagagctcagttcctgtagaaaacgaactgtaaaagaccatgcaagaggcaaaataaaacttgaagtgaatgcttgtcgtgttgtattgtgtgaatctatttcctgtctgccccctcccttttctcctctttcatgcctcacctacaagcaggtattctctcctctccacagctgttccaagttagagattggatcttgaaggcagccctcccctacctccatcaccagtaagacttccagattttcattaagacaagagctaagaaaagtagactagtttttagccaagccaccccaccctcttgccacagttataacctggatgtgaaatagggcctctagtttgagttttgccatctattaggatagaaagcacacagtttgcctgattcttaaaaggcgaaagatggcgcgagtagcataaactgacaaaataatccacggcgcaaagatactcctggatgatttggaattaaaagctcaaaaagcgtgggtgggccaggaacagccaacacacatgagctaactagtcctctgctagcaagtgccagcagctaagtctcagtgaaggcatagcaagttgcggggtctttagagcaggaagaattaagagaggcttagccgagaggacagacaggacagacgtgttgggatggaaattcctaaggctcctcggctctcttgaggcaaagacaatctgagtgcatttcctttgcttgtagcagaaaagcactgccctgaaccccacctttgctgggaggagtaagaagggtttacatttttatatctataactcctttaacgaaagcttaccctgggttggaagagtgggagacactcttccgacacagagcgaggagcttggggaagtggacaccctcatggtcgtggaaatgagcaaggatgttaacataaaccccaaatccattcttctgtgatgttacttcctttctcttcggtcttgataaaatatgagcagaagctgcgggctccgggtagggctgcggggtctcggcgccttttcttttccaggactgtgcgtctcctttaatgggcggggccggaactggccgagggtccccggctttgtgcgtgtcgggggcggagtttgaagaaggctcttacagcatggccgccggtactgcagctgccttagcgtttttgagtcaggagagccgaacgcgggccgggggtgtcgggggcctacgggtcccggccccggtcactatggacagttttttcttcggtattagtgaagggagaggctgagggtggtactggggcggtaagaggtagggatgtgaggcgggaat

SEQ ID NO: 5844 - DNA, 2300 bp, Homo sapien
ataatgtgcttgaaagaattgtccattgctgaaaatatgaacaaaataggaagtttttttgctgctggaatttgttcatggactttctaggtgctctacttttctccccccaacaggtgctctgctgcgcacagcaaactgaagcgcattgctttggggataaagcgtctcctggacagataaccctcttcagaccaaacctctcctcctgacattctgttctgccatcttatcgtagggagatggtctatctaagataggttttaaaaaaaaatagatttgtcataattggaataggtttgtttttgtttttgtttttgtttttactgtaaatttaaatccccattaatatgccactaaagctgtaactcagagtgggtaatttctattcagaagcactcccctcccccagcaaagaggtatttctattagtaaagcatagtacacccctcttctttaggtctgcctgcagtagccagttaatataagttggtaatctgcagtgcacacccatttaaaaaaatggataccttccccaaactaatccatctccttttttttcttcccacagcgtttgctgccaattgatggggcaaatgatctcttttttcagccacctccactgactcctacctccaaagtttatactatcagaccttattttcctaaggatgaggtaattgtctctctacctaccaacttggtgtatgggtatggtgcacacttaaaacttaaccttttaactcactggttaaaggaatccttctgtcttaaaactgcaaactttagatggagaaagttcattaaaacattcagtgtatcttgagaaatttaaggagtttagacttttaacatcttgtgccaagttctttaatttctcccttgagaaagtcagatgaaatgtattcagagttggagttacaaaatagttaatgtgtctaaatgatgtgttgtccttagactaattatctctaatatattggtgttctgtaattttctttcaattgtgaagtatctacaggctgttgacaatcagctaaagaaaaaagcaagactgtttaaagacagtaacagggccaggcgcggtggctcacgtctgtaatcccagtactttgggaggccgaggtgggcaaatcacctgaggtcaggagttcaagaccagcctaggcaacatggtgaaaccctttctctattaaaaatacaaataggccgggcttggtggctcatgcctgtaatcccagcactttgggaggccgagacaggcggatcacgaggtcaggagatcgagaccatggtgaaaccttgtctctactaaaaatacaaaaaaaattagctgggtgcggtggtgggtgcctatagtcccagctactcgggaggctgaggccggacaatggcttgaacccgggaggcagagcttgcagtaagccgagatcatgccactgcactccagcctggggcgacagagcgagactccgtctcaaaaaaaaaaaaaaataataaataataaaaaataatactaaattagctgggcgtggtggcgggtgcctgtaatcccagctactctggaggctgaggccggagaattacttgagcctgagaggcggaggttgcagtgagccaagatcgtgccattgcactccagtctaggtgacagagactccgtctcaaaaaaaaaaaaaaattagatgagtatggtggcgtatgcctgtaatcccagcgaattgggaggctgaggcaggagaatcacttgaacccaggaggtggaggctgcagtgagccgagattgcaccactgcactccagcctggtgacagcaagactttgtctcaaaaaacaaaaaaaccatcctctgcaaaagccaattctcagtattcctaaaaccttgctgttttttgctggttttacaaatctgactcaatgaataaatctttattttacaaagaagaggtgatatttctgatagatgtttctgacaggccattttgttactccctccccagactgacttgtgagttatattgttagattctgctgccatttttcttgatgtgttgcttaactagattatattttcaggcatccgtgtacaagatttgcagagaaatgtatgacgatggagtgggtttaccctttcaaagtcagcctgatcttattggagacaagtatgtgataagtatttggatttgagagtagacctttcatagtgaggcttatcaggttgaggggaggtgatgactggaaatatatttatttattttaaatcccactttggctttagtaaaatctgaatatgtgtgcatt

SEQ ID NO: 5845 - DNA, 2300 bp, Homo sapien
atgacatgtactcctatgtttgggatatcaagagtataatgtctatggtgaagtcttttgtacagtggttaggtaggtgcaccaggaataatctcttctcctcaaatatattgtccctttaaaaaaaattatcccacagggagaaaaacatttagggaattggcacatttccaagtctcttcaattcgttgcctaggtttctttcaaaaataggcattattgaagacttgagatgcaagtcttagtaaatacatcaagcacattaatttttctcccttgggctaattcagcataagtatcttaaaagtatgttagaaagtactgactttaacttgctctgactgaatgctttctggatggaaccctgtataccacttttatctgatttggagatgagacactatgaaatgtgactccacaagctttctgctgcttgctgtgtcttgataacattaatgctatgtttaacagaacaattgctgaaatgacctaaagggcctggcaagaggaagccatcctcccagccctgtgcgcatgcgagctttagtgtaaggctattctggtgctattcagtattatttcacgtggctttttctttatccttctaccaagtattggttttaccaggggatagaaattgtaatcccctaaacatctctgctacattaaatggacttttgtatgtctcctttgaacactgattttttttttttaaattgtcaaacttggtaaaaagcaccagcatggccaagtttctctagggacttcatttcattttcaggttttcaatccagctataaggaatatgtaatggacttatatacagcacacagcaggcagcaaggctgactgacatgtcatagttttcatagtagtcacaaatactatgatgggtttcatggtcttggttgtgaaatagatatctgaaacaccgtgagcttagaataaaaagtagtagtgagattttccactttctgcctgtatacctttgagctcttaaatatttaaaaaaaaaaaaaaaaagtttccctgtgatacaactaattagctactaaaagtagagtctcagattgttaatttgaaaatagataactttttttggattgctgtaataacaggtagaagagagtattttgacctcatgttaaaaggctctgtatagcttcgggcgcggttgctcacccctgtaatcccagcgctcttggtggctgaggtgggtggatcacttgagatcaggagttcgagaccagcctggtgaaaaccagcatgagaccagcatggtgaaaccctatctctactaaaaaaatacaaaaattagccaggcgtggtggcgcatgcctgtaatcccagctacttgagaggctgaggcaggagaattgcttgaactcaggaggcagaggttgcagtgagctgagatcacaccattgcactccagcctgggcgatagagggagactccatctcaaaataaataaataaataaaggaaatactgaccgtgcgcagcggctcaaacctgtagtcccagcacttagggaggcctaggcgggcagaccacaaggtcaggagtttgagaccagcctggccaatatggtgaaaccccatttctactaaaaatacaaaaattagctgggcgtggtggcatgtgcttgtagtcccagctgcttgggaggctgaggcagaagaatcacttgaacccaggaggtggaggttgcagtgagccgagattgtgtcactgcactccagcctgggtgacagagcgagacttcatcttgtggggctggggggaggctctgtatagctcctgtacatgggagacatctacccttaggctcaagagacctcaatattggttgctggatgacaacatttgccttccaggtttctgctcaggttcttataattcattcttatagggatttaaacttaagtttctaaggcccttaggaattttgaacctgaaatctggattattgagcttgaaatgtattacagaaaacatttgatattcagtttttaatttaagaattattaaaagttaaattcttaatgatacacagtattgtttctttctcttctcagggtttatctctgcactgagcatttatggtggtagctttccaaaattatatagatacctcttacacaatctcaagctcttacagcaagcttgtccagcctgtggctcaacacaagtttgtaaactttcttaaaacattgtgagtttttttattttttattttttttaagctcatcaactatcattagtgtattttatgtgtggcccaagacagttcttcca

SEQ ID NO: 5846 - DNA, 2300 bp, Homo sapien
attaaggaaagctaagaatagagagtttttaagtacaaaatcaaaaaattcagacttaattttctctaccactatcctggctcagagctttgttgccttatgtgtgctaatttgtgggtctctgtcgattatctcttttttttttttttttctgagacggagtcttgctcttgttgctcaggctggagtgcaatggcccgatctcagctcactgcaacctttgacacctgggttcaagcagttctcctgcctcagcctcccgagtagctgggattacaggtgcctgccaccacgtctggctaattttttgtatttttagtagagatggggttttaccatgttggccaggctagtctcaaactgcagacctcaggtgatttgcccgcctcagcctcccaaagtgctgagattacaggcatgagccaccatgcctggcctcttctttttccctcagcgcctttattaatgaagttacagtcggttgtagtggctcacgcttgtaatctcagcactttgggaggcccaggtgggcagatcacaaggtcgagttcgagaccagtctggccaacatggtgaaaccccatcttcacgaataatagaaaaattagctgggcatggtggcatgcgcctgtagtcccagctactggggaggctcaggtgggagaattgcttgaacctgtgaggcggaggttgtagtgagccaagatcctgccactgcactccagcctgggtgatggggtgagactccatctcaaaaaaaaaaaaaaaaaaaaagaagttacaaggccctgaaggctatgcaatgttttcttcatacgaaaagcatggtacttttgaccttgacttcccaacaattagtactcagtagacggttaagattgactcttccactgatactaaaatttatatttcttatttcaattgagattttacatttaacattacgtttaggttactatcctatatgaagtggtttggtgaagggtcttgcttttatttgaatttttatgtttaaggtttgttctcattctgttctttgtttctgtggttatactgtgaaaactagttgcatttattcttctcacttgtcagaaggcttttgtaatcaaaactatttttgtgcttttttattttattttttgcagctgacagtgaagatagtactgtgtccatccagataaaattagaaaatgaaggcagtgatgaagatattgaaactgatgtactctatagtccacagatggctctaaagctagcattaacagaatggttgcaagagtttggtgtgcctcatcaatacagcagtgagtttggccattctttgttaagggggttagatcacatagttgagtcacaaagtaaagaacactgtctcccgggtgtggtggctcacacctgtaatctcagcactttgggaggccgaggcaggcggatcacctgaggtcaggagttcgagaccagcctggccaacatagtgaaaccttgtccctactaaaaatacaaagattagccgggcgtggtggcatgcgcctgtcgtcccacctacttgggaggctgaggcaggacagtcgcctcaacctgggaggcagaggttgcagtgagccaagattgagccactgtactccagcctgggtgacagagcgagactctgtctcaaaaaaaagaacactgtcatgtgccttaccttatgcccactaagcaaagtgaaattaaatgaaattgggggatctagagaataaggatttttaaatcttacttttggtcttaaatattagcttttattttgatggaatgctaatttctcttaaaaacatattttttgaagtaatttaagggtttttagacacaaattttcaaaagagaatgtaatagtagatgttggcatgtttacctcccaacgcccttccattcctgcatccctagtagtatagagaaatctcatttttcttagaggtcaaattaatttggatctaaaattgaggttccacttaacaaatatgataaagcatctttctgaatctaatgtgttctatctctaattctgattatctgtgtgaccattttatttatacatttatttatttttgtaggtaggcaagttgcacacagtggagctaaagcaagtgtagttgatgggactcctttagttgcagcaccctctttaaatgccacaaccgtagtaacaacagtttatcaggagcccattatgagccagggagcagccttgagtggtgagcctactactctgaccaaggaagaagaaaagaaacagcctgatgaagaacccatggacatggtgg

SEQ ID NO: 5847 - DNA, 2300 bp, Homo sapien
ggtgatccatctgcctcggcctcccaaagtgctgggattacaggtgtgagccaccacgcccggcctatttttatttttttataaagactgggtctggcaatattgcccaggctggttgcaaacaccaacactgcgcccagccatctgggcctgataatttaaaaggactctcattcctcagataaaagttcttttcggccaggtgaggtggcacgtgtctgtaatcccagcactttgggaggctgagactggaggatcacctgagcccaagagtttgagaccagcttgggcaagatgttgagacccccgtctctaccaaaaatgaacaaattaaaagagtgtggtggcgggcactcgcctatagtcccagctactcgggatggctaaggcgggaagatcccttgagagcccaggaattcgatacttaagctatgattgcactagcctgcgtggcaaaatgagacctcttctcttacaaaaaaaaaaaaaaaaaaaaaattgtgttctcaaccccaacggaccacaatatccagtaaagctgctatggcccctaactctcagcacaggaggtcccttaagaaaatgcttgtccggccgggcgcggtggctcacacctgtaatcccagcactttgggaggccgaggcaggtggatcacctgaggtcaggagttcaagactagcctagtcaacgtggcgaaaccccgtctctattaaaaacacaaaattagccgggtgtggtggcgggtgcctgtagtctcagctactcgagaggttgaggcaggagaatagcctgagcccaggaggtgaaggctgcagtgagccgagattgcgccactgcgctcctgcgctccagcctgggcgacagagtgaaactctgtctcaaaaaaaaaaaaaaagtttgctcctaacccccatctcaacaatccaggactgaaaagaagagggaccatgaaagtccctgaaactacaagttgggctacggctaaagaaggtaaatatcagactgaagtgtaagatggacattactaagtcttaatcatcatttcatgtttatacctcacaggttgagatagatttctcaagcatcataaatgtaaagtgcattagggtaggtctacaagagagctctgagaacatacagcaaggagacccaaacccatctagggctcagggaaggcttcccaaggaagcgatgcccatgccgaggccgaagggatctcatgccccactgcacacaccgcgcgctccccattcccaaacaaggcaggcttttcatgcctccctacctttggactctgttgttcgttccactttcctggagtgctgtcttccctccccttctgctcagtcaggctaacttcacatcctttataatccagctgaaaagtgaagccatgcccacggcctctccccaaaggaggagtgagtatcacctgttctgagctccgaagttcttggggacaccttgtgggaactgcgtgtgtggtggcttgtctccaccaccgtactgtgagctcatagtgttctagagcccagcacgaggcaagctctatagatgtctactgaatgaaggaatgaacgaatgattacattttaaatgggattaggggaaaatgattcaaggcagaggggtgagctgagctccttggaatggtgtctttaccgaaccaagcctgggttaggcagatgtaatgagcccacctattacaagaatctccatagaaagtaggtcagttctttcctatctctttaagaacgagaggccgcggctccgcgcctgcgcactgagagaataaacacctctccttttcaccttccccccttctccctattgccccaaccggcggcagcctcctcccatactcccctccttcggggcgggtaatggtccgtccgtcccagggtgccaggcttgtttcggagggtggcaagcagaaatggtacattccactgccttcattaccttctgcttttcgcgtctcctgttctatttccccctacctaaagaagcttaataggctagccccaaagaaggcgggggagccgggcggaggggaccggtctgagccggtctgcagcgcaagcgcagtgcggataaacaggaagcgggcggtggaggcagcagcagagggagagctcggggcttggaggggaaacagcggaagacctaagattatcgggagggcagcagaggcagagaacgaggacaggacccttggccgtcttcttccagggaacgagaggtcacagcctcgctctccgcttaggcttctggcgccccagcttaaagccgaggctgc

SEQ ID NO: 5848 - DNA, 2300 bp, Homo sapien
gaattgcctgctctagggttcagtaagagcagaaaactcctagctcaccctccatcctctgctgcatttattggggtggagtggggaacagggagttggacctagataaactgggacagctgggctgagcttgttctcattcaatctggaaaaggtgaagttgattgagctctaacttgccattccttttagatgggaaagggggaagagagggcatctggaaatcccaggagtcttgggctgaaggcagccattctgttctcacctttagaggagacagaggcttagaagcaggtagggggctggggtggggggcaggagagccacccccgagtcgggcaactacaccattggaggccccaggcgcaatccagctttgggaaactagagtccaggctaatggagccctgggccagaggccaggaatgccatcgatccccctgcctggcccactgcctccctcccacctctccatggctcctggggtgggagggaggtaaggatgtgttgaaggagaggaggtggttactcacccagtcacctcctgagaacagggcctgatctggagggtgaagcctggattgggagggtggggtatatggagggggagtaacctttaactaaaggaagttggacccctccaggaatggactgaggccaactttagtcactgtgtcagatccagtgggatctgatccaggaatctggatgcagtgcagctgggagacacagacacacacacacacacacacacacacacacacacacacacacacagtaacactgagggtcctctgggggtgcaattagagctgtagagcatgtgcagaaataagggagaagaggggaaggggagccatgatcagtgggccatggatagccccacaatacaccagaatactcgcctccaagatctcttattgccacaaagtttactattatttcaccctcaaagagcaagccatactggaagagactgtgaaggggccacagtttagggtagatgagttagctgatgaggaaccctgccctttggcagaaagattctgggcaccttggaatgaggaggggttacaggaaagaaaagtgggtgtacccaggaaaaatgaagcctctgtgggtgaggtattgaggtacagccttagatatctgggtgccatggggacccaggtcacagtatgatatggatatgtgtcatgacaaccttgatatgtctcataatgttataaggtcacaatgtcatagtgttctttgtagactcacatgtcatgatgtcccagaggcattgtgtgttcttgtgtggtttgatcatgctgtgtgtgagatggcctatatgggtctccatgtgtatgcatcctgttttacttaggtcacatttgtatatgtttgtgttaaggagttagcaggtcattgtgtgtgtgtgtgtgagcatgcatattacgccatcaggtgtgagttactggatatcaagctgtcactggcacccatcactgtgatgtattgttctacatgtcactatacacgcctgtcactgtaggtgtgtgtatgagagaggtgttcttacccaggcaatccttgggttggacatcatcctgagaggtccagccatggcacttgagccaagggtactaggtcagcaaagacactgaggccactgccacctcatccttgccgcctcgctgtcaccggccacgtcccattaaaccaagtgcctgagcctcacctctatggactcactgggctcccctaacccgattccaaccacccttgccattcctttcctccccttaattcctcccccagcccggtccccagatggggttgatttgtgactggcggggaggggacagggaacagagggacaatgggagttaatgtgccttcctggggtcttctctcttcccaggccaccctccagggcccactaaaaaagcgctgaagcagcgattcctcaagctgctgccgtgctgcgggccccaagccctgccctcagtcagtgaaagcaagtgcctctcatgtgcttccgggggcggggctcgatgtgtgcgtgcgtgtctgtgcatgagtgtgtgcgcgtgtgccccaggcctgcgagtgtgcgcatgctccaggcctgcatgtgtgggggggcgtgccccaggcctgcgtgtgtgggggtggggcctgccccaggcctgtgcgtgtgtatgtgtgtgcatgtgcgcgcgagcgtgccccaggccggcgtgtgtgtgtgggggggcgtgccctacccctgcatgtgtgtggagggcgtgccccaggcccgcgcgcgtgtgtgt

SEQ ID NO: 5849 - DNA, 2300 bp, Homo sapien
gagatgcctaagctgaagcatgaaggggagtcgttgtccgcggtgctgaagcgcgcgccaggcttcgcctccccttccctgcagttgggattcctgggatcggatttagggtagtctgcagctcccgtcttcccggcccatcaggcttgcagggaagcagctggaaagttacacctcagggcatcctgggtacctccgaacattttacttccccactcccaccccaagctcaaaagggagctgggagagactctttaggaaaacaaaacaaaacaaaaaacagtccgagccccgcccggacccctgtctaatccctcaggtcttcccagcccggcggggccgctgggcagtgcggttccgaggggaaaggccgcgtttagcagcggccctgtctgagcggaagagagaaaggccaagagaagatgcggagagggttggagcctggctggctagccctgagctcggtcccccgactgggatctcagtggagtccctccggccctgagtattgttgccggggcgggggcgcccccgtgtggctgcgaggagccatgcgcacggagctgctttgcggtggggatagtcgccgtcaagtggacaagatttgcccagagttaggaggtcattctcaccacttaaatgtagggttttcaaccaatcatgcgggatcccagtcgaaagagcgggactatatctctcccgtaggctttcccaggaattttaaggcgttagagagtcctggaagtgtttacttggggtctaacctgatagagatgagtccggagtccaggaaaggggcgcagcgggaccgaagtggggggggggtgcggggggggctcttctcgaagcattcggctgtagccagcgtatggtggtagtctgtgaacctgccgcaccgagacaaacacaaatagaaacagttatgagagcaaggaatttggagccaggagacagaaggcagtggggcacaactctgctgcctcttctttgccaccccaatacactggcctctttctccttcctcctggctttcttccattggcccaggaagtgtggggagttgccatgacaactctgtcctcttaccccttcggctctttatgccaaaatggtgggggcggggtgcagggtgcggggaggagtgcgacaggcggagaaaggggggctgaaagggggcaataaaagatacggttcattccccatccagctcttttctcaaaacccacatgtgcctgcctggcctccccgccagaacccagaaaaatgctccctgagaaggctgagtccgcgccgcccctccccgccaccccccccccccgtccaggaactttgggggcggctgcttcacatgatggggccagggtgagctcctctcgtgcggccaggagaacatgggaaggctccagggtttcgatcctatgcctgccgggccggccctcccgcgccgcccacgcgggcctacccgggtgagggcggagaccggaccgccccggggcctgggggtggagcttagacgccgagctcgccgccaaaccatgaaccgatgcccccgcaggtgccggagcccgctggggcaggcagcgcgatccctctaccagctggtgactgggtcgctgtccccaggtatgatgaggaagggaagggaggggcaggatccttcaaaaagtgagcgaagtgggttaggagctccgcagaggtagggagggaagggcccctcaaatagatggagggagcaacatccctccaaggaaagggcttccaagacgagatcctggacagaagcggagcaggggatgggcctccttactgagcaggaggaagacagcgctcttcaaagaggaaaggagaggggcatcaaggtccctcacaatggtggagggggcggggcttctcaccgaaggcagaggagggggccttaactgaggggcagggcgcctcccagggatgaaaggaggaggcctgcagcagagcagggaaaaagttcagtcctttcctgcatttcttggctgaaggggtcttaagatgaagggttcagtgtccagaaggaaaaaaccctgagatgggcctagaccaacatgaactcagctagcaagttcatacatgacatgggactgatagacttgtgtggcttaaggattgtatgtctctgttttctctctctctgggagtgtgtattaatgggattgtgcattactaagttgtgcatcactgggctatgtatggctgagtctgtgtctccctggggttgtgatcactgggattctgtgacactgagactgtgtgtacctggagttctgtac

SEQ ID NO: 5850 - DNA, 2300 bp, Homo sapien
gaccatgccagatgtgcctcagagctggatggaatccaaaggacccactgtccagctcttccatgaattctgttcccatcaccagcttaggattcttgagagtagtaagggcctaggggccttcaatagtatcacattagtcagtgtttgcttccagctttaatgggttctcacccttagtgaaaccatcccttccccacttggctatttgaatgagattgggtgggggaagcatttgtatttggagatgccctgccccagttcagtcaggaatggaagtgtaccagctatgtgacttttgttctcttggcctcacctttctcatctgtaaaagggaatgttacttcctgcctgcctgcctacctcccaaggaaaatggaaaggtcaaatgttgacaagtatcaagaattgtggtccgggtctacagcagcctagctgtagatagctccacacacgacttggaaagtagaaataggactaccaggagctctcctctcgaagggcggcttattttatagcgggagacaaatcgggttgggacgccagtgtcaacgaagactcccgggcgggcgggcggcgctgagctctgagcgctgagagatgcctaagctgaagcatgaaggggagtcgttgtccgcggtgctgaagcgcgcgccaggcttcgcctccccttccctgcagttgggattcctgggatcggatttagggtagtctgcagctcccgtcttcccggcccatcaggcttgcagggaagcagctggaaagttacacctcagggcatcctgggtacctccgaacattttacttccccactcccaccccaagctcaaaagggagctgggagagactctttaggaaaacaaaacaaaacaaaaaacagtccgagccccgcccggacccctgtctaatccctcaggtcttcccagcccggcggggccgctgggcagtgcggttccgaggggaaaggccgcgtttagcagcggccctgtctgagcggaagagagaaaggccaagagaagatgcggagagggttggagcctggctggctagccctgagctcggtcccccgactgggatctcagtggagtccctccggccctgagtattgttgccggggcgggggcgcccccgtgtggctgcgaggagccatgcgcacggagctgctttgcggtggggatagtcgccgtcaagtggacaagatttgcccagagttaggaggtcattctcaccacttaaatgtagggttttcaaccaatcatgcgggatcccagtcgaaagagcgggactatatctctcccgtaggctttcccaggaattttaaggcgttagagagtcctggaagtgtttacttggggtctaacctgatagagatgagtccggagtccaggaaaggggcgcagcgggaccgaagtggggggggggtgcggggggggctcttctcgaagcattcggctgtagccagcgtatggtggtagtctgtgaacctgccgcaccgagacaaacacaaatagaaacagttatgagagcaaggaatttggagccaggagacagaaggcagtggggcacaactctgctgcctcttctttgccaccccaatacactggcctctttctccttcctcctggctttcttccattggcccaggaagtgtggggagttgccatgacaactctgtcctcttaccccttcggctctttatgccaaaatggtgggggcggggtgcagggtgcggggaggagtgcgacaggcggagaaaggggggctgaaagggggcaataaaagatacggttcattccccatccagctcttttctcaaaacccacatgtgcctgcctggcctccccgccagaacccagaaaaatgctccctgagaaggctgagtccgcgccgcccctccccgccaccccccccccccgtccaggaactttgggggcggctgcttcacatgatggggccagggtgagctcctctcgtgcggccaggagaacatgggaaggctccagggtttcgatcctatgcctgccgggccggccctcccgcgccgcccacgcgggcctacccgggtgagggcggagaccggaccgccccggggcctgggggtggagcttagacgccgagctcgccgccaaaccatgaaccgatgcccccgcaggtgccggagcccgctggggcaggcagcgcgatccctctaccagctggtgactgggtcgctgtccccaggtatgatgaggaagggaagggaggggcaggatccttcaaaaagtgagcgaagtgggttaggagctccgcagaggtaggga

SEQ ID NO: 5851 - DNA, 2300 bp, Homo sapien
agctgctgcttcgagatcctccctttttaaagcactttctaaagccctcaggatggcgggagcaaacagcactggtatattctaggagtaagtgcaggaattcagcagtgagagcatgtctgggaccacctggactgccatccatttaacctcaaatctctttgggatactcgccctccctgggaaccagagttctggctctaacattgagcagctatgcactagttccagagaagccactaacaggctgccatgtgtagatgtaggttcttaagagatcacaggctgggtcatctgatcactggatggatagctcagcctggggcatttagtgttttccctggtgataaatccccaaggcagctggatttggagctggtggcaagttgaaattattaaaaattgatttgtgtgggactgtctttagtgttgctttttttttccttaatctctgttgcccagactcattcctcaaagatagaggtaaggtaatctcctaggtgctgctgccatctggctaggggacccctacctgcccttgtgaactctcctccttcctctgagtctcctggccctagtagaggtcagttgggttcggagagctgtaacctctcttgtcctctgggtagaaggagggagaagagagttagttcccttatctccaaacttagtggtattgaggaggcaagccaacccatttggccacttacggattcctgccagcctttcctccaagtgaatgaggacaggtctagggcatggggcactaagcagagggctccttgccctccattgtaaaggcccttctcttgaccagtttattcacatatacctatcccagaactccaaacgagagtgcccattctctcctggaaatcaaccttaacaggagctgcccaagcactttctatgcccagcctctataccaggtctgtggagcctcctccagagccaagggagatccaagcgcagggcattgctcctaaagacaatcttaccctcagccacttgtccccctcttaggcctgaactcccgccacaattcctgctgggttgattaaatcaagtggttggaaattaaagccaattgaagagattaagtgtgcttgagtcactttaaagtttttggtcttaacaggtcactcctttggacccaccagacaaggtcccctcatcctcatagcaacgggttggggggcttttgggtgtggagcccaggaagcatcctgaggaaggtcagacctgtgacgctcaaaacactcaggatccattcctgggagatgaggcagcccagcttccgtgctagccctgcctttggaaaggagctaatcttaaggaaggggtttcataacaagggcatttctttcctactctgtatcctgacttggatccccaaacctgtcagttgctccccatatctgctggaaaacaaggaatctaggacaggacaggtgacaaaagagaagggcagaaaagttgctgcaggggaggaacaaaagagcaaggatgtcttgagaaactgacctggttcactagtttttttatcttcctagtcggcctatggggttcattagatcagtgaaggaggcaccctgagagtgaataggttccagagacggggtcctggagtgggtgagagttggggtccttctggaacttgagagaagatgaaacagtagtccattggcccacgatgagcctgctaatattagaggctgggttgactcttcctttgcatccctaacctgctttaagcacggtggggactgtctgggaccacgagagacgcatacacgggaggaggaacaacagagaaaatacaggctgacatggagacaaacggagcggggactcagatatgataccccaggctctgcctcagccagaactgtgttgacgaagggggacggggtgcctgagaattgggggcggggtttcctcctctcagtggggctcttctgtcccgcgctctcctcctcccccaccccccccccccgccaagccccgtgacttctgctttaggggcagattgctggggagctagtctccttccccgcactttgcagttcaccctttcaccgggtgcctcccccgggctgcaaagggtggggggcgggggtagggggagccaatcccggcagcgccaaagaggggaggaggcggtgacagccgcggggagggggcgggaggagagaggcagctcggctcggctccgcgctcagctccgctctgcctccggctctgcgctcacctgctgcctagtgttccctctcctgctccaggacctccgggtagacctc

SEQ ID NO: 5852 - DNA, 2300 bp, Homo sapien
acgcctagcccacactacccattttaataaactttctgttttggaataattttagatttatagaaaaagtaaaaagataatccacagagttcctggataccctcagcctaatttccgtcattttatgtcaccaaggtacatgtatcaacactaagtaactggcattattattaactaaattccgtattttaattagattttaccagtttttccattaatgtcctcttgctgtgccagggtccattccaggatatgcatttaattgtcatatctccccagtgatttgtgacaatttctcaactcttgtttttcatgacttttagagtcttaagaaagtactggctgggcacggtggctcacacctgtaatcccaatactttgggagaccaaggtgagtggatcacctgaaaggtcaggagtttgagaacagcttggccaatgtggtgaaaccccatctctattaaaaatacaaaattagctggtcatggtggcgggggcctgtaatcccagcttcttgggaagctgaggcagaagaattgcttaaacccggaaggtggaggttgcagggagctgagatcgcaccattgcactccagcctgggcaacaagagcaaaactccgtctcaaaaaaaaaaaaggaagaaagaaagaaactaccagtcagcgtcaggagcaatggctcatgcctgtaatcccagcattttaggaggtgaggagggaggactgcctgagctcaggagtttgagaccagcctgggcaatctggcaaaaccccatctctacaaaaaatacaaaaattagccagacatggtggcacatgcctgtagtcccagctacttgggaggctgaagtgggaggattgcttgagccaaggagatggaggctgtagtgagccatgtttgtgccactgcactccagcctggatgacaaagtgagaccctgtctcaaaaaaaaaaaaaaaaaaaataccagtcaggtatcctgtagaatgtcccctgtctgatatttttcttgtgattagattgagatattaagtgcccttctcatcagatcataccaagggttacatggtatctacatgatatcactggcaatctacagcttcatcatttggttaaggtagtgtttaccaggcttctttgctataaagttactgtgtttcccatttgctactctagtctttggcaataaatcactaaatctagcccaccctcaggaatgagaaataaacttcatttcctatagggagaagtatctacatatattatttgaaattgttctatgagaaagatttgttggccagccgctgtggctcatgtctataatcccagcactttgggaggtggagacctgtggattgcttgagcccaggcttgagcctgggcgacatggcaaaaccgtgtttctaccaacaaaatacaaaaataattagccgggcatgctggcacatgcctgtagtcccagctgctagggaggcttaggtgggaggatcgcttgagcctgggaggttaaggatgcagtgagccatgattgtgccactgcattccagacttggtaacagagtgacaccctgtctaaaatataaatataaataaatatatatatatatatgaaaaaaagagatttgtctctctctatgaatcatttatattcatatggactcatgtaaaaccctgatctaaaacctgtgttctttttgctacaccaggcaagaaatgacaaagacctataccaaggcactggtttcagggaaatttatttcagatttcagagatttttaagaggtagatttgataagactaggtaattttggatgtgactaagtgatggagaagggagtgttttaaaatgacactcagcttttgggttgaatggccggatataaaattttggtttgaaactatttactaacaagtatgaagattgcttctatttagcctatatgttgttggcccagctttactgagtgccctgttctcccaagtcagacaagacagcttttctttctgattgaagcaccagggccccctagtggacagccctctgggttccctttctcatctgaaggactcaatatttttgtttggctttgggttttttccgttagttcatttgcagagcagagatgcttgattctattttctgtctaatagtaaatccttcccacttcagagttatcaattcacccccatttgtgactacctcatgttcaataagaggaagttacccagtcacaatcggtcccatgctctagtactctaaaccagagggtacttgatccttattttttaacagatgtatc

SEQ ID NO: 5853 - DNA, 2300 bp, Homo sapien
ttttgattttctgtcagtcttcaggaaagcccggaatagacagggtcttgcctgcttccacgctgcctgtgtagcagtttgcttctgttgggctgaacccattcccagcagagcacagatttttcttcttgctcctaaaccctcatgtggagcctgcacatgaatcctgcagcctctgtgaaaaccttaaactatcacaaacagagccagctccttgggcagatgggacggaagagggaataggaaaacagattactctcattcctctcagcatctgccttaagtccctgcgtcttaatttttattgtttttgcttggaaatttttgaccagttagagatacactgggaaattacactaaagaaaaatctcatggcttaagtagggtttgacataaggctctaggctcatcctattagctgtccagctgatccttgaaagtagttctcaaagtccaaggatttgtacgaagtgtgatagattacagtttcttaaatatagctctcgcttcttactttttctctatatttttattaggatcaatatgccaatgcatttttgcatgatgacaacatgaattttcgagtaaacttacatagaatggtaggtgtttcttttgcttcttgttttttcttagaggaaattttttgtatgtcggcagggttgggatgaaattgatcttactagaacaaatgtgggtggaaagttgtgccaaagggctttgcatgacggctgttcaacagacccatgcttgttgttgggatttttgtgtgtcatggagctgtttcttaatcaagagttttggaagattcacaagcgtggcaatgatactggatttctttttttttttttttctttttttgagggagagtctctctctctctctctcccccccaggctggagtgcaatggtgtgatctctgctcactgcaacctctgcctcttgggctcaagcagttcttctgcctcagcctcctgagtagctgggattacaggtggctgccaccacgctcggctaatttttgtattttcgttacagatggggtttcaccacgttggccaggctggtctccagctcctgacctcagatgatctgcccgccttggcctgccaaagtgctgagattacaggtgtgagccaccgcgcctggcctgatactggatttcaataatataggtttcagcaaggaaatggttctaagccttttgttttcaaaatgtagtataatttttgagtggctaagactagctgctgctcagatttgttcatctgagaagtgggcaaatagaatatggaggatcagggaatttcttaaagcttggaggtatgttaaaaaatatcacattgagggccgggcttggtggctcatacctgtaatcccaacactttgggaggccaaggcgggatcacaaggtcaggagattgagaccaccctggctaacaggatgaaaccccgtttctactaaaagtacaaaaaattagccgggtgtggtggcaggcacctgtagtcccagctactcaagaggctgagtcaggagaatggcgcgaatccaggagacagagcttgcagtgagccgagatcgtgccacttcactccagcctgggcaacagagcgagactccgtctcaaaaaaaaaaaaaaaattacattgaggtttagatgtaaaactttctttatttttttgcaactactactgttgctgcttctataggtggcaccatcacttcctcttttttttattattattatttatcgtcaaagaaaaacaccagtgtacctcttttgtcgttagtaatgccacttatataactaaaagcaaagtaaaaccaacagttttcccattgtagtattctctagtgccctttgaggttgtgaattgtaattttgtaacaggcgtgcattgataactgaagcattcacaagtcctcccttccccgcctcatcccatgctacctcattcctctcccaccatgtgaaaaagagaaagaaaaggaagtatccctgtaatagtgattttatttgcacaaggaacatgatgatgggccattggatgtcagtgccggtgtctactaatttcctttcttcatttttttggtgtgaagcctatgagacacaggaagaaggcagcagacaagaatcttccctgccgtcctttagtatgtgcagtactgggtgagtgagtatcatcaacattgacattgttctgtgacagcgataggctttcatgatgaagatgaagagtagaacctgtttgatgtgcttcttccgcaaataaattattagttgtgttttttccctggc

SEQ ID NO: 5854 - DNA, 2300 bp, Homo sapien
agggggcagggtaaggagtgtgagtcatctccaatgataggtaaggttacacaagtcacgtgtctgccggacagggggcccttccctatttggtagccgaagcagagagagaggggacagcttacgtcattatttcttctgtgcatttctcagaaagatcaaagactttaatacttttactagttctgctactgctatctaggtacagagcggaacaggaaagtgaaccaggagcgtgaccgctgaagcacagcatctcggagaggtttaagcctccggttggctgcgggtaggcctggctgatgtcaggcttccaacaagaggtggtgaagcagagtgttctctaacttcctcagggaaaggcccgtctgctaagtaacaggtgccttcccaggcactggcgctatggctagtccaaggtctgctaagtaacgggtgccttcttaggcactggcattaccgctagaccaaggagtcctctagtggccctgtctgggcgtgacagagggctcacactcttgccttctggtcacttctcaccgtgtcccttcagctcctaactctgtatggcctggttttcctaaattataattgtaaaatataagttattaataaaagtaatgctacaaactaatgattactaatattcatatataatcacatctatattctatttctaatatagctattcttattttaattattttctttattatactggaacagcttgtgtcttcggtctcttgactcggcacctgggtggcttgccgcccacagaactcttctccacttcttttttgttttgagacggagtctcgctctgtcgcccaggttggagtgcgatggcgcgatcttggctcactgcaaccttcgcctcccaggttcaagcgattctcctgcctcagcctcccgagtagctgggattacagaggactgccaacacgcccggccattttttgtatttttagtagagatggggtttcaccatgttggccaggctggtctcgaactcctgacctcaggtgatccacccgcctttgccttccaaagtgttgggattacaggtgtgagccaccgcgcctggcttattttattttttttacttgttttttctttttaatagtattcttgctgttatagcacatctttttaaaccttccatttgtgtataaaaaaacagagactcaggctgggtgcggtggctcacgcctgtaatcccagcattttgggaggcagaggcgggtggatcacctgaggccaggagcttgagaccagcctggcaacatggtgaaaccttgtctctactaaaaaatacaaaaattagccgggcgtggtggtacactcctgtaatcccagctactggggaggctgaggcaggagactctcttgaacccgggaggcagaggttgcagtgagccgagatcgcaccactgcactccagcctgggcaatagagtgagacaccatctcgaaaaaaaaaaaaaaaaagaaaacaaagactcagaggcagggagtggtggcacgtgcctgtaatcccagctaccagaggcagaggcaggaggactgcttgagcctaggaggtggaggctgcactgagctgtaattgtgccactgcggcactccagcctgggcaagggcaagatcctgtctcaaaaaaaaaaaaaaggaaaagaaaagaaaatagatttctggccaagttaatagagctttacacgctactttgcacttatcaggcacacacgtatttgttgaaagaatgagtttgttttcaatctttcacgtacaaagttgtaatacacatttggaaaatatatctttccaaacttcgccagtatttctagaggatacatgtattcctagaagtaaaattgctgaggtcaaagagtcggccatgtttcggaaaactgctattgcgacccagtaggccctcaatagacaagtccactgcgaatttatttctcgcgatgcctttcgggagttgtagtctttgcgatgcttgctgggaatcgtggtctgagccggtctcaggaagcgggcgtggactaacccattgcgcgccgggctttaggacccggcggggcgcggggacacgggaagggtcggggaggtcgggagcgcgcccgtgagcccggagcagcggcagcgtcggtggcgtcgagagcgagcgggcccgggaacggcgcgggtggtagaggaggagccgcgggctcggtaagcggcggcggccaggcccggcccggtcctcgaacctgaccaaccctgcgggtcctgccatactaggccttggccccgaggcggttc

SEQ ID NO: 5855 - DNA, 2300 bp, Homo sapien
gtaggcaaaagaaaaaaataaaggggctcaaagtggaatcaggatataggaggaagagcacatttaaaggatgatggaggggccgggtacagtggctcacacctgtaattctaacattttgagaggctaaggcgggcagatcacttgaggcctggagttcgagaccagcctggccaaccaacatagcaaaacccgacctctactaaaaatataaaaagtagctgggcatggtggtgcacttctgaaatcccagctactagggagggaggcttaggcaggagaatcgcttgaacctgggacatggagatagcagtgagccgagattgcgccactgcacttcaacctgggcaacggagcaagactctgtctcaataaataaataaataggccaggcacggtggctcatgcctgtaatcccagcactttgggaggccaaggcatgtggatcacgaggtcaagagatcaagaccatcccggccagcaaggtgaaaccctgtctctactgaaaatacaaaaattaggtgggcgtggtggtgggtgcctctaatcccagctactcgggaggctgggcaggagaatcgcttgaacccaggaggcagaggttgcactgagccaagatggtgccacttcactcaaacgtgggcgacagagtgagactctatctcaatcaatcaatcaataaaggatggaggaagatgaaccaaaggcaaataaaactctgaaggcagtgctatctaaaaataaaaataaaaaaataaaataaaataaaaggaaaggaaaaccagccaggaaagatgcagtgcaaaccacaggagggactttcaatgagaaggctgtcaaataaaaatgtccttgaagacctcagcaaaagctacttcagggaagtagtgggttgaggatagaaggaaagaaagtggaggtggcaaatgtagcatccttgcaagaaaattgactgagaaaggaaaaggggagggagtgatggaggtggaagtggggagatgaggatgaaagaacgaattccaagacaggagagatgacagggtatttctatgctgaggacggaatgagggcagtgaaacagaaatggatgcaagttctcaaggaaggtaggggccggggaggagaggcagggctcataaagagggattggccttggagagaggaggaaaactgctcacctgaaaaggcagtcaaggggtggaaggacccctgcatacaaatttgtaggtgttactgaagagtcggtacacaggctcagtgcttctaaattatgtttctctgttttggtttgggtgatgagttgttgatatgataaagtgatttgttgcactgactctggagccagagtgcctgtggttgaaatcccacctccaccacttaatacctgcttgatcttagttaagttacgtaatctctctgtgcttcatcctccttatctgtaaaagggactaggggatagagaaggctgtcacatagtgatatggaagtggttttctttccttccttccttctctctctctctctttctttctttctgtctttttaaaatttttatagagacaaggtctgcctatgttgctcaggctggtctcgaacgcctggcctcaagcaatcctcccacctcagcctcccaaagtgctaagattataggcgtgagccaccgcgcccagccatgtttactatttccactagattgtcatctccatgaggttgaggttttctattttgtttagggctgtctactcagagcctggcacaaagcatgtgctcaacgaaaatttcctgaatgagtaaattggggtgaaattcttgggagaggggctcagggggctggaatccctattcctgcgtgggactccgggccactgggcggcgtcctggggtctggggaagggcctccccctgcgccgagagcgtgcccgggcgggcgcggtccaggcgctgagcccctggggcgctcccgtggctcctcccccggcgggcgtgtagtgtcggcccagcgactgcgggaggcatcccggagccggccgggcggggcggagtcgacgctcggcccggcctctgctcacctcatccacgggagacggaagtcttggccctgctccgctcccccgagaatcgggcctcgccctgctgggcggctggacctgggcaaagcctgggcgcgctcccgcgcagcggcgccatgaagcgctcggggactctgcggctgctctcggacctgagcgccttcggcggcgcggcgcggctccgggagctggtggccggggactcagcggtccgagtccgtggcagtccgg

SEQ ID NO: 5856 - DNA, 2300 bp, Homo sapien
gtttagaagtgcagggttcaacccccccaccccccagcccaccctggtcatcctgtctcagtgggttctgttaggatctcactgttaggatatttggccctatgtgctatgaggatctcttgaggtactgcctgtgaatgcactttggaaagtttaaaggcagtgggggagaagtgggactaccccagagttaagctgtaaatttgggagtcagtgggagtgtcttaagtcctggtgataggctgtatgttgcagggtctggctgaatgttatagatttcagtatgtttgtgaaagctggggtttattctatggccaggctgtgatgaggaatggtacgcaggcttcagagagggtgatttataggttaagtccttgcataataaatgatcggggtgtgtatgtgataggctgtcacaggtttaggggttataacacagttttggtgtgtgtattgaggtcaggatgcgtgtcataggtcccagtgtgtatgacttagactgtgtgtgtgtgtatatatccaggatttgggtatatttaggatttgagatatatcacaggttgatggccagacgcggtggctcacatctgtaatactagcactttgggaggccaaggtgggtggatcacctgaggtcaggcgttcgagaccagcctggccaacatagtgaaacctgtctctactaaaaatacaaaaattagctgggtgtggtggcatgcacctgtaatctcagctactcaggaggctgaggcaggagaatcgcttgaacccaggagctggaggttgcagtgagccgagatcgcgccactgcactccagcctaagcaacagagcgagactccgtcttggaaaaaagatatatcacaggttgaaatgtgtatcaggtagtgatttatgtgaaagtgagatgtgttatttatgtggaagatgttcacagagccaggtgcaatattactgcacagttaactagtgagtatgtcataagaaatcctgtccttggagttatgtgtgaatatagttgggggtaggagacaggaagtagagaaacagacactcaaattgcaaagaaggaaatagaaggttcgtgctcccccttcccgtgtgtgtgtgtgtgtttgtgtgtgtgtgtgtgtactatgtattttccttttcctatttgtccacgagtaaggtctggcccactacccaagttttagaaatattccctcctgctacaacaaaattaccttaggaaaaaaaatagaaatatctgctcccttgggatgccctgctggatgggagaacaggtcctatccactaaccacacgtttttttttctggggtggtggggaggattcagcagcaaactaagctccttctggggacccttggatggccaagttggctttccctagctctgacaatgcctctttccctggcacccacttgtcttcagtggtggtggggaagggggcttcctgttaagggggatctaagtcaaggcttggaatttagctgggttgggggcagggaagcctggagtgtcccccttcctccaatcagtgtttacagtctgatgtcagaatgtgtgtctgtcaaaaataaccccctggagcctctccccccagctgctccaggatttcaccaggggagcccaggctggcagtccgggccagccttcaacctgagcgatcacaggggcgagaaagatttgggggaggtttgggaggtgctttgaagatcttggagtctgcagagaggagcccgccctcctccatctctgccagtggctttggcccacctgctcactcctgagcaccgtgcctggggctcgggggaggcgggctgcatttcgttcctggcccccacaggcctctcctccatccaggtctctcctggcccaatctgatccgtcccctgtctctcccagtctctgtctctcttttgtttttctcagcagtccctccgtcccagcctccctccctcccttgctcttcctctttcctctcagggagggggcggggccggtgggggcagctccaccctccgcccgccctggggcctcattctgagagaggctcggagagagcgagcggggagggagggaggcagggagagaaagggagaaaggcaggcagccggcgggcgctgcgtgtgtgtttgagtgtgcgagtgtgagtgagtgtgagtgccgggtcctgcctctcctggtgcccccagcagaggggcccggtggcctggggagggcgggcgggctgctcggaggcagaggcagcaagaggcggcggcggggagagccgagaaggaggaggaggagagagg

SEQ ID NO: 5857 - DNA, 2300 bp, Homo sapien
cccctgtaatcccagcactttgggaggccgaggcaggcaaatcacgaggtcaagagatcgagaccgtcctggccaacatggtgaaaccctgtctctactaaaaatacaaaaacaaattagctgggtgtggtggtgggcacctgtagtcccacctactcgggaggctgaggcaggagaatcacttgaacctgggaggtggaggttgcagtgagccaagatcgcgccactgcactccagcctggtgacagagtgacactccatctcaaaaaaaaaaaaaaaaaaattagctgggcatggcagtgtgtacctgtagtacccagctactctggaggctgaggcagatggatcctttgagcttgagagatcacagtgagctatgctatgatctgccacggcactcttgctcaccgcactccacactgcagccctgggtgacagagtaaaaccctattgtctaacaaaaaaaaaaaaaagaaagaacatctaagaaaaggtccagaaaaggtcctctcttttcatgaacatgtgtggggatgtatagtgatgcaatatttctaaagggcaattttctactgtatttcaaatacatgcattgtttaactcggcacttgaatttcatggaaactattccacagaaagattgcacaaaagtgcaaaggtacatgtacatgacatatgcaagggtgttcatcataataatatgtaatagtgagaaactgtaaacaacttaaatattatttatttttgagaagaagtctcactctgtcacccaagttggagtgctgtggcatgatcttggctcactacaacctccacctcctgggttcaagcaatcctcctgcctcggcctcccgagtagctgggaccacagatgtgtgccaccatgtccagctaatttttaaatttttggtagaggtggggttttgccatgttgtccaggctggtctcaaactccttagttcaagtgattcacccacttcagcctcccaaagtgctgggactacaagtgtgagtcaccgagccacggccagaaacaacttcaatataatttaaataacaatacattcataaaatagaactggtgctaaaggctcagtaaatatttagctagtgagtggattaacatattgttacataaaaaaagcaaatcaccaatttgtgcccctatatatttttccattcatagaaaaaagcgtcaatgaatacacactaaaagtaacaaggggtttaaatctgggcagtagaactataatttgcaggcctactactttttttcctctaaacagtcttgtactttttgaaataatttttgtgctttgtaaaaagttatttaaaaatagcaaatatgaagtagcttttaagtggcaaatgaatgaagagtagagacagtgatggaccgtagaaacgcagagcgggatccctcttggctaggacaaccaaagcctttcctagattaaataaggcatgaaatgttttgaggttcaagtattccaggtcgacatataggcaggagaacacctgttgtctttagggaacagcaaggagacctgaaacagcaagaaacaaatttgatagagaaggcaacgtaagtttctgagtagtagcagagagggcggagaacgcgacattttccgattaagtttgcagtactgccgcaatatgggattaggtgaggattagcgcttggagcgcaagtgcccactagggggtggtgtttcaaaacatatacaggcccacttggccccacttggactaaggtgaaaggaacgtacagcaggtagaacgtcaaagaggacgttccaacagttggacaagttaacgacaataaaatacgcaaatgttaactttccccctaactgctgagcgctccctaaatcggtatcccagtgtaacgcaaaactaagccctacaggatgcctgcagctagtgccaaacggtccccacttaaagggactactactcccaggaaccttcgcgcgaggccagggccttcttccagggtgcaagtgggtctcgccgcacggctctctgggattcgtagtcttgcagtgtcattcgggagttgtagttcctttcccacaatcggctgggcgaggcggcgccagcgatcagagcagcgctgggtgttcaggggccaagatggcggcgcgccggggacggagagacggagtcgcgccgcccccgagtgggggccccggtccggaccctggcgggggagcccgcggcagtggttggggaagtcgaagccaagcgccgtatgggactttgggcgctgtgagcggcggcgagcaggtgagagg

SEQ ID NO: 5858 - DNA, 2300 bp, Homo sapien
gagaggtgagctggggctggactctgaaatcttcaagcaggaggtttacatgggaggttctagctcaaattcttggcatggctctgctctcccaggaccttagcttcttcctgggtgcccaacctgaatccttgaagtgtattttttgtctctaagtgggaattaggctgcaggctgccagattatgtcccatgtaagaattcctttcctagcttagactatagtccaaggcctttcccactgtctgggcccctgaactacatgtccagaggattctgatctctgtttttcagctcatttctagcctagccgatggttgtctgctgagcatcccacatcttatctgagggtaggggaatgtgtgaaacccaagcttgagtcaagtctgacaggtctctgttgacaccaagagctggtggatggtagctgagattggaatccatgccttctggtattcagatccttctcgctgccccattagctgagttgaacctgggagactgattctctcgatatccagtccttagtggcatagtaggtcattagggatgttggtaggaccttctggttgtttttctggagcagagcaggttatctctggaggaccagaatgaagtgtcgctgctcacggctctgacggagatcttggacaatgcagattctgagaacctttctccatttgacagcattcctgattcggagctgcttgtgtcaccccgggagggctcctctgtgagtgtgggaccaggggaaggggattagtacaaagtttagacccatgcctgtggacctactcatatagctctgaagcatagactgatctcaggtctttctttccctcttagctgcacaagctgcttactctctctcggacacccccagaacgtgacctcatcaccccagttgacccactggggcccagtacaggcagcagtagagggagtggggtaagcctgacctagagggtttcagaaactcccaggtgggaggaggagtgtgtggggacaggtctggaaaatactttcccaaagaaaactcctcctgagacctctcttctctcctgcaggttgaaatgtctcttccagatccctcttgggacttctccccaccctctttcttagagacctcttcccccaagcttcctagctggagacccccaagatcaagaccacgctggggccaatccccacctccccagcagcgcagtgatggagaagaagaggaggaggtggccagcttcagtggccagattcttgccggggagcttgacaactgtgtgagcagtatcccggacttccccatgcatttggcctgccctgaggaggaagataaagcaacagcagcagagatggcagtgccagcagctggtgatgagagcatctcctccctgagtgagctggtgcgggccatgcacccatactgcctgcccaacctcacccacctggcatcacttgaggatgagcttcaggagcagccagatgatttgacactgcctgagggctgcgtagtgctggagattgtggggcaggcagccacagctggcgatgacctggagatcccagttgtggtgcgacaggtctctcctggaccccggcctgtgctcctggatgactcgctagagactagttctgccttgcagctgcttatgcctacactggagtcagagacagaggctgctgtgcccaaggtaaccctctgctctgagaaagaggggttgtcattgaactcagaggagaagctggactcagcctgcttattgaagcccagggaggtcgtggagccggtggtgcccaaggagcctcagaacccacctgccaatgcagcaccaggttcccagagagctcgaaagggcaggaagaagaagagcaaggagcagccagcagcctgtgtggaaggctatgccaggaggctgaggtcatcttctcgcgggcagtctactgtaggtacagaagtgacctctcaggtagacaacttgcagaaacagcctcaggaagaacttcaaaaagagtctgggcctctccagggtaaggggaagccccgggcttgggctcgggcctgggcagctgccttggagaattctagccctaagaacttggagagaagtgctggacaaagtagtcctgctaaagaaggccctctagacctctacccaaagctggctgacactatccaaaccaatcctataccaacccatctctcattggtcgactctgcccaagccagccccatgccagttgactctgttgaagctgatcccactgcagttggccctgttctagctggccctgtacctgttgacc

SEQ ID NO: 5859 - DNA, 2300 bp, Homo sapien
cagcagctggtgatgagagcatctcctccctgagtgagctggtgcgggccatgcacccatactgcctgcccaacctcacccacctggcatcacttgaggatgagcttcaggagcagccagatgatttgacactgcctgagggctgcgtagtgctggagattgtggggcaggcagccacagctggcgatgacctggagatcccagttgtggtgcgacaggtctctcctggaccccggcctgtgctcctggatgactcgctagagactagttctgccttgcagctgcttatgcctacactggagtcagagacagaggctgctgtgcccaaggtaaccctctgctctgagaaagaggggttgtcattgaactcagaggagaagctggactcagcctgcttattgaagcccagggaggtcgtggagccggtggtgcccaaggagcctcagaacccacctgccaatgcagcaccaggttcccagagagctcgaaagggcaggaagaagaagagcaaggagcagccagcagcctgtgtggaaggctatgccaggaggctgaggtcatcttctcgcgggcagtctactgtaggtacagaagtgacctctcaggtagacaacttgcagaaacagcctcaggaagaacttcaaaaagagtctgggcctctccagggtaaggggaagccccgggcttgggctcgggcctgggcagctgccttggagaattctagccctaagaacttggagagaagtgctggacaaagtagtcctgctaaagaaggccctctagacctctacccaaagctggctgacactatccaaaccaatcctataccaacccatctctcattggtcgactctgcccaagccagccccatgccagttgactctgttgaagctgatcccactgcagttggccctgttctagctggccctgtacctgttgaccctgggttggttgaccttgcttcaaccagctcagaactggttgagcctctcccggctgagccagtgctgatcaacccagtcctggctgactcagcagcagttgaccctgcagtggttcccatctcagataacttgccaccagttgatgctgtcccgtctggcccagcaccagttgatctagcactggttgaccctgttcctaatgacctgactccagttgacccagtgctagttaagtccagaccaactgatcccagacgtggtgcagtgtcatcagccctggggggttcagcaccccagctcctcgtggagtcagagtccttggacccaccaaagaccatcatccctgaagtcaaagaggttgtggattctctgaaaattgaaagtggtaccagtgctacaacccatgaagccagacctcggcctctcagcttatctgagtaccggcgacgaaggcagcaacgccaagcagaaacagaagagagaagtccacagcccccaactgggaagtggcctagccttccagagactcccacagggctggcagacatcccttgtcttgtcatcccaccagccccagccaagaagacagctctgcagagaagccctgaaacaccccttgagatttgccttgtgcctgtaggtcccagccctgcttctcctagtcctgagccacctgtaagcaaacctgtggcctcatctcccactgagcaggtgccatcccaggagatgccactgttggcgagaccttcccctcctgtgcagtctgtgtcccctgctgtgcccacacctccctcgatgtctgctgccctgcctttccctgcaggtgggcttggcatgccccccagtctgcccccacctcccttgcagcctcctagtcttccattgtctatggggccagtactacctgatccgtttactcactatgcccccttgccatcctggccttgttatcctcatgtgtccccttctggctatccttgcctgccccccccaccaacggtgcccctagtgtctggtactcctggtgcctatgccgtgcctcccacttgcagtgtgccttgggcaccccctcctgccccagtctcaccttacagttccacatgtacctatgggcccttgggatggggcccagggcctcaacatgctccattctggtctactgttcccccacctcctttgcctccagcctccattgggagagctgttccccaacctaaaatggagtctaggggcactccagctggccctcctgaaaatgtacttcccttgtcgatggctcctcccctcagtcttgggctacctggccatggagctcctcagacagagcctaccaaggtggaggtcaagccagtgcct

SEQ ID NO: 5860 - DNA, 2300 bp, Homo sapien
ctgaggggatccccagtgtttggaacataagtcactatgcagactaataaacatcaactagagagaactcccaactgctgttgtgcgtctttatatggtgctaatgccaaatgtattcacttttcctatctgaacatggtccagggacatgcctctccctggtcaggtgcaaaaatcccactggatttgaaccttggttcctcagatgtattgtctaaaatgagtcatttaggacagtgcttctcaactttaaagggaatttgaatcatctagcgatctttttagaatgtagattctgacaatgggatgatgatactggtccaggaagggattttgataacaaggacctagagaagctcacacttgttccaaagaaaggttttctaaactgcgacaggtgtatacattcatcatgtcagttatgttcatcattttataatagcttgagcacactgcatggcacagcaggtgctcaaatgttttaaataatgcatgcatgtgggtagaacaggaagcgtggggaagagggaactgtggagttttttgtttctgtttttgaatttttttgttttgttttggagatggagtcttgttctgtctcccaggctggagtgcagtggcacgattttggcttactgcaacctctgcctcccgggttcaagtgattctcctgcctcagcttcctgagtagctgggattacaggcacccgccaccatgcctggctaattttttttgtatttttagtagagacagggtttcaccatgttggccagggctgttcttgaactcctgacctcaggtgatccacccaccttagcctcccaaagtgctgagattacaggcatgaaccaccgtgcccagctttgtttttgatttttgagataggatctcactctgtggcccaggctggattgcagtggcaggatcatagctcattgcagctttgacctccctggctcagttgatcctcctgccccagcctcccaagtagctgggaccacaggtgcatgccactacacctggctaattttaaaaattttttgtagagataggggggtttcactgtgttgtccaggctggcctcttaactcctgggctcaagggatcctcccacctaggccttccaaagtgttgagataacagttgtgagccactatgcctggccaattttatataggagaggggggtgtgttcccatgaggatccttatctttcctgagcggcattagtgggaggtagccaaggggtagtgggtaggattgaagggattgctaactgctaatatctggaatgtggcagaacttggaattaacttggtaggtctgagcattgatactggagttactcatgacaaaggcattgatactggagttactcatgacaaaggcagagtgtgaactctgatcccggaggaagaagggttattttcaacaatctcttcagcttgaatagattgttgctgtgtgtgattcaggtttggtgcatgacacctttcctcttcatggagctgacctaaggcggaatataagggagatgggaggggcagcttgggaaatcaacacctcccaccctcacgacggataacccgaaggatcttctgcagcagaggcaggagtctggaggctgggatggtatcagaaagggcctccctgggtattggaggcagtgaagatgaagggcgagaatccattggccgtgccagtacgccatgggggcggttgggagatcttgtagaacaactgttcgagcccgcttgtccactcattactctggaatccgagtcccagcaggggcgcgggaaaccgctgctctgagaaaaggtacctcccccagaaagactgcgcgggaagtcccgagttttcccgccacgccgagggcgtgatccctgacgtcagagctccgcctccacaagctggcggccggtgggctccgcccttaaccaagatggcgatacgcgtgggaccggaaagagtttatagatttcccgtctaccctacctctgaggtgaaggtgggactgccctgtggagcccaccctttccgttatgcgcccgcgcggcgcaatgacgtaacacaggcccgcccactgcccctgttgggttcctgagtcgtgctgcgtcgacaacggtagtgacgcgtattgcctggaggatggcggacgccggcattcgccgcgtggttcccagcgacctgtatcccctcgtgctcggcttcctgcgcgataaccaactctcagaggtggccaataagttcgccaaagcgacaggagctgtgagttccgggcttggggcggggaccgg

SEQ ID NO: 5861 - DNA, 2300 bp, Homo sapien
tatattctccatatgcacttgtaaacctcccataatgattcaccttgccatttccatgtgtctagtccacaatatcattttatctacattatctggcttgcatactaatcacaaccttgtgacataagcaggcgagtatgactatatgcatttttttctgaagtagaatgtgacaaaggctaggtaacttgcctaaaatcacatggctcattaatgggggtgctgggacttgaacttgggtcttgtaagacctagatggcattattcttgtaatattcattcttttatttattcattcatccatagacatgtattgatcaccttttgattagctgtcaggctatatatggagccatcaggaaccactgaaggtttttttttttttttttttttttgagacggagtctcactctgtcacccaggctggagtgcagtggcacgatctctgctcactgcaagctctgcctcccaggttcacgccattctcctgcctcagcctcccgagtagctgggactacaggcgcctgccaccacgcccggctaattttttgtattttttagtagagacggggtttgacggtgttagccaggatggtctcgatctcctgacctcatgatctgcccgcctcggcctcccaaggtgctgggattacaggcgtgaaccaccgtgcccggccgaaccactgaaggtttttaagcaggaaagcagagctgttttctggatgagcaaacagaaagtagtggttttccaagtacagtctgagacaacctataggaccagaatctctgcagttgaggctcaggaatctggtaatcagccaggtataggaactcttttctgattgcaatgcagtgaagagcagaagcactgtattagagaaagaggcagtgcaaccaggtaacgtgaccaggtgagaagtgatgaggtacagagacaaagagatgcacttttgagtcacttagatggcactgataggacttccactacaccctcgcatagacagtggctgaggttcaggaaatagagctggggttcctacttggatcctctggctctagagctttactgcacatagccatttatacccacatcttgattttaattattttatatctatgtttcttagcactttttgcaaatttccaccttatctcaaactgccctcaagccttgtatttctccttcgctttcataaaacctaggaaagaaataagggacagccaagtaaaacttttaaaagttttagaacatttatttctttggggctggttacacaggcgagaaagaagtagatttggttagggagagaaaacaacaggccttggggagatacactggctctccccctccctaaaccctaagaggcctccaggaaacctgaagacaataattccagaagcccagagggtgaccccatttcctctctccatggttattactgtcagtctggagcagttcaggaattcaggaaactataaagaaaccacaacagcctcaacaacccaaacatcaacatcaacaacctcaacaataaaactccttaaaattcatctccttccacccactcacaaccgcagactcgaagctaggaggtggaagggactacagaagctctgcgttgcccaggttagtatttgctcatcacaggcctgggtttcccaggatctcagggagcctggaaactgacgcctccatttctgggtgggagcaccaaagcctaaggacacctttcctctctcttcactgctaagcaggtcaagattaaagcaaaccgaggcaaaggccacggttgacagttccaagggaacccgcaaggccgcacaggatggggtggacgttttacgggagaaaaggctggggaagtgggcgggcgatggcctacgacgggacttggggcggggtgtgcgaaacgcctggcaggcgggcccttgagtatgaccaatcagaatgcggactgcgtcccaggggcggagcagaggcgtatcttggtcgagattggatagcggcggggcgcaggaaagaggtcgcgccagcccgggcaggcagctttgcaagtccgcgttatatatcgcagtggctgcgcccgggatagctggctgcgccgccgcgcacatgcctaggttcgacgccctcctccctttgcccaggagttccttctgtcccggctctgttccgtctcgccccgaggttcacgccatcctcggagccccagcctttcacccagcgcctccaagctttggaccttgacttctgcaaaactagatggtcacagccatgaatgtctcacatgaagtaaatc

SEQ ID NO: 5862 - DNA, 2300 bp, Homo sapien
aagtgggccaaaaatttctgctcgccaatatctacttctacatacctccagaaattcatcattctaaaagcatgtgattgtgcaatagagatggggaggagagagatgacaattccctagtccctcctaaccactaatcatcatcttaccaggcagaacatcttcctcatagatttcagtgtgacatttattgagattctacattatgcctgggaataacagacatggtccttaccctcctaaattttattatcatagcagacaacacataagctgatcccttcaatatggtgggtggtgtaatagaaggtatacactgagggtcatgagagcaaggggctaaactgagagttcagaaaaggcttcccagagaaaataagacttgagtggaacattggaggagtaggaattgacaatataaagatgggttactttcacaggaagggccagaggtgtgcaggacactactaggaaattggagatgaagacaaggtcaggtcctgaaggtcttgtatgccaggctagggagcttgacctttatcctaagggcaatgggagtcactgaacagtcaagacatgactgctcagatttgccttaggggcatattgtgtgactgggcttaggctcttttttttttttttttttgagacagagtcttgctctgtcgcccagtctggagtgcagtggcgcgatctcagctcactgcaagctctgcctcctgggttcacgccattcttcttcctcagcctccccagtagctgagactacaggcacccgccaccaagcccggctaattttttgtattttttagtagagatggggtttcaccgtgttagccagggtggtctcaatctcctgaccttgtgatccgcccgcctcggcctcccaaagtgctgggattacaggcatgagccacagtgtttggcctgggcttaggctcttcggagcacccaagcaacatagcctaactgggagaagagaaggagcctgtttcctggaaattgaggcctaagtcagagagggccgaagtcacagtctgccaggatgttccttggtcatctgtcctgtcccttgcaaattcctaaccagcaggcaccaaggccacaccttgcccacaggacttaacctggtaccaccagcgggaaaccagccctgctgaaggagggagagcacagcctaagcaagacaagggtacagactgaaaggcaatgcctttggagtgcccagcccaagccctgagatccagcaggaacctcctcttaattgttttgcgcggggagggagatgatagttactcgtccaagttcactcagtgatggtgcagttcgtggcagcgttggaatactactttggtttgtatcattccaaaccctgctgtctccacgaagtcaccttccttggagaagaagggggaaatgaagaagaggaaagatatgaggaaagaggagcagagagaaagagaaatgagtcttttaaagtggcagaggaaggagaatggtaaacagcaggagcgaagcggctgaggagaaagaagaggaaagaaaggcgagacgtgggaggattggaacagagacaaaagggaggagagacggacagcgacaagtggagaaaatcggcgaaacttgagtggcagagaagtctgagcgctgagacccggcggccccgtgcgccttcccacctggcgccgatccactttcctcggggtagcggcccaacccacttcgctgccagccgatcccttttacccgtggctaccgggaccactctactctcgcccacttggctctgcctaagcgtcctagccggagcgcggtctctgccacgtggggaggggcgcggccgagttgctgaagagcgcttctgattggccagagggcggggttcttggcgtctcgccggccagacccctccctcaaaggcggggcctggagatccacagctggaaagggcggagccccagcagggcagctggaaaggggcggggcctgacgcgcgcggctcgccgcggcgggctgggggcgccctggtctgccataaagtgaatgggcgccggctgggggtggcagtacgcggtgaggctcactccctccgagagtccaggagcgcccgagcggagaggcggcccgggagcaggggggcggcccccactccggccgggtgcccggcccctggcccctgcctgccctctagatcgccgccgcagccgccgctactgggagtctgcctgttgcaggacgcactgtgagtgtttgaccattctaaggacaggggctcatggggccgaggagctattgctgga

SEQ ID NO: 5863 - DNA, 2300 bp, Homo sapien
tctatgaggaagatgttctgcctggtaagatgatgattagtggttaggagggactagggaattgtcatctctctcctccccatctctattgcacaatcacatgcttttagaatgatgaatttctggaggtatgtagaagtagatattggcgagcagaaatttttggcccacttagaggattttccaatcggctttccaggacctctcaatctgagacaggcccaggacaccaactctcagttttcaaatgaagaggaaaatggctttgaggtaatgtggaaagaggtgctatgatggtatatcctctttccctgactctctttgggtgatagaggctagatcctcagctggacccaccgaccagaagcccaatgtgcaggtgtaggaagttactgaggggttcttcacgtctgatatctgatgggtgctttacactagagcatcgtggccaggtgtggtggctcacacctgtaatctcaacactttgggaggctgaggcgggtggatcacctgaggtcaggagttcgagaccagcctgtccaacatggtgaaaccccatctctactaaaaatacaaaaattagcctggtgtggtggcagatgcctgtaatcccagctacttgggaggctgaggcaggagaatcacttgaacccaggaggtggaggttgcagtgagccaagatcacagcactgcactccatcctggatgacaaagcaagactctctcaaaacaaacaaacaaacaaaagacaaaaaaacaaaacaaaacaaaaaaatagcgcatcgtagcacacggatggtctttggatgtctggttttgagactactttcctatgtggttagttatagagcttccctggacttgggtcgtccataattgggaggatgtatggaaagaattaggtatttttttttcactgcctcccagcagcttctccaggtctgcagggacactggggctctagtgtcccaaataggctgggaatttcatgattcagtctcctaggagaaaacccatcctcttgtcctcttctcacgcattctcacttccaggtaatacaggtaattctaaatagcttagtaacctctatcatctcttgcaaggggaggaggcagctgggggcaagacagtgaaaacaggtgggcatccaaccctcaggccccttagcgtttctaaggcaaacaagaaagacttctgtttcctatcactgatgaggtgggctaagctgcgtatttagcctggtggataaggcccgtcaaaggcttggtatgaaaggcagaccgggagtcaaagcccgatatactaaggcataagaggtgacaaaaggcgatgaaaagagttggcctgggggtgaggagacccaggggttcgtctctctgctctgctatttactaattatgtgaacatgggcccagccttccaccctggggctgtttcctataatgtaaaatgaagagacttaaattagatatccagggcttctgctacgtcccattttctctatttctggatgatgggagtggggcagaggacgctgaaacagagttgggacgtgacagacataactgtgagaagccacgacagggaaggtggacaagagggcgaggagagcagggtgtggaatagatcgctggacttgtttttagaatgaagggagcccagagctgcctcgaaaaggagtgattcctcaaggggcatggtcttggcccaggtaactttgataatacgtggacaggggagtagggatgcccgctcaagttctcaaagcggaccccgcccctttccagccaattgtagcctttttccccataatgcccagcagccactgccaaaccgcgcactgcaaccgaactctacctaactccacctctctagccgcccagcccagttcctcattttttattggttttttaaactgtcactcagagagtactcgtatccgttggttgtcccctaacataccctttctttcccttgtaatcgcgcttctttaggcactacccgcctcctgaagccaatttcctttattcgattggatagtcggaatgctacttttcacggtgcaaagctatgattggctgcgcgcggcagggctcgcgcagttaccaggcagcgggctagactgaggctagttaccacgtcagtgagctgacagggaaggtacccggctctactgcccgtcccggacgactcatcctggcggactgtgcagtcccaccctgacttcggcctcaatttccaggaaacaggctccttctcttctcccatctgctaccagagccgggagagctgctcggaga

SEQ ID NO: 5864 - DNA, 2300 bp, Homo sapien
aggcaggcagattgctttgagctctggagtttgagaccagcctgggcaacatggcaaaatgttgtctctacaaaaaatacaaaaaaattagccaggcatggtgactcatgcctgtagttccagctacttgggaggctgaggtgggaggatcgcttgagcctgggaagcagatattgcagtgagtcaagattgtaccactgcactccagcctgggcgacagaatgagaccctgtttcaaaaaaaaaaaaggaactttttaactttttagggtcttttattttattttattattattattttttgagccggtgtcttgctctgctgcccaggctggagaccagtgatgcaatcttggcttactgcaacctccacctcctgggttcaagcaatcctcctgcctcagcctcctgagtagctgggattacaggcccctgccatcatgcccagctaatttttgtatttttagtagagtgggggtttcaccatgctggccaggctggtctcaaactcctgacctcagttgatctgcctgctttggcctcccaaagtgctgggattacaagcatgagccactgcccccagccgaggggctattttagacaaagaatatgtgtagcttatatggggcaccaatggctgccacccagcttgaaaaataacatcaccaaaactgaggctgcatgtatgtatgcccttccctgttagttcccccacactccctgccgcttgccactattctcaatttttttgtgtgagcttctctggggtatagtcctagaagtggaattgctgaaatataggatatgaagtgctttagctttgtaagataatgccaaattgttattcaaattcatattaatttagatacataccagccacttggtctgcattttttaccaacttaaaaacaattttttttttgagacagggtcttactctgttgtccaggctggagtacagtggtgtgatcgtggctcactgcagccttgacctcctaggctcaagtgatcctcccacttcagcctctcaagtagctgggactacaggcacatgccaccatgccctactaatttttaaattttttgtagagatggagttttgctatgatgcccaggctgttctcaaactccttggctcaagtgatcctcctgcatcggcctcctaaaatgctggattataggcgtgagcacctggccttttaagtattatcagatttaaagtgttttgctatttcaggaatgtaaagtggtatatcattataatcttattttgtaattttcctgattattaatgaagctaataatcttttcatatatttatttgctgtttatgtttcctattctgtgaaacacctattcatctctgttgccaattttggggaggggttatatgtctagttcttatagttttgtagcagttattgtatactctggatattactcctttatattagttatatgtgcctcaaatattttcttctggtttgtgccttatcttttccctcttttttatgttgtcttttgaacaggcatttttaattttaacatggttgaattcaccaattttttaaagaggttttgctttttgtttcttgtttaggtacttctcccttatgctgagtttataaaaatactctcctgtagccaggtgctgtggcacacacctgttgtcccagctacccaagaggctgttgtggaaggattgcttgagcctaggagtttgagtccagcctgggcaacatggcaagaccctatctctaaaaaaaaatcaaaaagaaaatattctcatatattagcttctaagagatttcaagttttgcttttcatatttaaataacctgagatatatttttggtattccattaaataagaatacaatttattgtttctttttctcctgcttttgttggatatagacagagttgccaagtgatacagtgactcctctttggatcctgttgaggtaactgggatgccacaaagcactaggggaatgttctagacccagctttaaatggacagtggtttcaagggtacatgttactcagagtctctgggccagtggcttatctggctaagggtgttagttggtatttatttagttgttccctctcttatttatttttttctattaatttttcatttgtgtgggtacataatgaatgtatttctcttgttatttctgacacaagataaatcttaagttcgtttctactatacttttatgaggtttctgcaggcctttatgaccttgtgacaagggatttcttggccattggctaccaggcagcaagtggttca

SEQ ID NO: 5865 - DNA, 2300 bp, Homo sapien
cagttcaatcagaaaccaaagaaggggattcagtttctgcaagagaaaggcctcctcaccatcccaatggacaacacagaggttgctcagtggctccgagagaaccctcggctggacaagaagatgattggagagtttgtgagtgaccgcaaaaacattgacctgttggagagctttgtgaggtgaggaagctgtaagaaatgtgggatatagccaggtatggtggctcatgcctgtaatcctgacactttgggaggctgaggcaggcagatcactcgagctcaggagttcaagaccagcctgggcaacatggtgaaaccctgtctctacaaaaaatacaaaaattagctgggcatggtggcatgtgcctgtagtcccagctgttcaggaggctgaggcaggaagatcacttgagtctgggagttcgaggctgcagtgagctgtgatcatgccactgtgatagagtgagatagagtgagatagagtgagatcatgccactgtgatagagctgtgatagagtgagaccttggctcaaaaaaaaaaaaggtgggacatggttagtgatcagtttaaagggacagaacatccctacctcaaagcggtctctataaatttcttctggagaccctagccaatgttcttcctctacccatcatttatatctattggacctgaaagggactccaacgagatagtttggggagccccctccattctgcatggagtccattccaaaggggtagagcagggttccagggggtgagggttctaggcaagagtccgtggatgtgaaaagtattaaggctaggggttgtgttagggatgaacaggagatactgcccctttactagagacctcagcctcctctcttccagtaagagtaggttaggaggacagtgactaaaagagcctgacatgtgcagcttacacattttcagcctcttcttcctttctttccctatagcaccttcagttttcagggtctgcgactggacgaagccctccgcctctacctggaagccttccgtttgcctggggaagcaccagtcatccagaggttgctggaggcattcacagagcgttggatggtgagtttgagtgtcaggggctgagcccaggatccaaggtcagtttgactgagggctgaagaatccagctgctgtctcttttttttttttttttttttgagacagagtctcgctctgtcacccaggctggagtgcagtagcgcagtctcagcacactgcaacctccaccccccgggttcaagcaattctcctgccttagcctcctgagtagctgggatttcaggcacctgccaccaagcctggctaatttttgtatttttagtagagatgggttttgccatgttggtcaggctggtctcgaactcctgatctcgggtgatccgcccacctcggcctccctgagtgctgggattacaagcgtgaaccaccgcacccagcctgctgtctcttaaaaagtcagagagcaaaattagtgacctttccacaaagagatcagcttctgttaaggagttggcaagagactggccactttctggatggtacctctcctctgtactagcactgaccagtgggttggtagtgagggtttaattggccagagaagggcattgacacaggcgggatctttgctttttcagaattgtaatggctccccatttgccaatagcgatgcctgcttttccctggcctatgctgtcatcatgcttaatactgaccagcacaaccacaatgttcgtaaacagaatgcacccatgaccctggaggtaagcttgggtcccagtcaaggcaaagaagacccagcacagcttgggaggtagcaggaaggacataggatttccagtgggcatgatggatggggttctgtccaagggaatcaggaagggctggccaacctagaaaagggactggggtggggaagtgggttttttcgcttaccttttcctaagtcctatttactgaaaacccaggagttccttaggtggggcttcagtgttgacacaaggggaaaaaacttactggcctgtctctaggagtttcgcaaaaatctgaaaggtgtgaatggaggcaaggactttgagcaagacatcctggaggacatgtaccatgccatcaagtgagtatacatagagaatagtgcagtatctctgttaagaagaagcacattgcttcctttcccagtttttagagtcatgtcagactgcagtgactcacatgccctggatttagcctcaggacttagttgggcagccccctctctgccaactgtttct

SEQ ID NO: 5866 - DNA, 2300 bp, Homo sapien
ttcctgcgtgtgcctactgccagctatgatcttgacctcttcaccatgacctggggccccactattgctgctctctcttatgtctttgacaaaagccttgaggagacaatcatccagaaagccatctcaggcttcaggtagcccagctttggccttggtcttcacctcccactagctctgtgagctaacatggttttctccatgcctctctgactcctactgttacttcattagaatggggttccccctgagtttttggagggaggctgaagcttgggtaggctcagtcttaaacagaaacaaaattaaaaggtttcttcctgggactgactggggaagagccccatgcaagctcagggacttggaagggctgcttggccttccagtgactctgtttctgggatggggggtaacattacaggaagtgcgccatgatctccgcccactatggcctcagcgatgtgtttgacaatctcatcatctctctatgcaaattcacagctctcagcagtgaggtgagcaggtgcaggaactgtgtacttggagctccaaaggaggacctctcttttagccatggatctacccttatcaacagacctggttgccctcagcgtcttccctcactgcccccacttgaatataccagagcttaggccatttctgtcttgcacactctgggataaaactagtgttacttcatgtaatggggatgggaaaggagatacaggagtggggaaggccttaactaggttaacccactcccaccagtattatgggggattgaagcagagccaacaaaaggacctgagggaaccatcataggcagagacctaagagattttcctttccagacattagctcggccttaagtctgttctcttcctcttttccagtctattgagaacctgcccagtgtatttggaagcaaccctaaagcccatattgcagccaagacagtattccatttggcccatcgtcatggtgacatcctgcgggagggctggaagaatatcatggaggccatgctgcagctcttccgagcccaactactgcccaaggctatgatagaggtaattcttagtaggagactagtgagcgataacaaggcaagagctgcaacattgtatgctacctgtacatagaagtaagtggttgagagtaatgttgggcctgatgcctgccacagctcaccaggaatgcctcaaatgtaagaccacagatcttgggggatagctgtaaaagaaggctggtagatgccattgccagtcaccaattggcacaatagcataggggcagaagactagaggaggaaatccagagaactttggtgggtggaggcgggcacaaatgcaaaggacacatggaaagaaattattttgacttacttttccaggtagaagatttcgtggatcccaatggcaagatctctctacagcgggaagagacaccatcaaaccggtaagagcagaccagaggctcaggggcttggggagggagagtcagaactttggggctcaccaggccatgtgccctttttctacagaggagagtcaacagtgctgagctttgtgagctggctaacactgagtggtcctgagcagtctagtgttcggggcccatccactgaaaaccaagaggccaagagagtggccttagagtgtataaaggtaactgcccatccacccctggtgagaaagcctaaacaccttcctattagatgctacttggtgaactgaagaataaatcatccaggatttgtaaccagggctgactctgccctctccccctggctcttggggacattctgttctcttcagcctttgtcaaagaccccctctctcttttgccctctctagcaatgtgacccagaaaaaatgatcacagaaagcaagttcctccagctggagtcactacaggagctcatgaaggtaaaggatgaagaaaggaaacatggaacaactggctgaatctgggaggggtgacagggacagtattatttctgtcagggcagggccagtggttggcttcttttccatgcctactttcctgctgctgttccccttcaggctctggtctcagtgacaccagatgaagagacatatgatgaggaagatgctgctttctgcctagagatgctgctaaggattgtgttggagaacaggtaagatgagcgtagtctttaggcagaccccatgctgggcttgtgccaaagggatggaagccatcttgctgagtgggctctggggaactgtaggcagcaggggagaagcttactcatcatacctgtctacttagggtat

SEQ ID NO: 5867 - DNA, 2300 bp, Homo sapien
gcacctgtaatcccatctacttgggaggctgaggcaggagaatcacttgaacatgggaagcagaggttgcagtgagctgagatcctgcctgcactctagcctgggcaacagagtaagactccatctcaaaaaaaaaaagaatttgaagacagattgctaaggattagggatgggggcaggaaggaggaggtgggtgtggttataaaagggcaacatgagctgggcatggtggtgcatgcctgtagttccagctactctggaggctgagacaggaggatcacttgcgcccaggagtttgaggctgctgtgagctatgatcataccactgcactccagcctgggtgacagagcaaaacctgtctctaaaaaaagaaaaaggcaacatgagggatactgttgtggtggaactgttcagtatgttgttttgtggtggatacccaaacctacacaggtaataaaattgtatagaaattaatacacacaaaaatgcaagtaaaacaggaaatctgaataagatcagatagtatcttgattatgatattatactatagttttgcataatgttaccattgggataaactgggcaaagtgtataagggacctttttgtattatttctttacaactgcatatgagcctataattttctcaataaaaatttgtatttgaggctgggtgcagtggctcatgcctataatcccagcacttcaggaggctgagacgggaagatcgcttgagcctgggagttcaagaccagcctgggcaacatagcgagaccccatctttccaaaaaagaaaaaaaaaattagccaggtgtggtcacatgcacctgtagtcccagctactccagagactgaggcaggaggatcacttgagcccaggagtttcaggttgcagtgagctgtgattgtgctactgtgctccagcctgggagacagaccaagaccctgtctcaaataatataattaatatatttctatttgaaaaaaaaaaaaaagaccagagcagtatcctaaattgggtcctagccaaactgtcttcactggcctaaggagactggtgggaaagaaaactagacaggaagctgtgtgcccacacagctccccgcttccccgctccctgccctaaccccactccaggtgctgctctccctgcgcattttgctactgatgaagcccagtgtgctatcccgagtcagccaccaggttgcgtatgggctccatgaactcctgaagaccaatgcagccaacatccactcaggtgatgactgggccacactcttcacactgctggagtgcatcggctcaggtgtgaagcctccagctgctctgcaggccacagccagggcagatgcacctgatgccggtaagccctttcccagggagactcaggctggcagataaacagttacaccccaggagttgggacaggaaaacaaaacacaggttactgtgttcagcagattaaacagccctggctcctgccatcacttccagagcttccagtgcccgctggctagtacccataagttaaatagcatgagggcaaataagcaatgcagacggctgtgaagccaggcttcctactgtcctgaggactgatttgtcctgaggactgtttcccagtttctgtttctgagctgtcccgaggactgttttcccagaattctgggaaaatagaattctgtgagcagactttatatcactaaatcgatacatcactaaatcccagaaactgggaaaacagtcctcaggacagtggaaagcctggcttcatagccttctgcattgcttatttgtccttgccaccactccctagagtggtgctacagctgccactagatgccatcaggaacccagattagcctgccaccttatttggtcaacagagaaactgttccggccatcctttggccctctggtgacagaaattaaactatgccagagagaggggaggccaggcctcagcatcttttttctgagagcctgatttatccctcatcccagtgccccatccccaccctgactctgcccttctccctgcctaccataggggcccagtcagatagtgagctcccatcctaccatcagaatgacgtgagcctggatcgagggtacacttccgactcagaggtctacactgaccatggcaggccgggcaagatacaccgatcagccacagatgccgatgtggtcaacagtggttggttagtggtgagtgacaatatgggcagcaattgagtctctcctgcttgacctgtgggaagaattcctggtcctctgcaaggacattcacacaggg

SEQ ID NO: 5868 - DNA, 2300 bp, Homo sapien
tgcctcagccttccaagtagctaggactacaggcgcgtgccaccatgcctggctaattttttgtatttttagtagaaacggggtttcaccatgttggccaggatggccttgatctcctgacctcgtgatccgcctgcctcggcctctcaaagtgctaggattacaggcatgagccaccacacctggcctttaaatttatttttaaactaagatttacttattttttgagtaggttcaaaatatacaaaagggtaaactgataaaactaagtttccaatccattcctgtccccagcttctgagttcccctcactagaggcagccactgtcaccagtttcttgtctatccttccagagttaccctgtgtctattcaaaggcatataaaattaattatgtgagcagagtttatatcactaaattgatggagaaccaattgccttaaatagaataaccatacaaaaatgacaaaagtggctgggcttggtggctcctgcctgtaatcccagcactttgggaggccgaggcgggtggatcatgaggtcaggagatggagaccaccctggctaacacggtgaaaccccgtctctactaaaaatagaaaaaatagctgtgcatggtggcaggcgcctgtagtcccagctactcgggaggctgagacaggagaatggcgtgaacccgggaggcagagcttgcagtgagccgagattatgccactgcactccagcctgggcgacagagcaagactccatctcaaaaaaaaaaaaaagaaagaaaagaaaaataacgaaagtaaaaatgtattaaatctggccagacactattgcccaatcaaagcctctgagcctgaggttttctgttttaaaaatgagattaacagccaggtacagtggctcacacctgtaattccagcactttgggaggctgaggcgggaggatcacttgaggccaggagttcgagaccagcctgggaaaaatagcgagaccctgcctctacaaaaataaaaatgcaaaaattatctgggcatggtggcacacattgtagtcccagctactggggaggctgagtagctgagtaggtgggaggatttcttgagcctaggagatccaggaggcagtgagccatgatggtgccatgcactccagttttgcacagagcaagaccctgtctcaaaaaataaaataagaaataaaattaggccgggcatggtataatcacacctgtaatcctaaaactttgggaggactattgcttgggcccaggagctcaagatcagcctgggcaacatggcaaaaccccatctctacaaaaatacaaaaaattagctggctgtggcagcgcacagctgtagttccatctactcataaggctgaggtgggaggatcacctgagcccaggagttcgaggctgcagcgagccgtgattgtgccactgcactccagcctgggtgacagagtgagaccctgcctcaaaaaataaaattaaattaacaacatgaggctttctctgtcatcagcaggtgtgaaatagaattgaaaagaaagtatctttctcactgtgagtaaggattgtgaaatactcagtccacacacctcctaaggctctctctctcatgagtaatctctgacttggagagtcctttacaaggactggaacaaccaggaagtcaagtcaagggaaagagtagcgagggggtgaggtatggcatgattggtgctagggacaccttgaggacttagttagggacagtgagtggggagggggaaagggatccacgagacctaaccccactcacatcctgccccctcctgtgatcctagttgctagacctgatgcacaccctgcacacgcgggcagcctctatctacagctcatgggcggaggagcaacgccacctggagacaggtggccagaagattgaagctgattctcgcaccctctgggcccactgctggtgccctttactgcagggtaaaccaggaggggcagaggtagggagtttggggagcatcaggatcaagatgcctgaaggatcctgaccctgctcttgctctcaggtattgcctgcctgtgctgcgatgcccggcgccaggtacggatgcaggcactgacctatctgcagcgagcactacttgtacatgatctgcaaaagctagatgccctggaatgggagtcctgttttaacaaggtgggacttcctactggtcttaagataaagttcaaatcctaagaaaaggaaagccaggcagcctgaagagcccctaatgtgagtcttcagcctgcatcataccttcccttcag

SEQ ID NO: 5869 - DNA, 2300 bp, Homo sapien
gcttcctgaagtgctgaaattacaggtgtgagtcaccatgcccggccttagtccattttaatttaaggttaggaatctgacttaccagagaaacgtagtagacaacatatctggatttcagcaaattgtttggcagaatcttatgatatttgtttgagaggcccacagtaaggtggaaagggctgctttgttttatataaacttaggggagaaagcttcatcctggagtcaacagattgggtttgaatcctggctctgtccctttctagctgtgtgtttggttgttactccacctctctgagccttaatttcttcatcagtaaaagtaatattcacctcctagggttgttgggagggagaataagaacttctaaagtacccgaacctagcaactaggacactatatttgcaggcaagatgaagaggggtggggaagtaataggaaacagcccaaatcgagagccataatagtctctctttacttagtgccagtgcaggcctgtgattctgttcttaaaaacgtctggggcaagctgcaggaaagacccgagatagtttatgttctaccataagcctaagggaggaggactccaggcagggagattactcatggcacctgctaaggagaaacgctactgaccagagagaggtccagtcatgtactccgtgcttggtgaatttctgtcctgacctcgctgcctctagaagtgttcaggtggaaattggaaggtctataagaggcaattcggcagcatacagtggctcacgtctgtaatccaaaatccaagcattttggaaggccaaagtaggaggatcacttaagcccaggagtttaagaccagcctaggcaacgcagtgagatccatctccactaaaaattttaaaatttgccaggtatggtggtgtgcacctgtagccccagctactcaggagagtcagagaatcggcgcaccccggagttcgaggttgcagtgagccatgatcacgccactgtactccagcctgggtgacagagcaagacactgtctcaaaaacataaataaataaataaataaataaataggccgtgcgcagtggctcacgactgtaattccaacattttagaaggcggaggccagcggatcacctgaggtcaggagttcgggaccagcctgaccaacgtggtgaaacccccaactctactaaaaatacataaattaggcgggcgtggtggtggccgcctgtaatcccagctactcggtaggctgcagcaggagaatggtttgaacccgggaggcagaggttgcagtgagccaaaatcccctcactgcattccagcctgagactaaaaaaaagaggcgatttcccacatcggtggaaatttgagctgtttaaactctggatgcctttttcagttctaatattccagatctccttggtggataaacacttcatttcccttctcctgagcagagctcctgagccctggcccgctgggaacctgtcacttctaaaaaagttcgaggtccggactgtctctcccggagccttgaggctgatgagacggagcgagagaggggccggggccgaatggagtctactcgcgggcccagggaggccgccagagggcgcccgggaccgaccgcaagaataacttccttcctcttccgctaacttcccggcagcgcgccgctcagggtgggggccccgagggctggggccgtcggcttccccctggggatcccccgcttcagagaaagccaagcgttaggcgcagccaaagccgagaggcagcggaagctcccggcccggggtggcgctgggtcagcgggtaccttctcggcggtcccctggccggccgaactcgcgcctggtgtcctgtcaccccgctccccgccctgagtgagcctgtcccctctcaggggcgcgcccgagtcgctccgggttggctgcgccagtccagagttaaactttcagccaatgaaaaagggcgcgaggcgtgacgcacggaaacgtcatgggaattcccccctccggggggccgagaaggggctttcccggccctgagccctgctggcaggcgaggtgtcgcgaccggtcccaggtgggtcgggcgcggagagaagccgcaaccagagccgccgccacggtgagtggctggattcagacccctgggtggccgggacaagagaaaagagggaggagggcctttagcggacagcgcctggggctggagagcagcagctgcacacagccggaaagggcgcgcaggcgacgacactcggatccacgtcgacaccgttgtacaaagatacgcggac

SEQ ID NO: 5870 - DNA, 2300 bp, Homo sapien
caggagttcgggaccagcctgaccaacgtggtgaaacccccaactctactaaaaatacataaattaggcgggcgtggtggtggccgcctgtaatcccagctactcggtaggctgcagcaggagaatggtttgaacccgggaggcagaggttgcagtgagccaaaatcccctcactgcattccagcctgagactaaaaaaaagaggcgatttcccacatcggtggaaatttgagctgtttaaactctggatgcctttttcagttctaatattccagatctccttggtggataaacacttcatttcccttctcctgagcagagctcctgagccctggcccgctgggaacctgtcacttctaaaaaagttcgaggtccggactgtctctcccggagccttgaggctgatgagacggagcgagagaggggccggggccgaatggagtctactcgcgggcccagggaggccgccagagggcgcccgggaccgaccgcaagaataacttccttcctcttccgctaacttcccggcagcgcgccgctcagggtgggggccccgagggctggggccgtcggcttccccctggggatcccccgcttcagagaaagccaagcgttaggcgcagccaaagccgagaggcagcggaagctcccggcccggggtggcgctgggtcagcgggtaccttctcggcggtcccctggccggccgaactcgcgcctggtgtcctgtcaccccgctccccgccctgagtgagcctgtcccctctcaggggcgcgcccgagtcgctccgggttggctgcgccagtccagagttaaactttcagccaatgaaaaagggcgcgaggcgtgacgcacggaaacgtcatgggaattcccccctccggggggccgagaaggggctttcccggccctgagccctgctggcaggcgaggtgtcgcgaccggtcccaggtgggtcgggcgcggagagaagccgcaaccagagccgccgccacggtgagtggctggattcagacccctgggtggccgggacaagagaaaagagggaggagggcctttagcggacagcgcctggggctggagagcagcagctgcacacagccggaaagggcgcgcaggcgacgacactcggatccacgtcgacaccgttgtacaaagatacgcggacccgtacgtacacctgtacctgtgctggcgcacacacggcagcgtccgtgcagtcgcactcgcacacacatgcacacggagacgtgcccaccggtgcactggtgcctgcacccacacccttcacgcacaaactcaagatacgctcacccgtgtccgtacatcaagacaggcgctgacacacacccacactgagaagctcgggattcacctatctacacacatgctcgcttgcacactcatgttgacgccatggacacacaacatgcaaccaagcactacagccgaaacacacttgtggagctgtgatggagacacactcttgtattaggtgggggggggggggggggagcgtgcagagatctccctgtcgcctgcgcgcccagaaccggtgcggtgtgggaccagctgctgttgtgaggtttgggagagagagaaaagagcccactccgaggaggagacacttttcccgcagccccagaatcgcgttctcggggcagaaccccggggcctcccacaggaaagagcccccgcctacaggctgttcgaaggggaggccgtccgacagcaggaatgtccccccaaaagcccccggggtttatcagccgtggcctccctcctggcagaaaatcccaaggttgctccagaccgggggaggggagcgggaggcggacttggccccagactgccagcctcctcccggccgtgaaagaccctcctgttccctgccctggagggaggagggggcttaacccccaccggggcttcccggattctcctagacctctgcccgctgaaaagcagcgggagcccgtagactgtcgagggcctcccgcccctcccgtcgcgagggcggggccagtggcgtcatttccaggcccgccccctccggccccgcctccccttggtattttcgggactttcctaagctgctctaactttcctgccccttccccggccaagcccaactccggatctcgctctccaccggatctcacccgccacacccggacaggcggctggaggaggtcggaccctcccccaaatctgggcccccatctcccgcccacccccatttagatctgaccccctcccccacgccactcctcccaactttaggcgggcgtctaaaattct

SEQ ID NO: 5871 - DNA, 2300 bp, Homo sapien
aaattgaactcctccattgtggaacccaaggagccagccccagaaacaggtcagcaagttcactaacctcccctagtcctaaagcgggggagggagagcatgtgccctctctctgggggaggggctgggagatcgtggctcagcaaggtctctctgtccccagctgatggcccctacctggtgatcgtggaacagcctaagcaggtgagtgagcaaaagggagggtgtggaatggcttcagctttggggacaaatggggtagtggtagctggctggccatggaggagccattgccgaaggaggccacaggggattggatggtcactgctgctgatcagagtgctgtagtttggttcagggctactaccaggcactgcggtcactgctggcctgggtggtcttccctgatcacaatgctactatgcccttggaccttcagagaggcttccgatttcgatatggctgtgaaggcccctcccatggaggactgcccggtgcctccagtgagaagggccgaaagacctatcccactgtcaaggtgagccaggatggtgctggagggtgggctaagtggacagcatgcccaaggccctgactgacagtccctgcctctcctagatctgtaactacgagggaccagccaagatcgaggtggacctggtaacacacagtgacccacctcgtgctcatgcccacagtctggtgggcaagcaatgctcggagctggggatctgcgccgtttctgtggggcccaaggacatgactgcccagtaggtgccctctacgcctggcccccactggtatgcccgtctgccagtcccaggccccagcccacctccatgagcttagcatctgaccaaggggaaagatgtaggttggccccaaacccaagggcctaagtagaaactccaatggcttccttgaggaagtaaggctgagctgagccctggcaatgggaaaggtgcctcaggaagaaagaactgcatggccaaaggcctccgattctctcttctcagatttaacaacctgggtgtcctgcatgtgactaagaagaacatgatggggactatgatacaaaaacttcagaggcagcggctccgctctaggccccagggccttacgggtatgggtgcagggggtgggtcgggtatgggtgcagggggtgggtgggtcatgggaggtgctcatggaaggagcagggagggagaagcccaggggtcacacatgtacctactgcccagaggccgagcagcgggagctggagcaagaggccaaagaactgaagaaggtgatggatctgagtatagtgcggctgcgcttctctgccttccttagagccagtgatggctccttctccctgcccctgaagccagtcatctcccagcccatccatgacagcagtgagtatcctgattgcctggggtgccaggcctggtggcagaggtggcatgaggggtgacctcaagctgtgcagtcaaacagacccaggtttcagaacctggccctgccacatatgagctgagtgatcctgagcaagtcatttcccccccgaagcttctgtctttagtaaatgtgtatattgggtgtttcctgcagctccaggggttgctgagataaggaatacaaagcccccagcttcttaaatgtggccttggctattgcatcatctcaactaatccatatcccactccatagaatctccgggggcatcaaacctgaagatttctcgaatggacaagacagcaggctctgtgcggggtggagatgaagtttatctgctttgtgacaaggtgcagaaaggtgagactggagcccactttgggcaccaaggacatcgagtataagactggggccagggaagctctagggtaaatggccccagagattccaccgggagctgtggccaagcttccgttttccttgtagatgacattgaggttcggttctatgaggatgatgagaatggatggcaggcctttggggacttctctcccacagatgtgcataaacaggtacccagggctagggcccgggcccgggctgggggctaaattaggctaaggactcactgacaccctgtgtctccctgcaccccccagtatgccattgtgttccggacacccccctatcacaagatgaagattgagcggcctgtaacagtgtttctgcaactgaaacgcaagcgaggaggggacgtgtctgattccaaacagttcacctattaccctctggtggaaggtggagctgggctgaggacctcagggtgctggcggggggccaggctgggctagaagaaggtc

SEQ ID NO: 5872 - DNA, 2300 bp, Homo sapien
ccaggcttagaggcaagggaacgttggggcaactagtacgttggggcaactagccctcagtacttgagggagccagggacgggtccttgctgacggatctgctggaagaggagctctttgtggggagggtttactagcggggttcaggaggtaggaagttgccggccaaagggggtggggatgaaatgggaggttggggaagatggctgtgggaagggtccctgggaggcagccaaggctgaaagtcagctctcccctagacggcgcccacacgctgacctgtgcgctcatgctgctcaacacggatctccacggccatgtgagtggaggcgggcgggcaggagccggaaaacaaacccctggccagacatgcaggacctgggaggccaagggccctccaaactcacaggcctccgttcccttccttagaacatcgggaagcgcatgacctgcggggacttcatcgggaacctggagggcctcaatgatggcggcgacttccctagggagctgctcaaggtggggggcggggcagggtagaagtcgctggaggggaaggatggaggacccagtcggcgacggagtccagagtcggagggagggcagggctggggcttgccgacccccggctcctgccacggaagcccgggctctcgtgactcagcctggggaccgccccctccccaggccccacgcgcaggctctcccggaacatgcgcacatgcgtgcggtcgcgactgcgcacggcgggggaggggacccggctctggaaaacgcgagcaggcggccccggcccctgcgtttgccttcagttcccctcctccagtgtgcgctggggtggaaggcgggagttgcgggggtccctgcacgggacagggattggatgggggtacactccacactgctcccccgccgcgtggacagccaaaaagaccttcccggtgctgctgcgctgcaggaacccggagggagaggggcctgagagggactaagcttttccaaggtctggcagcgagttagcgcaaagctggagctagaaactgctttctggctccctgtgagcaggtcccgttcccaggcgccagctccatggcccgcaaccgagggctcagatacgtaggggctggtgccggtaggagaagggagtggctcatccagtgggttcactcctctccctgatctggtggtagtttatctagagaggcctggactcacttgaagaaacccccaggctaggacaaaggtgtctctgctccactacatacatgtaacagcacaggattgtcctagggcgtttctgtgagcttggggtgctgggcttctgagtttggggtatatctgagagggaacgtccatggtgagctggggtgttgcttgagttgagttgcatctgtgtgcccgggcgtcgtgaatcaagggtttgtatggcttggtgtgtttgtgctttagggcttacgattcagagtgtgtgtttgagttggggtgtaggctggatgtttatgtgtggtggggtttacatcttcgaattggccgtgtctgaggtatgccatatgcctctgagtagggggtgtatctttgtgagctaaagattctaagttttgaagtgtccatctgaatgggtagtgtctgcgagttggggtgaccgtgaactggtgcgtctggtttgttggggtgtatgtcagaatcgaggtgtgttacgtgacttcagatctatatatgggtggggtatctgcgggtgagctggatgaggccagggctgttccttccctgcctccgtcctccctcgaggcccctcttggctcagtggaaaagggctgcagggaagcggtccgacctctcccctcccaccaccccaacccagaccagccagaagggagttccagaccctgccgggtccgcccagcgtcacagccccaggcctagcggtgctctcagcctccctggagctgccacccacgctggcctccccaggctcctccccgtggccgcgcggggagggcccccttcgcgatcgggcgcctccatttcatgcggtccccgcccccagccctcgccctccctttcccgtcggcgcccccctcccgctctagccaagccgcagagcagacagcgccgccgccgccgccgcgcactccgtgcgtccgtgagagccgggccggctcgggccgggccgcgccgctcgcgctggctgtcgggggagcggtccgcgggccgtccgggcggcccgggggccgagggcggacgggggcatggccgggggccgcggcgcgccggccgggccagcatgatcggcgtcaaca

SEQ ID NO: 5873 - DNA, 2300 bp, Homo sapien
ctgtaagagaggaaggggagcatggggtgaactgccaaggagttagatggataggacagcagagatagggaagggaaagttggctagggcctctgagtatcagggacctagcacaccctggtaatatgggatcattgatcccacgcctggggactacttccatagaggcctgacgagaaaagacttatacacccagtgggcccctggctcctttccttctgcctgaggccctgagcatcaccctgggaggagagaggaagcaacttcaaagttgagtgagcccggagttcttatggcactttggagctacttctagaataggggaagttggtaccccaccctctggaaaaggggtgtcagccagctgtcaccatcatacagccctgtgacccctatagtctctcttatggaggcccctcactcagggaagggaaactcaggcctcctggaaggagagggaagaggaacaggtgttatatagggatgctgaagggctgagaggcacagcatggaagtggggagaaaagcctgagcagaggctcctacccccaatatatacatactgagtgggaaagggacattcttcttttttttttttttttttgagatggagtttcgcccctgctgcccaggctggagtggaatggcgctatctcagctcactgcaacctccgcctcccaagttcaagtgattctcctgcctcagactcctgaatagcttggattacaggcgctcagcactatgcctggctaatttttgtatttttagtagagatggagtttcaccatgttgtccaggctagtttcaaactcctgacctcaggggatccacccactttggcctcccaaagtgttgggattacaggcgtgagccaccgcacccggccagggacattcttttcttcatacaggtacagacaggcacctacacacacacaaacacacacacacacacacacacacacacacgcacacacatacataaggacaaatatgtcagtacacagttaaacacattcataggcaacaccctctggcacacacacagacacacacacacacacactgctcaaagacacaccctcatgcactctcacagtcataacaagtatgtgtgtaatgaaaaggcacatgcttgttttacacacacaccatcatcaaacaggaacacacaaagaggtacccaaatatatacacaagctgtcattctccagtgcacacagaggtccaggtgtatcagacactcacagagacctactgctcacagtcacatacacatacagatgtacacatacagatgtacacactcaagcagggacacacaccgtcccctcccccccacctactggggtctcttgaggggaatctgcacccatattcctctcctctccctctctccccaggggtaagacagatcccgcccaggagagaccataaccaggtaaaggggcctctggtggcaatgcaggggaggggcagaggtcaggagtagcaaccctgccaggcaggttccggaagctcaacggggtcccagcgcatacccggtgcagccccaactcaatgccacctcagtactcaccgctgctcgcccagagctgagaccgaggagagacagaggagaggctgggcccagctgagctgtgaaggcagcgcggctcccgtttgctccaggcccgcccgcctctcagtccctccccctaccccctacgcgccgctcaggcaacgctaatcccccccaccccccgccctctcccagggcccagagccccggaggctgccagccccccttgtcgctaggtccccgctgggctctcccgccaacctaagacccgccccagacaaggaggagggcgcatggaacccctggttctattccccagaccctcacgtgccccaccccacttgtgtccacgtctctctcgcccaccgccccttgagccacacgtaaggcccggctgcacacgcgtgtcccgctccagaccccacgcgtgtccctaggaggctgccacatgacctgttacatgccacacgcgctcccgcccccacgagcacgcggccgcgccaagcacacggtatgggtgtagactggacccgccccctaaatccaggagaccatcaactatggaaaggagatctagggaacaccgtcttgaacccgccaggggttttgagtctcggacccaggagatccaaccctgaccaccctcccaggatgcagcagggggatgttaaatcagacttcaggaagaacttccttgctgcctgagttaggtgtcgtcacgcctgcccaggggtaagag

SEQ ID NO: 5874 - DNA, 2300 bp, Homo sapien
gagtttcgcccctgctgcccaggctggagtggaatggcgctatctcagctcactgcaacctccgcctcccaagttcaagtgattctcctgcctcagactcctgaatagcttggattacaggcgctcagcactatgcctggctaatttttgtatttttagtagagatggagtttcaccatgttgtccaggctagtttcaaactcctgacctcaggggatccacccactttggcctcccaaagtgttgggattacaggcgtgagccaccgcacccggccagggacattcttttcttcatacaggtacagacaggcacctacacacacacaaacacacacacacacacacacacacacacacgcacacacatacataaggacaaatatgtcagtacacagttaaacacattcataggcaacaccctctggcacacacacagacacacacacacacacactgctcaaagacacaccctcatgcactctcacagtcataacaagtatgtgtgtaatgaaaaggcacatgcttgttttacacacacaccatcatcaaacaggaacacacaaagaggtacccaaatatatacacaagctgtcattctccagtgcacacagaggtccaggtgtatcagacactcacagagacctactgctcacagtcacatacacatacagatgtacacatacagatgtacacactcaagcagggacacacaccgtcccctcccccccacctactggggtctcttgaggggaatctgcacccatattcctctcctctccctctctccccaggggtaagacagatcccgcccaggagagaccataaccaggtaaaggggcctctggtggcaatgcaggggaggggcagaggtcaggagtagcaaccctgccaggcaggttccggaagctcaacggggtcccagcgcatacccggtgcagccccaactcaatgccacctcagtactcaccgctgctcgcccagagctgagaccgaggagagacagaggagaggctgggcccagctgagctgtgaaggcagcgcggctcccgtttgctccaggcccgcccgcctctcagtccctccccctaccccctacgcgccgctcaggcaacgctaatcccccccaccccccgccctctcccagggcccagagccccggaggctgccagccccccttgtcgctaggtccccgctgggctctcccgccaacctaagacccgccccagacaaggaggagggcgcatggaacccctggttctattccccagaccctcacgtgccccaccccacttgtgtccacgtctctctcgcccaccgccccttgagccacacgtaaggcccggctgcacacgcgtgtcccgctccagaccccacgcgtgtccctaggaggctgccacatgacctgttacatgccacacgcgctcccgcccccacgagcacgcggccgcgccaagcacacggtatgggtgtagactggacccgccccctaaatccaggagaccatcaactatggaaaggagatctagggaacaccgtcttgaacccgccaggggttttgagtctcggacccaggagatccaaccctgaccaccctcccaggatgcagcagggggatgttaaatcagacttcaggaagaacttccttgctgcctgagttaggtgtcgtcacgcctgcccaggggtaagaggttagacgggatgaactagggaccggaagacgtgggggaccggcaacccttgtgcccttggccagggtagaagggggccctgctattttaagaaagagccgctggagttactatggcaactactctctttgggagggccagggcgggcagatggtgacctcggaaggaagaaggggtctgttcgggcagtcagggggcgcgaggacgtgcgaggcgggggcgcgcggggctcaccgcggggaggggcggcgcggactccgcgtggtgctgaaggggacagcgccagatttgtcgcactgcgcaggcgcagaggcgcgaacaaagaggggagggggacgaggcgcgcggccggaggtggtgcgcgctcacgtggctctatctttgcaggggtctgtcctcccagctaccccctccctaagcaggctgaggaagaagagatagcaagccctcacctaacttgacccctttcttgtctctccccgctgctagcttctcccttctcgctgccttgcggggtggggaaacgtggaaggaattctgggaaaaccagatgtctgggttctctattcccgtctggcttgattctggacaaggggcttcctctccaggg

SEQ ID NO: 5875 - DNA, 2300 bp, Homo sapien
ccccggctcggctcccctccctcaggttcctcttccctctcggcccctccggtgctcggtacctgacggctccgggctcttgctcccctccggacggctccatcggtggctccatcggctgtctattgcgcgtgcgcagtaagattttctcgctttggccttggagtggccgcaccaaacccgcctccttggcctgtagagacagacctatttaatcgagtgccgtctcaccgaggatccgatctgaaagcttttcgggtggaccccgaaacggaggcggaacagaccggtggtgtaacattaggcctcgccttctcggctacagggcttgaggcctgaagctggagaatgcggtgggcatcagagactggcttctgtcgtcctcttgagccagtagccgcctctgagcgaagtggtggtgggaggagcaggcaaggccaaacgcggagggggcggagccaggactcttaggttaccggcctctcctctgccctctggtcgcgtttagcgactttgaaaaacggggagaaactatccaggctcttactgtctgccacgtagcaggtgttcaataagtaattgttgaaataatgaatgaattggcgaggctataatgtttccctcatcaagtaaacctgctcaaacctcccattcctgattaattatgaagagctatccagcctcttccacttcgtaacagtttgggccgcgtttccgccgggggagagagatgtagggggcgcgaagaaagactatatttccaactgggtccctttcatttcctccaaaggtccagagtcctaagaagaatgagagctcagctcagcccgccagtggtagtgcttctcggctggccttgggtttagttgtagggtctggggctgggtccgccctgggacaatgacgccccagacctctggactcagcttcagggctgcctctcaccgcgtccccaggtcccagtcccaggatccgcttcggggaaccccaggagtagtgccttcccccatcatccacgggatgggtgtggggggatgtgaaggacgcgagagccactgcaccgctgacggtctggcgctccggtgcaaccgcttcagctggctcatcacaacgaaaaccacttctcatctgttatctcgtcaaggcttcgggcacctctgaaaggtgggcaggtctatgctatcagtccattttaaagatggggaaaccgaggccctggagaggaagccccttgtccagaatcaagccagacgggaatagagaacccagacatctggttttcccagaattccttccacgtttccccaccccgcaaggcagcgagaagggagaagctagcagcggggagagacaagaaaggggtcaagttaggtgagggcttgctatctcttcttcctcagcctgcttagggagggggtagctgggaggacagacccctgcaaagatagagccacgtgagcgcgcaccacctccggccgcgcgcctcgtccccctcccctctttgttcgcgcctctgcgcctgcgcagtgcgacaaatctggcgctgtccccttcagcaccacgcggagtccgcgccgcccctccccgcggtgagccccgcgcgcccccgcctcgcacgtcctcgcgccccctgactgcccgaacagaccccttcttccttccgaggtcaccatctgcccgccctggccctcccaaagagagtagttgccatagtaactccagcggctctttcttaaaatagcagggcccccttctaccctggccaagggcacaagggttgccggtcccccacgtcttccggtccctagttcatcccgtctaacctcttacccctgggcaggcgtgacgacacctaactcaggcagcaaggaagttcttcctgaagtctgatttaacatccccctgctgcatcctgggagggtggtcagggttggatctcctgggtccgagactcaaaacccctggcgggttcaagacggtgttccctagatctcctttccatagttgatggtctcctggatttagggggcgggtccagtctacacccataccgtgtgcttggcgcggccgcgtgctcgtgggggcgggagcgcgtgtggcatgtaacaggtcatgtggcagcctcctagggacacgcgtggggtctggagcgggacacgcgtgtgcagccgggccttacgtgtggctcaaggggcggtgggcgagagagacgtggacacaagtggggtggggcacgtgagggtctggggaatagaaccaggggttccatgcgccctcctccttgtctggggcgggtctta

SEQ ID NO: 5876 - DNA, 2300 bp, Homo sapien
gccaatgcggcccgcgggatctgcggacccacctgcgggcggggaggcaccccaactctcagcccgtcccgcactcctcagccgcctatgcacccctgacctgagttcttttctggcagcctcctgctctcccaggagagaccccactttccctctgagtcgctaccgagtatttgccctttggtgcgtggatcccttccgggcagccccggcggcccaagggggtccagaagggcatactgcggggctgggggctgggctagaggcggggcggtacccaggcaggggcggggcttcagcccccggctcacctgcgcggcatcgaagcgacgcagcccggccaggtgaagctgcaccagcgaccggaaggcccggctaacgcgctgcagccggagcagctggcgcagcgggacccggttcaggacgtgtgggagcagcacgtcttcccagggcaggtccaggaacctgcgagtaaaggggcgttggcactggcgtcccggggccactattacctgcgagtccgcctccgttatgttcctgcgccccagctcccaagagcggcccccagacccagccccggctcggctcccctccctcaggttcctcttccctctcggcccctccggtgctcggtacctgacggctccgggctcttgctcccctccggacggctccatcggtggctccatcggctgtctattgcgcgtgcgcagtaagattttctcgctttggccttggagtggccgcaccaaacccgcctccttggcctgtagagacagacctatttaatcgagtgccgtctcaccgaggatccgatctgaaagcttttcgggtggaccccgaaacggaggcggaacagaccggtggtgtaacattaggcctcgccttctcggctacagggcttgaggcctgaagctggagaatgcggtgggcatcagagactggcttctgtcgtcctcttgagccagtagccgcctctgagcgaagtggtggtgggaggagcaggcaaggccaaacgcggagggggcggagccaggactcttaggttaccggcctctcctctgccctctggtcgcgtttagcgactttgaaaaacggggagaaactatccaggctcttactgtctgccacgtagcaggtgttcaataagtaattgttgaaataatgaatgaattggcgaggctataatgtttccctcatcaagtaaacctgctcaaacctcccattcctgattaattatgaagagctatccagcctcttccacttcgtaacagtttgggccgcgtttccgccgggggagagagatgtagggggcgcgaagaaagactatatttccaactgggtccctttcatttcctccaaaggtccagagtcctaagaagaatgagagctcagctcagcccgccagtggtagtgcttctcggctggccttgggtttagttgtagggtctggggctgggtccgccctgggacaatgacgccccagacctctggactcagcttcagggctgcctctcaccgcgtccccaggtcccagtcccaggatccgcttcggggaaccccaggagtagtgccttcccccatcatccacgggatgggtgtggggggatgtgaaggacgcgagagccactgcaccgctgacggtctggcgctccggtgcaaccgcttcagctggctcatcacaacgaaaaccacttctcatctgttatctcgtcaaggcttcgggcacctctgaaaggtgggcaggtctatgctatcagtccattttaaagatggggaaaccgaggccctggagaggaagccccttgtccagaatcaagccagacgggaatagagaacccagacatctggttttcccagaattccttccacgtttccccaccccgcaaggcagcgagaagggagaagctagcagcggggagagacaagaaaggggtcaagttaggtgagggcttgctatctcttcttcctcagcctgcttagggagggggtagctgggaggacagacccctgcaaagatagagccacgtgagcgcgcaccacctccggccgcgcgcctcgtccccctcccctctttgttcgcgcctctgcgcctgcgcagtgcgacaaatctggcgctgtccccttcagcaccacgcggagtccgcgccgcccctccccgcggtgagccccgcgcgcccccgcctcgcacgtcctcgcgccccctgactgcccgaacagaccccttcttccttccgaggtcaccatctgcccgccctggccctcccaaagagagtagttgccatagtaactccagcggc

SEQ ID NO: 5877 - DNA, 2300 bp, Homo sapien
tgctggggatgcggaatgggtgggactggctcctggcttctgccactcactgctgattgcctgacaggcccccaagaagctgatccgatacatcgacaaccaggtagtgagcaccaaaggggagcgattcaaagatgtgcggaaccctgaggccgaggagatgaaggccacatacatcaacctcaagccagccagaaagtaccgcttccattgaggcactcgccggactctgcccgagccttctaggctcagatcccagagggatgcaggagccctatacccctacacaggggccccctaactcctgtcccccttctctactcctttgctccatagtgttaacctactctcggagctgcctccatgggcacagtaaaggtggcccaaggaaggtgtgagtgcattctggtcatttctgcctcaggactgggatactatgcctgtctgacctttcctccccaacctcgaatcccctatcttcaacagggcagcaccaggcaagagggggtaaaaagctctttatttgaagctccagggtggggcagggcactggcctctcaccagaggtcctcacagttcagtttccctacagctcagtgtcaggccccagccacacagtccagctgtgctccgattggcaggcgggtcagacctgcaggttgacaaaaggtgcgaagcccgccatatcctgcagcagcaccagggcctggtgcagcggcggctccacgtcgatgtccacgccgcgcttccgcaagcggctcaggctggactccgccacatggtggcagtgccgcacccgcagcgaacgcagcacggggcagtactcggccaatgtcctgagggaggagcagggtgaggctagggacatgaggccaccacacctttggtggggtaaggtggaggcccgggctcactcagcctcggactggctccggcaaaatcccggtctccctccagctcggggcaggggcatactttttccgtccctacacaagggaggcgcctggattggcttccagtgagctggagacttcctgtctcatttaaggggggaacctggccctcagctccgcctaggattgcaagatctcccccttgttgaagaaaagccagaagtcgactttctatgtgaaatctcccaatgtgtaaacattggttgaaaaaagtttttaaactatgggctctctggcctaggcaatcctagaggccctttctgttcagaatgggggtgctgtggtttgcaggaagattcagaaccctcagtccggccttttaacaactacagcccgccccataccagcagaggctaagtgactgccctcctcccgccctatcaggcccaggcacctgacaccgtcgcttccgacgcggaggcagccggtgaggtcaaggtggtggagttctgggcagttccgagccaactcttgaaccgcggcgtcccccacgttggcgttgacggccagagagaggctgcggagaccagcgccgcgcctctgcgccaggtacacgatggcctcgtccttgagctggcggcaggcggtgagatccagctcctccagggccgggcagcgatcagcgaggccgcgcagcgccagcccgtccacccagtcacagtgcgcgagcgacaggcgctgcaggcgtgggcagccctcggccaaagccccaagcgcccggcgactcagttgcccgcagccgcccaacgccacactccgcagctgcggattccgcgccagcaccggcaccaggtcctcgtctgacagccattcgtgacacggcgccagtgccagctcctgcagcccctcggcatcccgcagcagccgggccaatgcggcccgcgggatctgcggacccacctgcgggcggggaggcaccccaactctcagcccgtcccgcactcctcagccgcctatgcacccctgacctgagttcttttctggcagcctcctgctctcccaggagagaccccactttccctctgagtcgctaccgagtatttgccctttggtgcgtggatcccttccgggcagccccggcggcccaagggggtccagaagggcatactgcggggctgggggctgggctagaggcggggcggtacccaggcaggggcggggcttcagcccccggctcacctgcgcggcatcgaagcgacgcagcccggccaggtgaagctgcaccagcgaccggaaggcccggctaacgcgctgcagccggagcagctggcgcagcgggacccggttcaggacgtgtgggagcagcacgtcttcccagggcaggtccaggaacctgcgagtaaaggg

SEQ ID NO: 5878 - DNA, 2300 bp, Homo sapien
gctgcccatcacccccttcctaggggcctgcccggccagagttcaaagtcgctgtcaccccacccctcattaaccctagtatcaccaggctggagtggcagtgtttttatgggcaaagcgacgcgaatgtgccccttccttccctgctacctcccccaagcagccaacatcttgctgtctctgaggccagaagaggaaggaggctgttgtgaggaccagaggtggaagagaaagcaataagcagtcatcccgttttctccatagtttcttcttcttccttctccttcttttcttcttcttttttttttttttttttttttttgagacagggtcttgctttgtcactcaggctggagtgcagtagcacaatcacggcttactgcagccttgacctctggggctcaaatgatcctcccacctcagtctctggagtagctgggactactggcgtgtgtcaccatgcccagataattttttattttttaaattttttgtagagacgaggttttgccatgttgcccaggctggtctcaaattcctgggctcaagcgatcctcccacctcagccttgcaaagtgctagaattacaggtgtgagccactgcagcatagtatcttggcactgccttagtccctaggagagaggaaagatgggacttctctcttggactgtgagctccctgagggcagggacagcttccgggtccccagcaccccacgaaggaactagcactaaaaagggctcatccctgctgatgggggatgggaaattttatccttgaaggggactcttccccttgtgacccatttcagggttcccaagaggggagggctgtggggcttccccacagggcagcaccgggaatctgtggcagcaggaacaaaaagaggaagttgaagtcttgttgggccctggagttcagctctcctgtcctagacaagcagccctgccaacatgggggatgaaggccccggggggtaggcatggtctacaggctgtccatgacagggctcaggtggatcctcatcctggcacctgctaccactccacctctcccagaccacgtccaaaatcccaggctccaccctccggagacacagacctgtagctcaccccaatctaggggagacattgctgttaagggaatgcaaaaggtacagacagggtggggaagtcagtacctaagagaccagcctgggccacgtggcaaaaaccctgtctctacaaaaaaaaaaaaaaaaaaaaaaattagctcggcgtggtggcacgcgcctgtggttccagctactccagaggctgagatgggaggatcacttgaacccaggaggtcggggctgcagtgagccatgttcgcactcgtgaacctgcactccagcctggggctgtaacagcaagaaaagaagaaaaagaaagagaaggaaggaagggagggagggaaagaaaggaaaataaagaaagaagaaaagaaaagaggccaggcgcggtggctcatgcctgtaatcccagcactttgggaggccgaggcaggcgaatcacgaggtcaggagtttgagaccagcctggccaacatggtgaaaccccgtttctactaaaaatacaataaattatctgggcgtggtggcgcgcgcctgtaatcccagctactcgggaggctgaggcaggagaatctcttgaacccgggaggcggaggttgcagtgagccgagatcgcgccactgcactccagcccgggagacagtgcgaggctccctcccaaaaaaaaaaaagaagaagaaaaggaaaaaaaagtgagagagagagagagagagagacgagaaaaagagagagagaaagaaagagaaaggtttcgggtctctgacggatgagaaggaacaagacggggatgcagtcctacccacttcgactccaccccctctcaagaccttcacgcctaacgcctccctacgcgcaacaaaactggccgccaagggagcccgtccatagccctgggacgttagagaattagagcaggagctccgccctgttgtgggcaacttgcccttctcaaacatggccgccacggcgcctctggaagggaaccgctctgggccccgcctttgatctcgttggtggggctgggggatgagagctgcaccgcgcgggacaagtcgccggcggcgcccgacggagcaggtgatttcccctcctgcccccggcccagggctaggagagtcgcggagagcgctgacccagggtacccgtccgatgtgttcccccacggtaccccccccggggcccgtcggacccccatctctgattctc

SEQ ID NO: 5879 - DNA, 2300 bp, Homo sapien
gattgtgccactgcactccagcctgggtgacagactgagactccatctcaaaacgaacaaacaaacaaacaaacactaacattttagcacttaacacatgccaggcaccgtggtaaatgctttctgtgcactgtagaaacacagatgtcatggcatcttctcaataacctcatgagataggtttttgtatcatcatccccatttgggatggggaaactgtttcatggacattaatttgcccaaggtcacacagcagacccatcacactatgccacctcaccttcttgtgttttataattttttacaaaggaaaaataaggtgaaactagggataacagagttcaggatgcaggttttatataaaagacactaagcaggccgggcacggtggccatgcctgtgatcccagcacttaatgaggccaaggcgggcagatcacttgaggccaggagtttgacaccagcctggccatcatgggaaaaccccatctctactaaaaatacaaaaattagctgggcgtagtggcacacacctataatcccagctacttggaaggctgaggcaggagaagcgcttgaaccaggaggtggaggttgcagctgcagtgagctgagatcatgccactacactgcagcctggacaacagagtgagactctgtttcaaaaaaaaaaaaaaaaaaagacacaaagcaaatttggctctgagctccttggaaaccaggaccaaaagaaaaatatgatcagtaatgagattcgtagcgcttaaaagacaaaagcaaaccactgatcaggagaaacaccttttccaagggctgaggtttgagacaacttctccaagaagctcacaaatacagcagtgcccaatcagctggcctacagcttcaataactcacctgtgtatacccaggtaactattggtcagttacaaatggaagttcagtaaaagaaatttctacagctgggcctcaaatctggctagatcctagttaaaattggctatgtggcctaacattccagaaaactcctagaatattgcaaacctcagcctattaagaattaacgattattagcaagaattgggagacaagaagatacattcatcttttttttttttttttttttttgagacggagtctcgctctgtcgcccaggctggagtgcagtggggccatctcggctcactgcaaactccgcctcccgggttcacgccattctcctgcctcagcctcccgagtagctgggactacaggcgcccaccacctcgcccggctaattctttgtatttttagtagagacggggtttcaccgtgttatccaggatggtctggatctcctgacctcgtgatccgcccaccttggcctcccaaagtgctgggattacaggcatgagccaccgcgccgggcggagacattcatcttaacttccaattaggccgggccgagacattcatcttaacttccaattaggctgggttacttttacgcctcttttactgatgaagaaactgagagtcagaaagccttaagttacacaggtagaaaatgtcagagccagccctaaactcaggtctcagacatccctctcctagtgaagccttccacacttcaaaaatagagcttatgccctcagcatctcggagggtggtgggccaaaggaccaaggagagttagaaggtgctggcctgcacacttggagggagatggtgaagagggcagctgggcccagcgatcagacacatgctttctccagagggccagttcaacttcacgcccctccaccctaccttcctgtaccccagggtgggcggtaagactcccattaaacagataaacagatggagaaacaccaccccaaaacataacaatgatctcgcagtgtatacttgacttcgctcatttatttattgtttttttttttgtttgtttttgtttttgagacagggtttcagtcacccaggctggagtgcagtggtgcgttcgcggctccttgcagccccgccctctcgggctcaggtgatcctcccatctccgcctcccgagtaggtgggactacagtagtgtatcagcacacccggctatttttttttttttttttttttgtagagacagggtttcgccatgttgcctaggctggtctccaacctggtctcctgggctcaagcgatccgcccgcctcggcctcccacagtgctgggattccaggcgtgagctaccgcgcccggcctatttacttttcttactaagctggggatcaccgtcgccctcggcttggcaggaaggcgggggtaggggagcggtgg

SEQ ID NO: 5880 - DNA, 2300 bp, Homo sapien
ggcttgacctcctgggctcaagtgatcattctgcctcagcgccccaagtaactggaactacaggcacatgccaccatgcctggtttttttttttttttttttttgtagagccggtgtttcaccatgttgcccaggctgatctcgaactcctgagctcaagcagtccacctgcctcagcctccaaaagtgctaggattacaggtgtaagccaccctgctgctttttttctgttaatagggatttgagagatttgctctcccgccttctcactttggccaaatcaaataaacctttctctatctcccactgtttggccttagctgtgcatcaggttcaccagcctgaatctgggtttctatgacagtgttagagtccaaatgaaaccctaaccaggccccttttttccatccacagcccagccccagcacctgccttcaaaaggactggcccgaattaagacttggagcagtggctcagtcacgaatagcatgacatcaccagggtgagtcaccaaatggtggccaccaccagagggtagctgagttttgagggatactgagaacccagaagaacctttctgtcagggctgctggtgatactgcttcagtcaacaggagatggggaaggaaagtgtggcaacatggcagccctgcagctgggagacggtttcagttttaatcatccataactaccactctccccactggagaaggaagaggtgcaggggttgtgacccacaccagaagggactggaactcagacagggctcaccccatctggatgaagcaatcttcctgccttcactcaaatggcttctggcctttgacatcagttggactgggttcaaattccactgtggtacttacaggctgtgtgaacctgggacagtggcctaacttctctgagcctctggttccttatctactaaaagagcatgacatcactatgcacttcacatagctattaagaatttaaagtaggccgggcgcagtagctcatccttgtaatcccaaaactttgggaggccaaggtgggcggatcacggggttgggagttcaagaccagtctggccaatatggtgaaacgccatttctactaaaaaatacaaaaattagccaggtgtggtggggcacgcctgtagtcccacctacttgggaggctgaggcagaagaatcgcttgaagctgggaggcagaggttgcagtaagccaagatcgtgccaccgcactccagcctgggcgacagagcaagattctgtctcaaaaaaaaaaaaaaaaaaaaggaagaaaagaatttaaagcagccgggcgcgatggctcacgcctgtaaaatcagcactttgggaagccaaggagggtggatcacctgaggtcaggagttcgggaccagcctggccaacatagtgaaaaccccgtctctactaaaactacaaaaattagcaggaggtggtggtgcacctgtaatcccagctcctcgggaggctgaggtgggagaatcgcttgaacctggaagacggtggctgcagtgtgccgagatcatgccgctgcactccagcctagacaacagagcaagaccccatctcaaaaaaaaaaaaaaaaaaattaaagcgcttatgtaacattctagagtgggaggacttcgagacagtctgcgagaagctcctgcacaggtgggcaataagaccaacattgtgagcctgagtcttgagacagactgggggttgaattttgcccttactatagccagctgtgtgagttgggatgagttatttaacctacataagctccagtcactgaatacactggacaccaactgtgaggcaagcagctttttgctatggaaagcaggggtaatatcagtaccccccttcctcggatcgacataacttgcagttagatgctcccagacaactcgattcagtgtctggtgtgcaggagtttcactcaaatgtgaggataacccaatccacctgcaggcgctgggaggctggggtgtagtgactgggagctaaccggattagacagccatcagtaatactgtaggaagggcatccttgtagggtggggccactacgaccagtacggctcacccaggtgtagacagacgctggtagctcctggccagctcaaggtgtttccttttgcctggtaaccaggaggagtggctgaggcagggcatggagcggagcaacgcagctacaaagtgcggagaggagccccgctctggatcccgccggctccccaaggctgaaggagacaagtgagtggggagtcactgggaagagcatcccggcggagggct

SEQ ID NO: 5881 - DNA, 2300 bp, Homo sapien
ctcctgggtcacatccagctctggcccctgccagccctccccatttccatttccccactggatacccagggagggctaagtaaagactcgggtttgctttgaaataaaagcacatgctggccacagatagaaaggcggggagactcctttagcaaatgtatggagatcccagtgtgccggaccccaggctgaatgctgggttttctgttctcacagccaggaaagcacagatggaggtaagaggtgaggagagggacaaaatgatcacctgtcttctactcatgaggctttctggatcaggaggagtttcagcagttgtctaagtctagaagagagatggttgtatgtatgtgtgtgcgtgtatgtgtggcttggggtgacatgggaagtgtgaagggtgtccgaaagagagagattgggaaggagggaaatgagacaggttagtgggagatggattctgggggcaaggttcatggcatccctgggggctcctcaggaactggttgaataatctgtagcccctggacactaggcgtctacattggaccatttgctgtggttgttaggaggaggacaacattcctgttgcaggaagttagccgacaaccatcaatgaaggtcataaggatgagcagttcacaaagctcctacacccttgtttctcatttaatgtctgaaaaatccctgtaaagcataaaacagactcacaaaaggagggtcccagccaggtgcagtgactcacgcttatcattccagcactttgggaggctgaagcgggagggtcccttgagcccaggagttcaagaccagcctgggtaacatagtgagactccatctctacaaataattctagaaattagccaggcatggtggagtgaggtggtggtcccagcaacttgggaggctaaggtgagaggatcatctgagccagggaggtggaggttacagtgagctgagatcatgccaccactgcactctagcctgagcaacagagcaagaccctgtttcaaaaaataataataaagaagtcccttagcaaagaagtgttggagctaggggttgagttccaagtcccccataaggcaaaggccacaggctttttgccctgtgtcccaaggtaggggaaccaggcagagctggaatgtgtgctgtttgcttgcccaaaaacctatccaggcttacaggccaattgggagaaaacataaaacatcctccacagcctacattgagccaaacaaaacttgattttgagggattgtgcaggtgtgggaagaggaaagactcttgttatgggagtcaggatagcgggttccacctcgactgggcccttgctgtttgcgtgtcattgaatctctctgaaatgcagtttcttcacatataaaatgtggataaaagcgcctacctcctaggaatgatgtgaggactcaacaagagaatgcacgtgttgttctgaatgtagtacggtgcacatagcaagcactcagtactccttaggttttattattgccgttattaatacaaagaggttgtgctgcatggttgctcattcaggccctggtggctgtttcccaccttcagccctggctcctgtggctagagccctggtgcccacagctcaacctggacctgtccacccttgaagggctcatgatgcagcatcagggagtcccagatcgagccgctgacacctccaagtcggctgcagctgtgcatccgctcagaccacaagactcaatggaggatgctgacctctctttgttctcccaacgagtactaggcaaggagggaaggaaggtgagcgcttagaaaaaacgtgttggtttcaactgaaatgacattaagctatcgtggaggtaaaggagaggggttgagccggtcaggaatccaggcaacctgaccctatttgccagtgtccgcttttaattttggtcgctaagggcaagcgcccgtgacaaacatggcggcggcagcctcaggcgcagtcacctgccggagctgcgcccgggggccgcgcggagccaatcgctgggcgggggcggagggagaggctggggaagccctagaagtgcgcgcaggcgcattggctcgcacctggctcccgccagccgtgggattaggcttcgccggctacgattgcggtgagacgctggccagcggccggggctcgcgggcaggagcgggctgggctggggccgatctggcacaaacgacagacccgagggggaggggaatgctttgcgctctgggagtcatgggggctatctgcgggggtctttggggtgatcatattgtggattggg

SEQ ID NO: 5882 - DNA, 2300 bp, Homo sapien
cttgctgggtgtctgccgtctcttcccacaggctctctgtttcctcgagtcactcccagattagtggtgtctagctcagcactgtttctgttatacttcattcataattcccagcgctgttgtaagtacaaactctctcctgttggaaatgagtttttaaatgattcagaggtctggggttaagaacagagctggctctgatccctgttgctcactggttccttcttccccagggacgaggatgggaagaccgcctgtggccatgagccctccccggtgctcctggggctaaggctggggctgcagccatggggctgggtcagccccaggcctggttgctgggtctgcccacagctgtggtctatggctccctggctctcttcaccaccatcctgcacaatgtcttcctgctctactatgtggacacctttgtctcagtgtacaagatcaacaaaatggccttctgggtcggagaggtagggccagtgctgggtggctaacatggaggagggggtggggtggagactagaggctgcccaggctgctgggcagattgcaggtgcctggtcccacccagtcagaggcctgggcagtccaggttgttcaccaagactcatcaagaaaagctgtggaggccttgatgactcctcctcgatggggactagactagctttcctggccactgtcttacatagttgctgttctgtgtactcatatatataatatgttcacgtatatgaatttatcagctgcatacatttaccagctgggccctggatgggtgggagtttgaagggggcagtggtttgactggcagagtaggtttttttgtttttttttttgagatggagtttcacttttgtctcacaggctggagtgcaatggcgcaatctcagctcactgcaacctccgccttcgtggttcaagtgattctcctgtctcaacctcatgagtagatgggattacaagcacccgccaccacgcccggctaatttttgtatttttagtagagacggggtttcgccatgttggccaggctggtctcaaactcctgacctcaggtgatccacctgcctcggcctcccaaagtgctggtgtgagccaccagcgcctggccagagtgggttttagcagaggaactgacaccagcaaaggtttgcaggtaggaaagctggggccatctttcaggggtggtgagcaggctgaggggggaggagccctggagaggatgctgtctagagcccaccttcctgtctcccctctgcctgcagacagtgtttctcctctggaacagcctcaatgaccccctcttcggttggctcagtgaccggcagttcctcagctcccagccccggttggtgtattgggaacagctcgtaattggttcagtcccaccctactgctacccaggagggaggacccctgcctgtgtttggggtggggaaggaaggggagactatttcagtgttgcccatggctcttcccttactggggtccagggtgctctgtttgggttggagaggtggccttggacgtacacttgcctggctcggcaggggaagagatctaccctggcttggcttggttggcccctctggactgtggactgcaaacaccctctgctgcttctggaagattcctttgccccatccctgcttgagcccgtcatcacccccaaccttgagaagtgggcatcccataccctttggccatcagcccaacaggctaataagggggtggaaattggggcagaggaggagagtgtacccactggtgagttgtgcttcctaagttgcagactggggacttaggggacagtggcaccaccctgttgtgagtcccacaccctgggcctccatccctcccctggggcctgggcaaggggaacttcagcctgccaagtctgacacggcatctcccaacaactctcctttccccggcaggtcaggcgccgggctctcctcaagggctgtggtgctggcccgggtgcaggccctgggctggcatgggccgctgctggcgctgtcgttcctggcgttctgggtgccctgggccccagctggcctgcagttcttgctgtgcctgtgcctctatgatggcttcctgacgctcgtggacctgcaccaccatgccttgctggccgacctggccctctcagcccacgaccgcacccacctcaacttctactgctccctcttcagcgcggccggctccctctctgtctttgcatcctatgccttttggaacaaggaggatttctcctccttccgcgctttctgcgtgacactggctgtcagctc

SEQ ID NO: 5883 - DNA, 2300 bp, Homo sapien
gctgctgggcagattgcaggtgcctggtcccacccagtcagaggcctgggcagtccaggttgttcaccaagactcatcaagaaaagctgtggaggccttgatgactcctcctcgatggggactagactagctttcctggccactgtcttacatagttgctgttctgtgtactcatatatataatatgttcacgtatatgaatttatcagctgcatacatttaccagctgggccctggatgggtgggagtttgaagggggcagtggtttgactggcagagtaggtttttttgtttttttttttgagatggagtttcacttttgtctcacaggctggagtgcaatggcgcaatctcagctcactgcaacctccgccttcgtggttcaagtgattctcctgtctcaacctcatgagtagatgggattacaagcacccgccaccacgcccggctaatttttgtatttttagtagagacggggtttcgccatgttggccaggctggtctcaaactcctgacctcaggtgatccacctgcctcggcctcccaaagtgctggtgtgagccaccagcgcctggccagagtgggttttagcagaggaactgacaccagcaaaggtttgcaggtaggaaagctggggccatctttcaggggtggtgagcaggctgaggggggaggagccctggagaggatgctgtctagagcccaccttcctgtctcccctctgcctgcagacagtgtttctcctctggaacagcctcaatgaccccctcttcggttggctcagtgaccggcagttcctcagctcccagccccggttggtgtattgggaacagctcgtaattggttcagtcccaccctactgctacccaggagggaggacccctgcctgtgtttggggtggggaaggaaggggagactatttcagtgttgcccatggctcttcccttactggggtccagggtgctctgtttgggttggagaggtggccttggacgtacacttgcctggctcggcaggggaagagatctaccctggcttggcttggttggcccctctggactgtggactgcaaacaccctctgctgcttctggaagattcctttgccccatccctgcttgagcccgtcatcacccccaaccttgagaagtgggcatcccataccctttggccatcagcccaacaggctaataagggggtggaaattggggcagaggaggagagtgtacccactggtgagttgtgcttcctaagttgcagactggggacttaggggacagtggcaccaccctgttgtgagtcccacaccctgggcctccatccctcccctggggcctgggcaaggggaacttcagcctgccaagtctgacacggcatctcccaacaactctcctttccccggcaggtcaggcgccgggctctcctcaagggctgtggtgctggcccgggtgcaggccctgggctggcatgggccgctgctggcgctgtcgttcctggcgttctgggtgccctgggccccagctggcctgcagttcttgctgtgcctgtgcctctatgatggcttcctgacgctcgtggacctgcaccaccatgccttgctggccgacctggccctctcagcccacgaccgcacccacctcaacttctactgctccctcttcagcgcggccggctccctctctgtctttgcatcctatgccttttggaacaaggaggatttctcctccttccgcgctttctgcgtgacactggctgtcagctctgggctgggctttctgggggccacacagctgctgaggcggcgggttgaggcggcccgaaaggacccagggtgctcaggcctggttgtggatagcgggtgagtggccagccccggctcttcaggtcctcaccagcaaccttctaagtctgatttcggtgctgggtccccggctgatgggggctgccctgggatgtgttgggggataactctggccagccccaggcagttctccactcccttctgccccatagcctgtgtggagaggagctgcttgtaggcagtgaggaggcggacagcatcaccttgggccggtatctccggcagctggcacgccatcggaacttcctgtggttcgtgagcatggacctggtgcaggtatggggagcagctcccggcccctctacagctgggctggacttcactcaaggggacagactcctcaagagctgggaacttggccacgcatggtggctcatgcctgtagtcccagcactttgggaggctgaggtgggtggatcacttgaggacaggggttcgaga

SEQ ID NO: 5884 - DNA, 2300 bp, Homo sapien
tggaaatctggccttggcctcattgtctcccgggctcctttcaccagcatcctgtgctcctgactgaggcgcctttaaacccacgaaaaaaccgggaacgagctgccgaagttttcttcgagaccttcaatgtgcccgctcttttcatctccatgcaagctgtactcagcctgtgagtagcagctggctagcccggcccctgcggggaaagcagtcctttggcacagctgaggctggctctcctctggaatggttcagagtaacttgagccccctctgctagggaaaggttaaagatggtgggaaagagagagaggcttttgctgaaactgagcactgaggcttcgtagttgaaagcaaagaaggacatgtggctgctattgaccatatcccagtgtcaggactcctagtgggtttggtccccaaggccttggctgggcctgccgaggcagccacatgctgcagcagctcttcccggaggcccccgtaatgtgtccacttattattcagcacttactgtggccagctgctctgccaggctgtgagacaaccatgatccgaatgccaccacagtccttgttcccatcccccgtggctcctgtcacactcctaccccacctcacaccagagtgaggtctacggcagagattatccacaagtgacctacacgtgggatttatttgaccccattaacaaactgtgagccagcatttaaaaatcaagaggtgtcccatcaaaacccaaatttttggcttctctgaaaaaatgggaagatctgggaaggtcgggcacacattcccacagggcaaaaatcagctggagctgaagagcggctgccacttgagatggggctggcaagcccaccctccccacagcctgtccatgctctgttggcctctccgcactgaagcagggggtcagttgcctcacttgcctttttttggagggaggctgacaaaggtccccgggctctcaaaccagtaaagcagggtcttctcctgcctttgttttttatggaagtgaaaaatattcttatttttctttactcttacttttcctgcctggcccctgttgacatttgagggtttttgccttttgtctagagagttaaaactggcccctaggctgggtctctgaagcagctgaaggccaggccatctcagacaggaaggcctgctcttctgggtacggggagggaacttggagaagatcagcaacttccgttcaggtatttcatggcttgctccaacacctgggcttccttagtacccagtccattctacagaccctggagagaggcaggcccaagctttagtttagctgacattgaaccctaaataaagaagtgtatttcttcccagcgtgaggaggcagtgctgagtgacggtttgcccctttgcttcagttacgctacaggcaggaccacaggggtggtgctggattctggggatggagtcacccatgctgtgcccatctatgagggctttgccatgccccactccatcatgcgcatcgacatcgcgggccgggacgtctctcgcttcctgcgcctctacctgcgtaaggagggctacgacttccactcatcctctgagtttgagattgtcaaggccataaaagaagtaagtgctgccccctgggcctagggatggagtgggggttgggagcatagcacccaggaccttggtgacctgccagtgaagccaggcaaagcacctgcctgggggtccctggtgaggccttgttcttcccagccaggtctcccctacgtcacactgacagattcgccttcctgacgtgctgccatcttgttgggggaaagggagctgcttccatttcttcagttgggtgatggctacataggggctcagtatgttttttataccttatatgcaaattacatagggtttggttttgtttcattttgttttgtttctgagatggagtctcgctctgtcgcccaggctgcagtgcaatggtgtgatctcggctcactgtaacctctgcctcccgggttcaagcaatcgcttgaatcctgcctcagcctcccaagtagctgggattataggtgcctgccaccacaccccactaatttttgtatttttagcagagacatggtttcaccatgttgatcaggctggtctcaaactcctgaccacaagtgatctgcccgcctcagcctcccaaagtgctagaattgcagcatgagctaccgcgcccactcctggtttttttatttttatttttttaacatccttgaagaagtcataatacatttaaaacatttgtctttgtaagtaa

SEQ ID NO: 5885 - DNA, 2300 bp, Homo sapien
gcttcctttgtcactctcctttcttctcgacctttaccaactttgtaatttataatcacagtaatagctgacatcctacagcggtttctggcaccagattctcgggccccacccagatccacaccaccaagccgcagcgccggctgagaccgaaggaaaacttagccgttctccacccgcgggcgggcactcgcctctaggccccaccacccagagtcccggaagccaatccccacagccctggagcactgccccgccccttcaagagggaaaacaatatggcggcaaggaagaatggcaggggcgtgagccaatcaccgcagaggcctagcctcatccggcaaggctaagaggcggtatcattggctaagatggacagccagagcaaccaatagagcgatcggaaatgggggagagggcgggcgacgggaatctcacacagcggttaaggcccctagagccaagggcccaaggactggcttggactataactctttcctttatccactccagagttctccatcccacttttgctggctggccgccttgcctgcggactatgtgataaggggaggaaggaggcggcggtggctgaacgcgcctgacaggccgggccagtgacaaagagccggcggctcaggctgaaccccgggaagcgatcctttcgaggaggagagcccaagtccccttatagataggaaagacgcaactcacgttgtcgatcacgacaggctggttggcgatcacatcgtaggactccatggcagaggaatctctccttctggggaaggaactgcccagccgggtccgccgctagcgccactgacacgcatgcgcagtctagccgccggttcagggcggcgagggagcggcccgacctcgcctctgaagaactacaatccccagcaagctttgcgcctgggttagcgatctagcttgctttgttgcccgcctagtttaagattgggagtcgcatttccaatgcgcagtaccctgggatttgtggtctccctagattaaacagccagagacacaggttgatggtcatgttgcatgcctggatctgtagtccctttgaaggagttcgcagtgcatgctgaggtatgtagtcttctcgagtacttgtctgtagttcggtttggattggtcgtaattcatggatgtttggattttgcagatcagccctgccactccccccgacgttcccttagacaatataaggttctcatgtttttatttgggtctgtaagactttaataaacatctcctagcacctcacactctaacaaaaaggaaatgttaacacacgtacgcgagaggacatattcctacaacaaaggaaaacaatttaaattgcataaaattagctttaagtttaaaaacctgtacattgtcgttgccttttgcattttctttttttctgcataacaggctaacattgatccgaagattggcaattggaactactggtataggtaatcttttggtcattaaaacatcatctaagggtttcagaaactgctcgagtatctctttaattttcataacgagctagaattgacactgatggttgagaaaatggaggtgaagagaggttatgtgtcactgctttcaaatgagcccagtgcatttttttctctggattatgttctcccccagcccccttgaaatttcagggacctttttgtcaatagccctagaaaacattagatttattatcatctattaatactaacgccccatggatgaatgaatcaatccattgtcagatttatgtttaaatcctagttagcagcgcgtcagcaaaacagtaacaaatcctttgttggcgcacttctcgctgctttcgtgggaccttagcacctcagagggtgctcagcatctctaaacttgggttcctcctaacactagggggagaccaagagccttgggacactcccaacacagggaggggaggcggggcctattgtcaagtcacaccttccctgcctgtgactggcacagacattagccaatgggtgcttggatagggtgcgccggcgccccgccccccttagcgccccgccgccccgaggcaccctctggcagactcggcggcggcgacagcctgggcggacagtgcgccgtgcgcaggcgcggagctagacctcgctgcagcccccatcgcctcggggagtctcacccaccgagtccgcccgctggcccgtcagtgctctccccgtcgtttgccctctccagttcccccagtgcctgccctacgcaccccgatggcggagctgcggcctagcggcgcccccggc

SEQ ID NO: 5886 - DNA, 2300 bp, Homo sapien
cccgaaccccccattctatgcagtctcgtgccctctgagcttcttcggcttcgctcctccaaagccctctcaaatgctccccaggccccgcctcgcctctcccatcccacttcggccgcccccgcttggcttcccctcgcccactaatgaccccctacaggcgccccctcttttcaccacgtttacagttccctcgctcctgccgttcccccctctgctcctacacacacccccagtcctcactctattctcctaatcccggttaacccctcagtacccacgggctccgttaacccctttgtccccattcccaacttgagccttaactccttccctcgcagcaagaagccctccttctgagtgctttaaccattctctacccctcctcccacctcccacaaattacttcgccctcggcgctttaaccctttccagcccgcgcctgtccgtctccccgcggcccagagcataccagtacttgacgatagcggtaacctggagcgggttcggctggtcagggtaaaggcggcggcactctccgtagatggcgtgcagtcccgggggaaagagcgaagcgaaggccgggggggcagtcgggccaggggccgggggcgcggtggggccgggggcgccgctaggccgcagctccgccatcggggtgcgtagggcaggcactgggggaactggagagggcaaacgacggggagagcactgacgggccagcgggcggactcggtgggtgagactccccgaggcgatgggggctgcagcgaggtctagctccgcgcctgcgcacggcgcactgtccgcccaggctgtcgccgccgccgagtctgccagagggtgcctcggggcggcggggcgctaaggggggcggggcgccggcgcaccctatccaagcacccattggctaatgtctgtgccagtcacaggcagggaaggtgtgacttgacaataggccccgcctcccctccctgtgttgggagtgtcccaaggctcttggtctccccctagtgttaggaggaacccaagtttagagatgctgagcaccctctgaggtgctaaggtcccacgaaagcagcgagaagtgcgccaacaaaggatttgttactgttttgctgacgcgctgctaactaggatttaaacataaatctgacaatggattgattcattcatccatggggcgttagtattaatagatgataataaatctaatgttttctagggctattgacaaaaaggtccctgaaatttcaagggggctgggggagaacataatccagagaaaaaaatgcactgggctcatttgaaagcagtgacacataacctctcttcacctccattttctcaaccatcagtgtcaattctagctcgttatgaaaattaaagagatactcgagcagtttctgaaacccttagatgatgttttaatgaccaaaagattacctataccagtagttccaattgccaatcttcggatcaatgttagcctgttatgcagaaaaaaagaaaatgcaaaaggcaacgacaatgtacaggtttttaaacttaaagctaattttatgcaatttaaattgttttcctttgttgtaggaatatgtcctctcgcgtacgtgtgttaacatttcctttttgttagagtgtgaggtgctaggagatgtttattaaagtcttacagacccaaataaaaacatgagaaccttatattgtctaagggaacgtcggggggagtggcagggctgatctgcaaaatccaaacatccatgaattacgaccaatccaaaccgaactacagacaagtactcgagaagactacatacctcagcatgcactgcgaactccttcaaagggactacagatccaggcatgcaacatgaccatcaacctgtgtctctggctgtttaatctagggagaccacaaatcccagggtactgcgcattggaaatgcgactcccaatcttaaactaggcgggcaacaaagcaagctagatcgctaacccaggcgcaaagcttgctggggattgtagttcttcagaggcgaggtcgggccgctccctcgccgccctgaaccggcggctagactgcgcatgcgtgtcagtggcgctagcggcggacccggctgggcagttccttccccagaaggagagattcctctgccatggagtcctacgatgtgatcgccaaccagcctgtcgtgatcgacaacgtgagttgcgtctttcctatctataaggggacttgggctctcctcctcgaaaggatcgcttcccggggttcagcctgagccgccggctctttg

SEQ ID NO: 5887 - DNA, 2300 bp, Homo sapien
cctcgccccccagcgccgcagctctccgcccccttcccgagtagcgggaccggccttgatgtagggacaccaccccccgtctccttccgccccagcccgggagctcggctcgctgcagcccctggccctcccgtttccccaccctgcctgccccgctctgctccgaacccattgtatacggccggctgcggactcccaggccgggccgtggcgggggccccgggacccccgagtgcccctccggctggtcccgcgggccgcggcatctccgccgccgccttcctcgcggcggcggcgagggcgccctttcctccccgcgcgggtgacggggacgcacccccaccccggggcgccccttcgcggggggagagccgggcccgagcaagtcgaggcaggaaagggccgccacggactgcccggcccgccgatcgtttttattatcgagattattattaaaagggggcggggaccccaggacgcgggggaggggctggatacgcaggtatttttattaaacagattattcctgaaataataatacgcgcaagatggctgaaggtggctgtgatgagagtgttggggttgggatttttttcttcctgttttttcttttttgatctgaggataaagctctgaggcgacagcggctgcggagaccctgcccgaagcgccctcccctcccttgagaagccgcgggcagacagacggacctcggaccgagcaacgggtgcgggcccgccccggacgcgtcgcctgggcagcagccggggaccgcgggctctcgcctttctgccgacttcttccaattctcatcttcttttattttttggacaggaccggggtgggtggagcagaggtggagagaaatcgggacttggcattttctccctctctctctcctaatttgttggaggccgccagccctccccttggaaaaaaaaaaatcccaccaaaaaaaaaaaaaaaagaatcaggagcgagaggacgccgcggggccctcagcgagcgcgcccagaccccggccgccgccgcggagcccaagatggctgggcgctgagggtggcggctcggcctggccccgccgccgcaggctggctccgaccgcagccccgagccttccaggccccagcagaggccgagaagaaaagaaagtggggaggagggggccgggggggcgaagggggagggccgggggaggggaggggagggccgggagccgagcctcctgttcattagcagttgagaaaaattcctttctagtttgatcaatccttgttttcctcggcagagcccgggcgcccgcccagcgcggagacgggcgcgcggggtctctccgcggcgggggcgccgggcctcgggggagcgcagaagtagccgcccgggggtcaggccggagcgccgccggggcttctccctccctccctcgccggttgcctttttttccacttctctccctcccccttccgtttctatttgtgaagggaggaggaaggcagaggcgggctggtgtctctggccggggactggaatttcatctgaatgactgcccctgcgcgcacgcagcgccccggagtcggcccgcccgcgccccgcagcccgcgcccggccagccagccgggggacgcctgcaccgtggcccggggaccgccggcctgcccctcccgccccgtccggatctagcagccctcggcgcggccgccctcgcctcctggccccgcagaccccgggctccggcccctgcgagggaggtgcggcgccgacgagccaggcaggagccgccgctgccgccgccgccggaagaagtgtgctgctcccaagctccgtctgccgcggggcgcgccccaatgtcagccgcggggacgagcgcaggccgcgggccgccactgccctagccgcgccgacggggaggcggcctcttatatggaatttggaccccggcgctcccctccaaggctggagtcccggccgcggccctggcgcagtccgccgcctcccgctaggcgctcgggaggaggaggagacgcagcccgctgcgcgcgcggcgtgaggaccgcggctccctcctccggggggcgggcacgcggaaggcgctgctgactgagcgaccgtcggggccggctggggccggagctcggggctcggtgggcctacagcggctccggacggacccccggggctggggagtcggggaggcctgccccggccccctgcccgcggccgccatggcggagaattggaagaactgcttcgaggaggagctcatctgccctatctgcctgcacgttttcgtggagccagtg

SEQ ID NO: 5888 - DNA, 2300 bp, Homo sapien
taatttgtcttaatttcttattgttcatcttaggaaaaaggaaaaaagaaaaacaaaatctgttttcatcattgaacacaacagttgtatacaacagtgttgtatatacactgtaaatttgttgtatactgtgccaatttgcacctggaaacatgggcagtggttaatttactgtggcctgtaattataaattaaacaatcatggattacacagtacacttaattgatcaacaaactgggaaaagttagccaactctcatgcacttctcatccataatgatgaatctcaatctctgttggttcggcatgcccttttcattccaattctagctattttctgggtaaatatttatgtttgtactcatttgttgagaaaaactttaactttaaaaggacagctcacgtataaatgattaagaaaaagaaacagttgtaaaaatctgtttagcctgaggttaaaaaaaaactgcaagtgtagcaagtgtgaaatgtgattggcaacttcagatcaaataaccctacttctttaacaatctgacaatgtaaaatcaattgagttttttttttcctttctaaatctactcactggataatctgaccaaacatacatctatttttttttttcctgggcatctagtttttttgtttttttttttacttcttaaatcaacagaaatggctcaacatttctaaaagtcaagaaaggaactaggaagagagttggagcagtgactataagtttgatgacaggctctttgcagccaactaacctgctttaagtgttcaaaatcaatttttctttgatagctctaaaattactcaattccattttaactccctccaactaactgtacagacattaacaagaaacagagtgtcaacggtcagatctgtcacaaccataatttagaatttgggaaagctttaattgggactgacagagaaaagccttgccccggattgaagttcgatctccatttttaacttctcgttcttttcagtttggagaactcaagctaggattaagatcttttggtcctggtatggtcacacgcaagaggagactgcaaaaggtttcgaaggaaattctagagacggagcagctaatatgtcttcatcaacatggattatgtattgaatgaaaaatcggtcatcaccaacaatcagatcctgcaaaactctcagcaaataactaaataattcgggactgaggaagcgcacccgccacgcagacaccaagacggcgtaaaatccaccaggcatcccttccaagcggcacccctttgtgtcgtgggacttacttccctaccccccaggggcccgcacagcgcgagaaggaggagagctaggctaccatctcccctgctaccgccagggcgacctcagagccaatggggccggccttctctccgcttctggccgggctccagacgaaccccactttactgcaaagccgcgagaccgattgcccgggaagtctaagcctgctagcgaaagctgctctccgcagttcctgggatccgccctcacccctgtccccagagtaatgatggagcccgggctccgcacccggccagccgcgcactctgccagccccttccccaagcctcggacccgctgcaagccccgccttcctctccaggcccaggcctccctccagggcccaccctcgggtctccccgccgacccccgaaatcagtccacaacccagatagcaggctgagcgacgtcccattccctccttggctttaagcgcagtgctccgccctgggcctggggacgggagggggataaccggccggctccaagggggcccaggcccccacactcaccatcctcccgccgagtccctcctcctcctcctcctcctgctgcctcccccgttaccaggggcaactgctgcggcgccgcccccgacgtccctcgcacgcacagctgaggagctgagcagcaatacggggcggggtgcagctccgctttccccagagtgcgcaagtgcgctaaggcgcccgcccacgcagtgggcgggctacgggagctgcagaggccgccgccggctcgcctggaccagggagtggagaaagcctgcccacgtggctggcgggagcctcccggcctgggattggtcgaaaaggaggggcgtggggcgggcgtgggggcagttccccagcccaggtcctcctctcacccgggccagttttcaaggcgggctgtaactggtggcatttgtcccgggaccaggtaaggggccttgggacaatggcgctcgccctgtctacctccaatccccacatctcggg

SEQ ID NO: 5889 - DNA, 2300 bp, Homo sapien
aaaaaagtaatagactactgccacctctgacgtaatgctcatccttcccagaaagagcagattttctctggcaaatggtatcagagatcagaaaacaagcttccaaattccttctgaggtatcctcttacaagcagaagtgcacaagattactgtttgtagccccaggtagggagaaaaacgaaacatcatcgctggtactcacatcagaggaagatcaaggtagccaaagaccccagaaggtcagacacaaagaccactgagacaggcaaggattaaggtcaaggctgcctagagcaagctggaaaatgagggtaataattacaagagcaggcccaggtataggcttatgggtactcgtctgactccaaggcaagtgggctgttaggcaccagacaacttagaaagagcaacctcccttgcctttttcacaaaagggccaacagtctggagatgagtagattataggggtttgtgctcctgtatcacctccattcatcacctccttagtcaaggctctgaactgctttttctctccaaggatctgaagcaggtatgcaagcagcagatgttgatttttgttttcatttttttttttttttttgaggcagggtcttgctctttcacccaggctggagtacagtgatgtgataatagctcctgggctcaagcaatcctccagcctcaacctcccgagtagctaggactacaagtgcgccacggaacctggctaattaaaaaaaatttttttttgtagaggcagggtcctactgtgttgcccgggctggtctccaactcctgggctcaagccttcctccccttccacctctcaaagtgctgggattataggcatgagccactgcgcctggccgcaattaccaatttctaggggttgtgaaaatgaaatttggtatgaaatgtatttcattaggaaggatgtaatttccatacgggctgattttgtccactgctgtgtctccagcgtctagaacagggcctagcacgtttgtgtaaactcttcttatagtcctctgcatcgggaaagggatgggaggtagcacttcccaacccaccccagtgtcccacttgctcttccttggctaaaaatgcaggctcatttttgcctcctccaggactacagatggtacgcggtcctgtccaaagcagcttagcaaaaccggccagaggctgggcacagtggctcaccactttggaacacctgtagtctcagcactttgggaggcctaggcgggcggatggcttgaccccaggagttcgagcccagcctgggcaacatggcgaaactccgtctctacaaaaacaaaatacaaaaaattatccaggcgtggtggcgcccgcctgcaatcccagctactcgagagtctgaggcgggagaatcgcttaagcctgtgaggcaaaggctgcagtgagccgagatcgcgccaccgcactccggcccgggcgacagagcgacaccctgtgtcaaaacaaaaaccgggccgatccccaaaacgcctttcacctgtgctttcagctcacctcagggctcagggccagcccccaggctgcttcttgccctccgacagacggcctccccccatcggtactcccccatcccggacagctcgtaacgccccagccgctcggcctggcactcctaggcaatgggggtcagagcagaggggcccatctgcagccccagggcgcacttcgcgccacgtggcttctgcaggtggaagtccagcccgcgctgcagccccgcctgggcagtcaggacagcaatctcagcacccacccgagatgtggggattggaggtagacagggcgagcgccattgtcccaaggccccttacctggtcccgggacaaatgccaccagttacagcccgccttgaaaactggcccgggtgagaggaggacctgggctggggaactgcccccacgcccgccccacgcccctccttttcgaccaatcccaggccgggaggctcccgccagccacgtgggcaggctttctccactccctggtccaggcgagccggcggcggcctctgcagctcccgtagcccgcccactgcgtgggcgggcgccttagcgcacttgcgcactctggggaaagcggagctgcaccccgccccgtattgctgctcagctcctcagctgtgcgtgcgagggacgtcgggggcggcgccgcagcagttgcccctggtaacgggggaggcagcaggaggaggaggaggaggagggactcggcgggaggatggtgagtgtgggggcctgggcccccttggagccggccggt

SEQ ID NO: 5890 - DNA, 2300 bp, Homo sapien
agggagtggagaaagcctgcccacgtggctggcgggagcctcccggcctgggattggtcgaaaaggaggggcgtggggcgggcgtgggggcagttccccagcccaggtcctcctctcacccgggccagttttcaaggcgggctgtaactggtggcatttgtcccgggaccaggtaaggggccttgggacaatggcgctcgccctgtctacctccaatccccacatctcgggtgggtgctgagattgctgtcctgactgcccaggcggggctgcagcgcgggctggacttccacctgcagaagccacgtggcgcgaagtgcgccctggggctgcagatgggcccctctgctctgacccccattgcctaggagtgccaggccgagcggctggggcgttacgagctgtccgggatgggggagtaccgatggggggaggccgtctgtcggagggcaagaagcagcctgggggctggccctgagccctgaggtgagctgaaagcacaggtgaaaggcgttttggggatcggcccggtttttgttttgacacagggtgtcgctctgtcgcccgggccggagtgcggtggcgcgatctcggctcactgcagcctttgcctcacaggcttaagcgattctcccgcctcagactctcgagtagctgggattgcaggcgggcgccaccacgcctggataattttttgtattttgtttttgtagagacggagtttcgccatgttgcccaggctgggctcgaactcctggggtcaagccatccgcccgcctaggcctcccaaagtgctgagactacaggtgttccaaagtggtgagccactgtgcccagcctctggccggttttgctaagctgctttggacaggaccgcgtaccatctgtagtcctggaggaggcaaaaatgagcctgcatttttagccaaggaagagcaagtgggacactggggtgggttgggaagtgctacctcccatccctttcccgatgcagaggactataagaagagtttacacaaacgtgctaggccctgttctagacgctggagacacagcagtggacaaaatcagcccgtatggaaattacatccttcctaatgaaatacatttcataccaaatttcattttcacaacccctagaaattggtaattgcggccaggcgcagtggctcatgcctataatcccagcactttgagaggtggaaggggaggaaggcttgagcccaggagttggagaccagcccgggcaacacagtaggaccctgcctctacaaaaaaaaattttttttaattagccaggttccgtggcgcacttgtagtcctagctactcgggaggttgaggctggaggattgcttgagcccaggagctattatcacatcactgtactccagcctgggtgaaagagcaagaccctgcctcaaaaaaaaaaaaaaaaatgaaaacaaaaatcaacatctgctgcttgcatacctgcttcagatccttggagagaaaaagcagttcagagccttgactaaggaggtgatgaatggaggtgatacaggagcacaaacccctataatctactcatctccagactgttggcccttttgtgaaaaaggcaagggaggttgctctttctaagttgtctggtgcctaacagcccacttgccttggagtcagacgagtacccataagcctatacctgggcctgctcttgtaattattaccctcattttccagcttgctctaggcagccttgaccttaatccttgcctgtctcagtggtctttgtgtctgaccttctggggtctttggctaccttgatcttcctctgatgtgagtaccagcgatgatgtttcgtttttctccctacctggggctacaaacagtaatcttgtgcacttctgcttgtaagaggatacctcagaaggaatttggaagcttgttttctgatctctgataccatttgccagagaaaatctgctctttctgggaaggatgagcattacgtcagaggtggcagtagtctattactttttttttctctttgtttccctctctttctttcctttttttttttttttttttttttgagatggagtttcactcttattgcccaggctggagtgcaacggtgcgatctcggctcatcacaacctccacctctcgggttcaaacgattctcctgccttagcctcccaagtagctgggattacaggtatgcaccaccacgcctggctaattttttatttttagtagagacgggggtttctccatgttggtcaggctggtcttgaactctcaacctcaggtgat

SEQ ID NO: 5891 - DNA, 2300 bp, Homo sapien
tgctgcgtatgttttgtggttctcagtggttgccagggaaccgaggaagtgaaaggaaggggttgaaagcagcctcattgctgttccctgggcggctgtgccttgatgtccagccttgtctgtatggcagtttggcctggttgtgagagtggtgacaaggcctgggatagactgaccatgtcttgagaatatgtatgtgctgaagaatggcttcccagtccccaaacaccggcagcagcaggagccacttcttttacacatcagccaccttttcctctagcaatgaagctgtgatccattctttcagtgagtctcaaggaaatggttcagccagtttggcacattcattttcttgtcaggaaagtcaatgtgaccttgaccatcattggggacctgcggtaaacacgttgtgtgtctggctggattctaatgatcaaacagtgcttttggcacctcactgtgctgtacgtgtcatgtgctcctaatttattgtcctaggttgggggttataggtactaatttgcaagaatcatttctgacttacatggatcatgcccagcacagtgccactaccatggaggccttggataagtatcatgaaagaaaattgttgcagaaaatgaaaggaaagatgaaatatacttgctttgagtcctggacagtgtaattaatttgtagctgaggaagttattgaaaagtaactttttgtaatcccagcactttaggaggctaaggtgggcagatcacttgagcccaggagttcaagaccagcctgggcaacatggcgaaaccccatctctacacaaaaaaacaaaaattagctgcgcatggtagcacgtgcctgtggtaccagctccttgggaggctgaggtgggaggatcgcttgagctcggaaggcagaggttgcagtgagccaagatcatcacaccactgtactccagcctgggtaacagagtgagaccctatctcaaaaaaaaaaaaaaaaaaaaaaaagtaactttcgatttataaagctcctctgaagattgttctccttgagtcatttctggaaatccgaacccaaacatggaccttttgtgctgtgcaagtgttgtctttggtagaggattcaggccgagggagagctgctgtgacctcctgtttcagggagggtagccagaagggatttggcttacaccaccgactagggaaagtcagagcaggacaccatccccagggcccttgcttgtgcaaagcttgcgttagagaactcttgtctccctgagctgaacttagtgaagaaagcacgacaaacctaaggcggtgaacttttctgaaccaagagttggtttaaatatagatgatctgcctttctggcaacttggaggctgcggtgggacttgttgtaccttttataagacaagtgaggaaagatgttggcacctgtacttgcgcagtttgtttatgaaatataaactctccggtggaagcgagggctcgaaaggtcagtgtccaaggtagcgtgtcgtaccttagctggggaaaaggtgcctctccaagcccccgctgcgaattgcctcattccctagagaaagttgggacagccaggcttcatgtcctattatttactgagcaccgactctggcaggggtgggggtggaaaagtttctgtgaaactgacagacactggacttgattttctttcccagggaggagaaacaatactctaggagctacaaagtcagtccttattcagagcagtgttcctgttttcagctttagagacttgatttatgtaccccccagcctgcttagagccaaggggttgcagcagcctgctcccatctgcagcccccaccatcctcccacagtgggctctggctctaggtgggtccagggctgggcatcgcgggtctgcagcacatcctcctcagtattccagtgcagctgtctgaagttttttctgctgcgcctgaactgatgtcatttcccccttggcagacagcttcggctttgctgcgtctgagatatgtcacgagaaggtgggggtgggccagagccaggcagggggagtagcgaggagagcaggagacagtgtgcctgctcggtcccaggactctgtttactttgtctgctttgctaaagaaggccggtgaaccaggaccaccgcacacacaggcccaccaggggcaatgctcattccaagaccttaacttttaagagccctttgttccaacgttagtgtggacgatgctcttgcaggatgcctttccttttgggtcttagacaggtaattgtttctgcacggatcgggtttggaa

SEQ ID NO: 5892 - DNA, 2300 bp, Homo sapien
ttaaagaaacaaatttttgaagcctctcaagctcatttatccattgtgcctggagctgaggcgttagatcaggtggcagaaagtctttctggactaaactccacaacttggattaagtctactgggggctccactgtaggaaattttggaatcatgtttctctgtttaatcggcttgtttttagtgtgccagaccagtcaaagaatcctgcatcaaaaccgagagaacgagcaagccttcatcgccacggcacatttatataaaaagaaagggagagatgttgcgggaagtcagggaccctgaatggagggactggctggagccatggcagaggaacataaattgtgaagatttcattttaatatggacatttatcagttcccaaataatacttttataatttcttatgcctgtctttactttaatctcttaatcctgttatctttgtaagctgaggatgtttgtcacttcaggaccactgtgataattgtgttaactgtacaaattgattgtaagacatgtgtttgaacaatatgaaattagtgcaccttgaaaaagaacagaataagagcaatttttagggaacaagggaaaacaaccataaggtctgactgcctgcagggtcgggcagaaagagccatattttccttcttgagagaggctataaatggacatgcaagtagggaagatatcactaaattcttttcctagcaaggagtattattattaataccctgggaaaggaatgcattcctggggggaggtctataaacagccgctctgggaatgtctatcttgtgcagttgagataaggactgagatacgccctggtctcctgcagtaccctcaggcttactagggtggggaaaaactccgccctggtaaatttgtggtcagaccggttctctgctgtcgaaccctgtttgctgttgtttaaggtgtttatcaagacagtatgtgcaccgctgaacatagaccctcatctgtagttctgcttttgccctttgccttgtgatctttgttggacccttatcagtggttctgcttttgccctttgccttgtgatctttgttggacccttatcggtagttctgcttttgccctttgtcctttccctcagaagcatgtgatctttgttagacacttattagtagttctgcttttcgccctttgaagcatgtgatctttgtacctactccctgttcttacaccccctcccctttttgaaacccttaataaaaacttgctggtttgaggctcaggtgggtatcacagtcctaccgatatgtgatgccacccccggcggcccagctgtaaaattcctctctttatactgtctctctttatttctcagccggctgacacttatagaaagaacctacgttgaaatattgggggtgggttcccccagtacgctagtcctgctgatgagcaaagaaggtgttgatggcattttgatcaacaagaaatgttatgaaacggcctcccacctctggcattcctagtactgacctatctctcccttcccttccaccgctccccacagcttagcacccctttcgttcccatacacatgtacatttttattttggggaccattaacccacagcccttatcgctgccaaaaccacatgggctggagggccagggctgcatggacagtcacaccactgcacaccagcctggtgatggagcaagactctgaaaaaaaaaaaaagaagcataaaagacctttaacagtccctgctacttgtgaccctcctgaatctgtcatctgtccagtgattttgattttgcaacatggaaagttccaagccttgactcctgagcccagataccattcgcactctggagtcattcaagcatggggagctcctcagagggtgatcaactgacctcccttacctagctcctcctccggaggtttgccctggagttgagccagcccttgaggaggccttcactcccaccgcctctctcccttctggatatgagctcaggcctggctgggctccaggagaatctttccacaaggcaagagataacacaaagtcaaggtgaagatcagggtagccctttaaaaggcctccttgtgccctagagttgccacagctcttctactccactgctgtctatcttgcctgccggcacccagccaccatgtgggagctcgtggctctcttgctgcttaccctagcttatttgttttggcccaagagaaggtgccctggtgccaagtaccccaagagcctcctgtccctgcccctggtgggcagcctgccattcctccccagacacgg

SEQ ID NO: 5893 - DNA, 2300 bp, Homo sapien
tgccactgcactccagcctgggtgacaaagcaagactccatctcaaaaaataatgttgttattgtacataaattataacataaattcatgcacataaactcaataaagtttattaaggacaaaaagtaaacagtaaatgagattcaacggagacatatgaatctagacacttggaagaggaagtaatgttgatattgaatacaggtaattttgaacaaaattttcaatacaataacattctcacatcttttattaactaaaaaagaaatggagctacttgaaatattttattttttttttgagacagagtctcactctgtcgcctaggctggaatacagtggcatgatctcggctcactgcaacctctgcctcccgggttcaagaaattctcctgcctcagcctccagagtagctgggactacaggtgcccaccaccacgcccggctaatttttgtatttttagtagagacggggttccaccatgttgggcaggctggtctcgaactcctgacctcaggtgatcctcccgcctcaacttcccaaagtgctgggattacaggcgtgagccacggcacctggcctacttgaaatattttacatattaattcacttacaaggtggttaccatcagtttggtattaatacaataaagaggttatcaataaaaattactagtgatgttgagcatttttcacatttatcagccagttgatttttttttttgaattgcctacttgtgccttttgccaatttttctattagattgtttttccttcttcatttgtttacaggcctatctgcctcatcagcctgggagttccacagagacaagaactgtatttcatttctttctctatccccagcctagtacagtgtctggtatttagttcatgaaatgtttgttaaaattgaatggaatgaggccaggtgcagtggctcacgcctgtaatcccaccattttggaaggccaaggctggtggatcattagatgtcaggaatttgagaccagcctggccaacatggtgaaaccctatctctactaaaaatacaaaaattagccgggcctggtggcaagcacctgtaatcccagctacttgggaggctgaggcaggagaatcacttgaactcaggaggcggatgttgcagtgagctgagatcgagccactgcactccagcctgggcaacaaagcgagactccatctcaaaaaaaaaataaaataaaataaaattaaataaaatgagacaagttatcgctatgttgcccaggctgctgatactgaactcctggccttgagtgacccttctgcctcggcctcccaaagtgctgggactacaggtgtgtcaccatatggataggttggccttgaactcctgacctcaagtgatccaccttggcctttcaaagtgttgggattacaggcgtgagccaccacgcctggccccttgtctcaattaatcaaaaaaaggcctaggcaacagaacaagactctggggaaaaaaaaatatatatgtatatatatatgtgtatatatatgtatatatatgtatatatgtgtatatatgtgtatatatatgtgtatatatatatatgtgtatatatatatgaatggaatgatattctcataaccccttggaaacattattacttctgtttaacagatgaggaatataagacagaagctgagtaatttgcagccacacactgctaaatggtagcattgggactgtaatccgggccttctgattctttttaattatttgtattaattttaattttattttatttttaaagagatggagtttcgctatgttgcccagggtggtctggaactctcaggctcaggtgatcctcctgcctgggtctcccaaagggctgggatttcaggcgtgcgccgccatgccctgccgcaggctttccgattctgaaccatagagtcaatgaaactgtcctccatcccctccagagatgtttgcctggaccctgttttcctcaggatatcaatgaatagttcatgagtttagtgagcaaaggtcaacctccatcaggcgcatgcgtcccttccttttcccatggaggaagagacgcctcttttccttccgctttgcttgtcttttggccccggcgactcaccatcgtcagtgcgcaaccgttcgctaactgaaatgatggcgactggaacgccagagtctcaagcgcggttcggtcagtccgtgaaggggcttctcacggagaaggtgaccacctgtggtactgacgtaatcgcgctcaccaagcaggtgctgaaaggctcccggagct

SEQ ID NO: 5894 - DNA, 2300 bp, Homo sapien
atcaggagttcgagacagcctggccaacatggtgaaaccctgtctctactaaaaatacaaattagccaggcatggtagtgcatgcctgtaattccagctacttgggaggctgaggcaggagaatcgcttgaaccggggaggcagaggttgcagtgagccgagattgcgccattgcgctccagcttgggcaacaagagcgaaactctgtctcaaaaaaaaaaaaaaaaaaaaaggattgtcaaatgattcttgtaagtaaaccataaattaaagataacaaaacaagcacaagagaaaaatgatacagccctttccttgacctctcactaatctgcccttttaagataaagatatcattttaactatgagaaggtaactgcttttctaaaggagctcattttatgaagataatattttgaaaactaatatttaggagtgttttcaccattctatgattgcccaaaaactaagtgatacttataaaaacactaagttttatacatatactagttggaaatattccaagctgtagaaatattccaacaaggattatttccatggggttaatttgttaaaaatataaaagacaccacctttctattaatttgtaacaactaattgacatcagagaagatgaaaatttactagctggatatcaaccagatttttgtattattggcaactgagattgaaaaatgaatgaaagagtctacttcatccatttagatatcctttcacttggatctccctgtttccttactgtcctaatgaatagaaatgatcgttacaagctgggcatggtggcttgcacctgtagtcccagctactggggaggctgaggagggaggatggcttgaggccagagttgaaggatccagagatgattgcgcagtgacgctaagcttgggccacagagttgagaccctgtctctaaaaatttttttttaatttaaattataaaaagagaaatgcttgttacaaccacaaagggaaacaagatatacacatataattgtggaagtaaaaataaataatttaaaaatacttttgggtgctcgcttcggcagcacatatagttggaatgatagagaagatttgcatggcccctgcgcaagatgacatacaaattcgtgaagtgttccatatttaaaaaaacaaaaaatacttttgggcctggcactgtggctcatgcctgtaatccaaacactttgggaggctgaggcgggcggattgcttgaacccaggagttggagaccagcctggacaacatggtgaaatcccgtctctataaaaaaatacaaaaattaaccaggtgtggtggtgcacgcctgtaatccaaggtacttgggaggctgaggcgggaggatcgcttgagccaggaggttgggcctgggtaacagagaccgtctcaaaaaaatttaaaaattaaaaaaaaaactttctgcaagatgaagtgacaatacctggaaaatacatgtgacttgaccaaaaattactataggtgaaaataaatttagcaaagttgctttcctaaatacaacccaaaatagactgggaacagctacatactgttaatggttccctctatgtgacattctagaaaaggcagaactatagggagggaaaacatctgtggttgcccaggagctaggggtgggaagagggaatttactacaaagaggcacgaagaaacttgtgggccagagctattttggtctccgttttggtgatgtatatacgtttgccagagttcacagaactgcacactgaagaaagatggatttcacggaatgtgaattatatctcaacaaacttgacttcaaaaaacagatcgagaaaagatgattctattcccaaaaagggggaggggggaagatcattatataggtgagtgttcatttaaatcagagtacgagatttatccgtgaaaatcgcagtggagcgaacaagggggatgctgataccgacctcctggttggaaagcctgtagagcagcgcggatgacagtggaacagcgggtcaggcggtgggcgcctgagcgaggggctagagcgggatgggcgggcggagcaagcctgccagcctgggcggggcctcggcacaggagctggctgcgggagcccgccgtcctgagtcgcaggccgaggagacagtgagtgcgcgccctgagtcgcaggccgaggagacagtgagtgcgcgccctgagtcgcaggccgaggagacagtgagtgcgcgccctgggcgccccgccccagcccccagccccttccctgggcccccgcaaggcgggaacgcgagcg

SEQ ID NO: 5895 - DNA, 2300 bp, Homo sapien
aaccaaatcaataatttacatagtgtattagaaagtgatctttgctttcaagaaaaataaagtagacgcggcatagagggagtgttttccgcaagtttaaaatcagatggcttttgagcaaagcactaaaggaggtgaacaacaaggctatgctgacatctgggggaagaaagtcccaagcccaggaaacaaacagtaagtgcaaaggctcgcaagggaaaatccctggagtgatggagaaacagtttggagagaaattaatttggcttattatcagtctccttccactaggagagcagcaggtaatgaggtccgagaagtaacgggaggtagcagaccttcgagcctagtaggatgttgtaggtcctttggctttctctaggatgagatgggaagccaatggaggcgtttcagccaagggagcaacagaatctcatggacaagatcacttgctgctgggttgagaagggaaaggaacaggtatcgaagaggaaagatcagttaggaggccactgcaatcattccagaaattactcataccagaaattaatcagagacgtttgatgcatttacaaaagcggtggtaggggggcgcgggatgtgcttgtagaatacaaaagaggtagagaaacattaaacattttgaatgttttaagtttcttttttttctttttttttttttgatacggagtctccctgtgtcacccaggctggagtgcagtggcgcgatctcggctcactgcaagctccgcctcccgggttcacgccattctcctgcctcagcctctccgagtagctgggactacaggcgcccgccaccatgcccggttaattttttgtatttttagtagagacggggtttcaccgtggtctacgatctcctgacctcatgctccgcccgcctcggcctcccaaagtactgggattacaagcgtgagccaccaacgcccggcctgaatgttttaagtttcaaggaaaagaccaatttggcagctactctgctacctcgtcacctccaggtgacgttgggagtactggggagctaggtttccagaactttttgctcttgagtgacctaagaccctagcagagtttggtcagtgtgattaagaatgagcctctgtgggtctgtttaggatgcttgccccctcccatttccttaacttgcctgaattcctgctgggaatacagattcggggcccttcccactctgtaaatatgggaaaaggtctaggaagtatatactcctagcaataatatgtaggggttctatgactaggaaatttggggaactgtccccctgaccgctccatccgtaacttctgcacaccttttggggtacgccgccgacctggaaagcgttgcagggcgctcatgctgcccgcaggtggcgccacgtgatcgcgagccgcagagagcccgtaccctaggagtctcgaggcgcgaggactgctggtccgcagctgtgccggggccaccgacgccgcttaccccggcggagcgccgcgcaggtggagttggggacagcggccggtgccccggctttttaggctgtgtgcatcccaagccgcctctagttggcttctcgggcttccggggcaggagggcgcgcggctttgtgcctacgaattgagaactggagagccagtaaccggtgcaccgggaacctgccgccttgcgccgcagggctttagtccaaacctggccggtccaggctccgggatctactacaggggcccctggggagcgcgggccccagggacggctccttcccattggcagcaggacggatgccacgcccctttttcttcagctctcatctttgactggctctcgagtcccagatggccacgccccctcccctcgcacatacacaagagtcacgcgcctttcagttggaaacttggcgtgcagacggggacggtggctctcgtcgccccacccacttaccttgccattggtccgcggagcggcacacggtcacgcccccattccagccccctggctgggagggcgggcacccgcttgtgattggctggtcggcctgcctctcgcgggagcagccggcgctcctctccctccctctttccctcccgcgagcctcggggttcctcagctggctgaggtggagtcagtgtcagtcagggaggcgaactgctgagcactggccgcggacgctccgttgcagtctcgcccaggggccggtacctgcgctcgcgccgccgggttgaaaggatgaagccgcagctggagcagccaccctatgattggctgtggcgcttgtgaacccaaagtaaaga

SEQ ID NO: 5896 - DNA, 2300 bp, Homo sapien
ctcatgctccgcccgcctcggcctcccaaagtactgggattacaagcgtgagccaccaacgcccggcctgaatgttttaagtttcaaggaaaagaccaatttggcagctactctgctacctcgtcacctccaggtgacgttgggagtactggggagctaggtttccagaactttttgctcttgagtgacctaagaccctagcagagtttggtcagtgtgattaagaatgagcctctgtgggtctgtttaggatgcttgccccctcccatttccttaacttgcctgaattcctgctgggaatacagattcggggcccttcccactctgtaaatatgggaaaaggtctaggaagtatatactcctagcaataatatgtaggggttctatgactaggaaatttggggaactgtccccctgaccgctccatccgtaacttctgcacaccttttggggtacgccgccgacctggaaagcgttgcagggcgctcatgctgcccgcaggtggcgccacgtgatcgcgagccgcagagagcccgtaccctaggagtctcgaggcgcgaggactgctggtccgcagctgtgccggggccaccgacgccgcttaccccggcggagcgccgcgcaggtggagttggggacagcggccggtgccccggctttttaggctgtgtgcatcccaagccgcctctagttggcttctcgggcttccggggcaggagggcgcgcggctttgtgcctacgaattgagaactggagagccagtaaccggtgcaccgggaacctgccgccttgcgccgcagggctttagtccaaacctggccggtccaggctccgggatctactacaggggcccctggggagcgcgggccccagggacggctccttcccattggcagcaggacggatgccacgcccctttttcttcagctctcatctttgactggctctcgagtcccagatggccacgccccctcccctcgcacatacacaagagtcacgcgcctttcagttggaaacttggcgtgcagacggggacggtggctctcgtcgccccacccacttaccttgccattggtccgcggagcggcacacggtcacgcccccattccagccccctggctgggagggcgggcacccgcttgtgattggctggtcggcctgcctctcgcgggagcagccggcgctcctctccctccctctttccctcccgcgagcctcggggttcctcagctggctgaggtggagtcagtgtcagtcagggaggcgaactgctgagcactggccgcggacgctccgttgcagtctcgcccaggggccggtacctgcgctcgcgccgccgggttgaaaggatgaagccgcagctggagcagccaccctatgattggctgtggcgcttgtgaacccaaagtaaagatggcgggcgggcaggcagccgccgcactgcccacttggaagatggcggcgcgccgcagcctcagcgctcgcggccgggggatcctgcaggcggctgcggggcggctgctgccgctgctcctgctgagctgctgctgcggtgcgggcggctgcgcagcggtgggcgagaatgaggagacggtgatcatcgggctgcgactggaggacacgaacgacgtgtcgttcatggaagggggggcgctgcgggtgagcgaacggacccgggtcaagctgcgggtgtacgggcagaacatcaataacgagacgtggtcccgcatcgccttcaccgagcacgagcggcggcgccacagcccgggggagcgcgggctggggggccccgcgccgccagagccggacagcggcccccagcgatgcggcatccgcacctcagacatcatcatcttgccccacatcattctcaaccgccgcacctcgggcatcatcgagatcgagatcaaaccgctacgcaagatggagaagagcaagtcctattacctgtgcacgtcgctctccacgcccgccctgggcgccggcggctcggggtccacgggtggcgccgtcgggggcaagggtggctcgggggtggccgggctcccgccgcccccgtgggccgagaccacctggatttaccacgacggcgaggacaccaagatgatcgtaggcgaagagaagaagttcctgctgcccttctggctgcaggtgatcttcatttcgctgctgctgtgcctgtcgggcatgttcagcggcctcaacctggggctcatggccctggacccgatggagctgcgcatcgtgcagaactgcggcacggagaaggagaagaattacgccaagcgcatcgagccggt

SEQ ID NO: 5897 - DNA, 2300 bp, Homo sapien
cggtgccccggctttttaggctgtgtgcatcccaagccgcctctagttggcttctcgggcttccggggcaggagggcgcgcggctttgtgcctacgaattgagaactggagagccagtaaccggtgcaccgggaacctgccgccttgcgccgcagggctttagtccaaacctggccggtccaggctccgggatctactacaggggcccctggggagcgcgggccccagggacggctccttcccattggcagcaggacggatgccacgcccctttttcttcagctctcatctttgactggctctcgagtcccagatggccacgccccctcccctcgcacatacacaagagtcacgcgcctttcagttggaaacttggcgtgcagacggggacggtggctctcgtcgccccacccacttaccttgccattggtccgcggagcggcacacggtcacgcccccattccagccccctggctgggagggcgggcacccgcttgtgattggctggtcggcctgcctctcgcgggagcagccggcgctcctctccctccctctttccctcccgcgagcctcggggttcctcagctggctgaggtggagtcagtgtcagtcagggaggcgaactgctgagcactggccgcggacgctccgttgcagtctcgcccaggggccggtacctgcgctcgcgccgccgggttgaaaggatgaagccgcagctggagcagccaccctatgattggctgtggcgcttgtgaacccaaagtaaagatggcgggcgggcaggcagccgccgcactgcccacttggaagatggcggcgcgccgcagcctcagcgctcgcggccgggggatcctgcaggcggctgcggggcggctgctgccgctgctcctgctgagctgctgctgcggtgcgggcggctgcgcagcggtgggcgagaatgaggagacggtgatcatcgggctgcgactggaggacacgaacgacgtgtcgttcatggaagggggggcgctgcgggtgagcgaacggacccgggtcaagctgcgggtgtacgggcagaacatcaataacgagacgtggtcccgcatcgccttcaccgagcacgagcggcggcgccacagcccgggggagcgcgggctggggggccccgcgccgccagagccggacagcggcccccagcgatgcggcatccgcacctcagacatcatcatcttgccccacatcattctcaaccgccgcacctcgggcatcatcgagatcgagatcaaaccgctacgcaagatggagaagagcaagtcctattacctgtgcacgtcgctctccacgcccgccctgggcgccggcggctcggggtccacgggtggcgccgtcgggggcaagggtggctcgggggtggccgggctcccgccgcccccgtgggccgagaccacctggatttaccacgacggcgaggacaccaagatgatcgtaggcgaagagaagaagttcctgctgcccttctggctgcaggtgatcttcatttcgctgctgctgtgcctgtcgggcatgttcagcggcctcaacctggggctcatggccctggacccgatggagctgcgcatcgtgcagaactgcggcacggagaaggagaagaattacgccaagcgcatcgagccggtgcgcaggcagggcaactacctgctgtgctcactgctgctgggcaacgtgctggtcaacaccacgctcaccatcctgctcgacgacatcgccggctcgggcctcgtggccgtggtagtctccaccatcggtatcgtcatcttcggagagatcgtgccccaggccatctgctcccggcatggcctggctgtgggggccaacaccatcttcctcaccaagtttttcatgatgatgaccttccccgcttcctacccggtcagcaagctgctggactgcgtcctgggccaggagataggcaccgtctataaccgggaaaaactgctggagatgctccgggtcaccgatccctacaacgacctcgttaaggaggagctgaacatcatccaaggggcgctggagctccgcaccaagacggtggaggacgtgatgaccccactccgggactgcttcatgatcaccggcgaagccatcctggacttcaacaccatgtctgagatcatggagagcggctacacccgcattccagtgtttgaaggggagcgctccaatatcgtggacctgctgtttgtcaaagacttggccttcgtggatcccgatgactgtacccccctgaaaaccatcaccaaattttataaccaccccttgca

SEQ ID NO: 5898 - DNA, 2300 bp, Homo sapien
cggcctcccaaagggctgggattacaggcgtgagccaccgcgcccggcctcattctttttattattgatttgttaagagtcctttatagacaaatcctttgtcttttgtgtattgcgaatagttttccccttattctgttatcttttaactttgttttcagtttttttcaagttattccatctctctgattttttaaattcttttttctgatttattttttaaaacaaagttcttgattataaaagtaatacaaacaccgtaagaaattaatacaaaagtacaaagaagaaaccaccccatcttatcactgagagaaaacaacataatcaattacatatttccctgtagtcttttgcgtgtgcagttttttttcacagttgtgatcacattcatttgtgtgtgtctctatatttgtttttctctcagtaccatagtgtttagacacaaaccctggccttttttcgtttcttctttttttttttttttggagatggagtctccctctgtcgcccaggctggagttcagtggcgtgatcttggctcactgcaacctccgccttccgggttcaagcgattctcctgcctcagcctcccgagtagctgggactacaggtgcgtgccaccatgcccagctaatttttgtatttttagtagagatggggtttcgccatgttggtcaggctggtcttgaactcctgacctcaaatgatccacctgccttggcttcccaaagtgatgggattacaggtgtgagctaccacgccccgccaccctggccttttttcaaatgcacttggtttaaagattgtgttatgccagcttccaacccctattcctcttttccatatatcctgagaaatttagaaggtgaggggcccaaggtctatccttagctgacctgaagcgaagttggctgagaagcacaagaaggggtagaagtgctctggcggagcacttattaaaaagacgcggaggttttggttgactgcaagcccaatatgagtcaacagtatgggtgccaagaactttatcgcaggagtgcaaagcgataggtcccaaaaggaggaagctatagtcctgctttgctctgatgataccacaaacatttggttcagtcttgggtgatgtattctaaagaaatcacagtcaaatctaccatttgcgtgagagggataaagaccctcaaaaccagggcagaggaggaacaatggaaggaacgggagacactgatgtggaatgagaagaccttgggcagaggtgatagaagtaaagtatctgaaaagtcaaaggtccaggagagattagacgtttgttctctgtggctccaaggcatcgaatttcggccctgagagtggaagtttagacacattttctcactggtgagagctgctcggaccaaggaattcagtcctctggaaatagctagctgcttttgcggagtcttcctgctgagttgctggtggtggggtgaacatttattgagtgcttactgtgtgccaggatcctgctgagggcctcacctatattgtgtgatttcatcccgtcaacaccctttgatgtggggactgttgttccctatcctggtgctacaaatgtgggcaccaggtataggaggtcaggtacctcgcccgaggttacagtttgtaagtggtggtactgggactggaactcgttctgacaaacttcaaagctggtgtttttagccatcaaggggattcgagggtgccatgggggtgtggacgcatgaggggccttgaggtccattagaccaaaacattctgtgactgggaaaaaggatgccctctcctcccaaggaaaagcttcttctgaatgagacacagtggagaggttagcccagggccaggctgaggggcgcaggcagaatgccaagggatggagaccctcagaagggcaaagccggtgttccatcgtttgaagatctccagacccgcgggacagacagacgcagcgcggtcagggagcgtcggcttcgccgaactctgcggcggagctgggggacggaacagcgcgccggtccctggccgggcgcgagcagaggggcggcgcggggcggtgccgggcggcgggggcggggagggcgcgcgttgaggcggctgcggcagttgcgcgctgggattgttgcggtgcgctggagccggtgagtgcggcgggccccgtgggcgggcggggaaggagcgggcgaacggggagctaggtggggaggtgcgcggccgaacacgcgaccccagggtagcggccgccgcctgcccccgcccccggcccccagggaccatggccc

SEQ ID NO: 5899 - DNA, 2300 bp, Homo sapien
cccggctcatttttatatttttaatagagacagggtttcaccatgttggtcaggctggtctcaaactcctcacctcaagtgatccgcccatctcggcctcccaaagtgctgggattacaggtgtgagccactgcacccggccaactccgtctcagaaaaaaaaaaaaaaaaaaaagagtctcactgcactaagcagaattatgtagtgaagagagaatgtatgcttgtctttgcttgctggtgaccttgtgctgcacccgcacctcggtgccttatctataagatggaggtgagggccaccttgaagcatggttcagaggtaaacctatgcaaaagtgccagcacaagtactggcagacaatcattactcagcagtgttagcaatcttttattgttcaccttaccaggtctttctaagcccaaagacctcagaattgagtccctccaactcaaggctttggtctgtgatgaggaaccagaggggcaggctgtggcagggcctgaccatcttccatgacatcaagcacaaagccaagagatatgctccaaagtcccataagatcccttttcacccttcctttagtggcctgtcccaagcatattcccctttccccatgaagtaaaacttatcctagaactacgtccttgaagattccaatatcaataaaaggccctcagtctggaattctgggatataactaaaaaggtcttcctactccctctccaaagccatatccacatcctgaatgatattagaagcttgcaagtgggtacatattacagacgccacactgacccctcccagccttcatcttttcagattccattctttgattctcaccccctgccccaccaaccctaccatgtggcagaagaggccggctcagtcaccagcactctcccccactcctggagtttaatctttttgcagggatctcttttctccaaaaagagatctgcacagggagtggctctctgaagccagttgagaacctgccctgctggatttacacaaactgaaatctcaaatgcccacagggtcagagaggtaaagtaaatgaattaagaaggggggcgtaattcagtggagaatggcagggactgtagtgaacaggagagcacacttcttatacaaatggcaagggcaactcacctctgccactgtgggcatcccagctcttcccattttcagaagaagccagaaatccaatttctttacaggtgaaatctcctggtttaaaaatgctcctttcgaaatattttaaaatataatgctctaaacacaaaagtctgcagccccctttccagcagcttgtggtcctggcctgtgccatgctttagtgccctaacgatgagccccagcaattcccagcgcctcctgcttctccaagtctggcctcttttcccctctgtaccgccgcttctccccactctccgcagctcggggtcactttctttactgatctcccctctcttctgggagaggcacttgctgaacatctttccgcccggagcctccccaggagctgcagaggggcagctggagagatgctttctgacgtagcatctcccacctttctccttggggaccctgaggaaggggacaagggctcgctctgcaggtcctcactgtaactggaaaaacacgacctcgccctcgggaaggctttctgtgcgcctcacctcaggatgagggtgggtgtaggggacacctcccagaaacccctaacctcccagtcggttaaagaagaggggatagggtcaagggatgcgacagagctgtgtggtttccggatgggaaacctcagtcgtttaggcacccctccgctcgagtcacttccgaagcagtcgattcttggggagaagcgctgcggaaaggggcgactccgatgcagatggccctgtcccggcgccccaggtcgtcgcgcgcgcagctgcggtagtcactgcgcctccccgcccccactcctggatgccccccttccctctcccggccagactctgagcaggagctccgcccccagcgcgccgccccagccccggcgccttaaaagccgggcgcaccgccccgccgcgccctgcctgccgcacctctcctttcttctgtagctcgcgttgaagccgcacgtccggccccgatcccggcaccatgagcttcggctcggagcactacctgtgctcctcctcctcctaccgcaaggtgttcggggatggctctcgcctgtccgcccgcctctctggggccggcggcgcgggcggcttccgctcgcagtcgctgtcccgcagcaatgtggcctcct

SEQ ID NO: 5900 - DNA, 2300 bp, Homo sapien
cctagagattcataactgggacacgagacaggagagacataatttctgagatgggaagaactcgagatcagcaccgtggacagcgccccgacctttcacgttttgccaaccggcgaacgctttcttaaggaggaaatgtcagctggtggacaagggaatcgtgtgtgtgtgtgtgtgtgtgtgtgtgtgtgctggtggacaagggaatcgtgtgtgtgtgtgtgttggggaggtgggtagagcagggtggttactactagctcaagcatcgctcagcttgttggctcccaatctctactttttggagcgcgaaagtcaagaaaatgggataggactcttcccagttcaggatcgcattcttccttcagccctgaagcagaccatactccataaataacttctagggcgcacagaaagcttttcaaagtcaaccaaacaagccagatagccgagacagcaccgcccacgtaacctgccccgttgggctcagtcttactttgggtggggcactgttctccgggtcgccggtgtgtgtaggcccgcttgctgacagacaggcagagttgggttttcgaacctcaaataaatttaagggcttctttgtttgaagggctggggcagggacataaatgaggggcgttccctaaaattaacattaaagactccagggttttttgttaaccagcgcctccagccgcggctcttctctcctctcttttgccctccccttaagtcctggggcccagttttaccagaggaagagggtacgcgcggaagagggcagggcacccctccccacgcccagccccggcccttacctggtagccagctacctcggcactgtgccgctcctccagctccaggatctgcctctccaaggactcgttggccccgcgcaggccctcgatctcgatggtgcgcgcctgcagctggcgccgatactcgtggatctcctcgcggctggcccggatggcctcggtgctgcgcgccgcctgctcgttcaggttggcaaacttggacttgtaccattcttccgcggactgcaggttcttagcggccagggactcatactgggcgcggatctccctcagagccgaggtcaggtctggtttagccacagtcacgtccacctcggccgcggcctgcgacgacgcctgcagcgtggccagcagctcggctacctcctcgtcgtgcacctggcgtacgaaggccagctcgtccagcagcgactccaccttcttctccaggtccaggcgggccagcgtggcgccgtccacgtcgcgctgctgcgccttcagggcgcgctcggcgccttcgcgtccgcggctctcctcctcgcagcgcgcccgcagccgctgcacctcctccgccagcccgtcgcgctccagcagggcctgcgagcgagccgagctggcctcctccagctgcgcgcgcaggtcgcgcagctcgcgctggaagagctcgccgacgcgcgacggctcagcgtggcgctgtcgcagcgcggccagctcggcctccaacgcgcggttctgcgtctccagctgatgcaccttctcgatgaacacggcgaagcggtcgttgaggccctgcagctgctccttctcgttggtgcggatgatcttgtactcgttggtgcgcgccgccgcctggctcaggtccagcccgtcggacgccggcggccggcgataggccaggccgaggccgagcgacgaggccgaggagcaggcggccgaggaggccacattgctgcgggacagcgactgcgagcggaagccgcccgcgccgccggccccagagaggcgggcggacaggcgagagccatccccgaacaccttgcggtaggaggaggaggagcacaggtagtgctccgagccgaagctcatggtgccgggatcggggccggacgtgcggcttcaacgcgagctacagaagaaaggagaggtgcggcaggcagggcgcggcggggcggtgcgcccggcttttaaggcgccggggctggggcggcgcgctgggggcggagctcctgctcagagtctggccgggagagggaaggggggcatccaggagtgggggcggggaggcgcagtgactaccgcagctgcgcgcgcgacgacctggggcgccgggacagggccatctgcatcggagtcgcccctttccgcagcgcttctccccaagaatcgactgcttcggaagtgactcgagcggaggggtgcctaaacgactgaggtttcccatccggaaaccacacagctctgtcgcatcccttgaccctatcccctcttctttaaccgactggg

SEQ ID NO: 5901 - DNA, 2300 bp, Homo sapien
tttcctcatcaattccctagacaacacattcagcattttcttttttttgttgttgttagaccgggtctcgctctggcgcccaggctggcaatgagctaccacccctggcacacattcagctattttattttattttattgtattttaattttttgagacggagtctcactctgtcgcccaggctggggtgcagtggtgcgatctcggctcactgcaaccttcgcctcccgggttcaagtgattctcctgcctcagcctcctgagtagctgggattacaagtgtgcaccaccatgcccggctaattttcgtatttttagtagagatggagtttcaccatgttggtcaggctggtctcaaactcctgacctcgttacccgcccaactcagcctcccaaagcattgggattacaggcatgagccacctcgcttggccatatttttaaaatttattttttttttgagatggagtcttgctcttgttgcccaggctggagtgcagtggtgtgatctcggctcaccgcaacctccacctcgtctgtgttcaagtgattctcctgcctcagcctctcgagtagctgggattacaggcatgcgccaccatgcccggctaattttgtatttttagtagagatggggtttctccatgttggtcaggctggtctctaactcccaacctcaggcaatccgcttgcctcagcctcccaaagtgctgggattacaggcgggagccactgtgcctggtcacattcagctcttaaatgtgactttgccaggcattatttgattaggagcatttgacttcccgaatctttcttgcaggcatcgtgacattagctggcattatcttagcaaggataatggtttttttgttttttgttttgttttgttttgttttgttttgttttgagatggagtctcactctgtagcccaggctggagtgcagtggcacgatcttagctcactgcaagctccgcctcctgggctcaagtgattcttctgccttagcctcccaagtagctgggattacaggcacgcgccaccatgcccagctaatttttgtatttttagtagagacggggtttcaccatgttggctaggctggtcttgaactcctgacctcatgatctgcgcgcctcggcctcccaaagtgctgggattacaggtgtgagccaccgcgcccggactagcaagaataatgttaagccaactccaaacctctcttaataaaattgggcaatggggtgggttgtacctgggtgggtctgagtttctgctacagtaggccctcaataaatgtttgttgggcccggcgccctggctcaggcctgtaacccaacactttgggaggctgaggcgggtggatcacctgagatcagaagtttgagactagcctggtcaacatggtgaaaccctgtctctactgaaaatacaaaagttagctgggcgtggtggcaggcgccagtagtcccagctgcttgggagcctgaggcagaatcgcttggacccgggaggcggaggttgcaagtgagcgccactgcactcctgcctgagcgacaagagcgaaactgtctcaaaaaaaaaaaaaaaaagcttttcgaattcaatataatgggctttatgggatggggtgacatggatgatctttgagtagtgattagattttcaccttgtatcaatacactatataattccttaaaataaataaacgtacatacttcagaacaggaactttatacttcctaagggaaataatcttggatggaggtgatttgccacagaggaaatgcataattggtactcaagtggaaatgattattatttgtgatgcaacgtcacatgctacctagttcagtgctctgtgaattaggtgatgcaaacagaatattgttgcttggaacggtagcaattttgctgtttttaaaaggcggcgaagagagcgtccccttccaaggagaaaatctggtgagattcctttaaagtgcggcccgcgcgccccgcagcctgccccggagctgcagggtttgcgccccgcggaggtgagggccgctaaaccacatttcccggcgagcccctcaggctgccgcgcctgcgcagtggtggcgtccgaggccggccgaactcccgcgctctcccgccgcctcgcctcgcctggtgtctctcccgaccatggagggggtcgcggtggtgacggcgggcagcgtaggcgctgccaaaaccgagggagctgcagccttgccgcctccgcctcctgtctccccgcccgccctcacccctgcacccgcagcgggtgaggaggga

SEQ ID NO: 5902 - DNA, 2300 bp, Homo sapien
taagtaacttgctccaggttattcagccagtaagcaaggtcaagccaggtggtctgtgcctgtagtctcagctacttgggaggctgaggtgagagactgcttgagcccaggagttcaaggccagcctaggcaatatagtaaggcttcagatctctaattaataaaataaaatattttttaaaagtaagcagggtcaaaggacgctggtaagacctcaaaaccaataacttgaacggctgtgctagattttcccaatgtctcaggctcacttttctcgtctgtacctattccacagagttacaagtttccaatgagataaaatatgcaggagggttttataacctatgaagcacattgcaaaatggcatatatgatttttttttttttttttttttttcctgagacggagttttgttcttgctgcccaggctgaagtgcaatggtgcgatctcggctcactgcaacctccgcctcctgggttcaggtgattcctctgtttcagcctcccgagtagctgggattacaggtgcccgccaccacacctggctaaatttttatatttttagtagagatggcgtttcatcatgttagctaggctggtctcgaactcctgacctcgggtgatccacccgcctcggcctcccaaagtgctgggactacaggtatgtgccactgcgtgtggccatgatttttaaatatacaattaaaatggtttatttgtaataacggataatagcatgaatacataacgtacatatttcacaaccacaacattctggtatttaaaaactttttttttgagacggagtctcgtactgtcgcgcaggctggagtgcagtggcgggatctcggctcactgcaacctccgtctcccgggttcaagctcttcttctgtctcagcctcccgagtagctgggattacaggggcgcaccaccatgcctggctaattttttgtatttttagtagaggcggggttttgccgtgttggtcaggctggtctctaattcctgatctcatgatccgcccgcctcggcctcccaaagtgctggggttacaggcgtgagccaccgcacctggcgttaaaaactttttattgaaatgtaatgtatacgggccaggcgcagtggttcacgcctgtaatcccagcactttgggaggctgaggccggtggatcacctgaggtcaggagttggagaccagcctcgccaacatggcgaaaccctgtctctactgaaaatacaaaaattagccgggcgtggtggcacacgtctgtaatcccagctactcgggaggctcaggcaggagaatcgcttgaacccaggaggcagagattgcagtgagctgagatcgggccactgcactccagcctgggcgacagagcgacactccgtctcaaaagttaaataaataaataaatgtaatgtaatgcatgcagctcgattaacttttacaaaagtaaaaatgacaaaaaaaaaaaaaaagtaagcactattcaggtcaaaatgtaaaactaccagtatctcggaagcctccctctggcaaatggtatatgtttttgagttaaatacgtggattcgaatgttgacatttggactttcttcttgcctctggtaagttatttaacctctcttggtttcaactgagccatctgcgaggtggggataatattacctcataagattatttaattgtagcagggcgtggtggcgcatgcctgtaatcctagctactggggaggctgaggcaggagaatcgcttaacagcctgggcgacaagagcgaaactccgtctcaaaaaaaaaaaaaagaaaaaagaaaaagattattgaattgaaggagatcacataatgtaaaacatctatcataatgcctaaatatagctggcctgcaataaatggcaattattctcaggcaaatgtaataggtggtcaccaatgcccacttcctgcctttctttcgctcggttttgaaagttgctctctttcctattccgtttctccttccttttcgctcctcctactgccgtaaatggcctactagagttgtcgtgaaatgctcctccccgccctccatgtggcgaaaatgcaatcacgcttgacggcgcgaggtggctcagccgcaagatggcggcgctggcggaggagcagacggaggtggcggtcaagctagagcctgagggaccgccaacgctgctacctccgcaggcgggggacggcgcaggcgagggtagcggcggcactaccaacaacggccccaacggcggcggcgggaacgttgcggcgtcgtcgtccactggcggg

SEQ ID NO: 5903 - DNA, 2300 bp, Homo sapien
gagcaatgaaggaaatccaaacttccttaggcctcttcagagaccttggccagtctagcccaagtaggaaaatctccattaaaaataactttatacacttgatcttagccaacagaagcgataaaagcaactttataatgtagctatcaactgttccactttactaaacttactaaagacatacttccccccgccccccgcccccccaccagctccattcatttcatgatacatttttggattcacttcttagggtttgaagtaggtttttaggagaaacgctacagaaaataagggcttcactttgaccattaacgaaaacctccactacattacatctaactaaactttttaggaggatatgcccaacaatactacagcgctttaaatttccctttaatttacacacaatatgggaggaaggctgatgttttgtgatatcccacagaagactaattctgattgcagggaagtgcatggttcaagaactgaaatcaatcactcaagttagtctgggtcttaaaggaggaggactcttgagaggctcaaatggagggccaaatggggaacgggattgttgctggtgagataatggagtaaggtcgaaaaatttggttctgcactcttcagcacggtgcaggttactttagggcaaagataaaggaacccttgtgtttacagtgccctttgtaagactcctagttgtgatttaatgttgttaaacggtggtatgttttaattaagttgctaactgcccttcttgagacaaggtctcgctctgtcgtccaggctggagtgcagtggcgcgatctcagctcactgcaatctccgcttcccggggtcaagcggttctcctgcctcagcctcccgagtagctggaactacaggcgcgcgccaccacgcccggctaatttttgtattgttggtagggacggggtttcaccatactactcaggctggtctcgaactctggacctcaggtgatctacccgcctcggcctcccaaagtgctgggattacaggcgtgagccaccgcgcccggccactaactgctcttaaatgtaactaatccttccgtgcctctctccacctgtgagatgggcactttattaaaggtccaaagtgaccagtagctcttgttactttctctgttcctcgatattgctattttcctttctaacttaacacctacctggaatggtgagatcacgaggtaaggaaggcaaagatgagtgagaaccactcaggtaacagaagcagcctcttgcattcacggagtttacagctctctgttctggttacctcctaggaaaggccttcccactgatcgtctatagactgaaatctaacccttttacagcgggcctggcgaactgtaggggccgggccacattcactcgctttgaaaaaggctgcagcgcacctaaaggaggcccggctggccagcttcctaaagcacagctcggtgggaacaaacagctatggacatacagaagaaaagaggttaattcggccggtgatggggatcagaagccctagtcctcgtccaatattacgtcactgggtgacctcgagggacgcttcgcggagggcctcatttttctccactggcgaatgcaatctaagggtcttcggaaactgtgggagcccttgggcgcacctatccgcctcacctcgaggcttctcacccgctggccgcccccttgcgcccctcgttttttctagctcctttcccattccccaccgtttctctcctccaaagctaagaactcgagttgctcctcggccagaaacggcgggcggtcctgcaacgtgcaggcgccaggtccaagcccggactcccctcttcacccacctgccaaagccgcaaattccgcagctggtgtccttcaacgaatgtaaccacctctcggcccggccggaagaagccacctcccccgcacgcgtttagccggcccccgcgattcggcctaatgcgacgattggctatggctccaaatcccgcccttccgattcctgtctctaggtcacctccgcaacacagcaacggaagtagggtgttgagcccgcccacacttccggaagaattgcactggactgtgggtatcctggtctccgcgtgtgtgagtaccgcggcgcgaggttagtggtagctgggtgcagacgccgtggcgctggtgagtaaaggcagaggcgaaaaaggaggaaacctcatggctgtcaggtctgtcccaggcctggttccctgccaggcacacgctagatgagtgtggttcggccaccttagccccgcttcgaag

SEQ ID NO: 5904 - DNA, 2300 bp, Homo sapien
aagacactacagtaaaagtttccagtgagtgtcaccaaacaagcatactacttacatcaaataagttgtcttgttcaactgactgctggaaagctttctctggtttgtggatctttcttgtacctcctcgggggaagctttcttccaggtttgccatgtttgggtctcctaaaaacaatgcaaaggataatggtgacatgttgtcttggtagcagatttcagaaaggtgttatcaacgggcaagagacagaacgttccagcaatatgctagacaacattcaggactacaacatagatggtttagatgtcaggcccggaataatccatacttcatctttccaaaggtctctgcttcaaaaccacaagtccacccaccttcttccagaaaaagaagttatagattcaatgtagcacatactcactaagaagctacagttaagtcagagatacactgtagctctacagatgaatatataatcctctgccttcaaagaacatgcacactttttggaagataaaacaattatgcaagtaacttaaaatgcaaatcagattataaatgatcacaaagatgtaggaagggataaggcaatgtaggaagggataagtaaaggaggcaagcttcataaagaagatcttttttagcttaagggtaaaagatgaacagaagcttgacaggtagaaagggaatgtgagaaaagacatggatgggaaaagcctattatttcaataaacaccagcaatttccctatcaaacaactgctcaaaggcttgctgttgtctctgaggaattattcaactagaccactgggagattaaagcataaaaattgaagttaaattttaaagaaggccgggcaccatggctcacacctgtaatgccagcacttcgggagcccgaggcgcgtggatcatctgaggtcaggagttcgagaccagcatagtcaacatggcgaaaccccgtctctaccaaaaacgcaaaaattagccgggcgtggtggcctgcgcctagtcccagctactaggcaggctgaagcgtgagaattgcttgaggccgggaggcggaggttgcagtgagctgagatcatgccgccgcactccaacctgggagacaaagtgagactctgtctcaaaaaaattaaaggagaagttgggcttttttgtggaagaccttgaattagatatgggtagtttgctttggcaagtcagagacttaagcagggaaagcgagagaacagtaagcaagaaaaatatactgcaggctatagattggacatgaagagagacagtattgaaggcaagtaaattcggtagaaggattcaaatgcactgtttcctgttatctcagtgacagaaaaaaaaaaaaaaaaaaaggattcaaatgcagtacagcagagaaaccatgagaaccagaactgggtataagtgaaaacagaagacaggagaggttagttctgacagacacttggtaataagactctacaagggctttagactaaagaagtgatgaccgggtggggccaaggatatggaatcagggatgggtatatgattcatagaaacaggaaagtttggggggtctagtttgctgataatttcacccttaatttcctttcaagcaaggggaaactgaggctctgaaaagtaaggcgatccaggggcacagaagatacttaggctactttccgaacacaaagcctggggttacaggggctgctacaacagagccggcttcgaagcggggctaaggtggccgaaccacactcatctagcgtgtgcctggcagggaaccaggcctgggacagacctgacagccatgaggtttcctcctttttcgcctctgcctttactcaccagcgccacggcgtctgcacccagctaccactaacctcgcgccgcggtactcacacacgcggagaccaggatacccacagtccagtgcaattcttccggaagtgtgggcgggctcaacaccctacttccgttgctgtgttgcggaggtgacctagagacaggaatcggaagggcgggatttggagccatagccaatcgtcgcattaggccgaatcgcgggggccggctaaacgcgtgcgggggaggtggcttcttccggccgggccgagaggtggttacattcgttgaaggacaccagctgcggaatttgcggctttggcaggtgggtgaagaggggagtccgggcttggacctggcgcctgcacgttgcaggaccgcccgccgtttctggccgaggagcaactcgagttcttagctttggaggagagaaacggtggggaatgggaa

SEQ ID NO: 5905 - DNA, 2300 bp, Homo sapien
ttttgatttttctgcattctgcttgagtgtggaagccagtttgagtacttacatactaaggatgtgagtactcacatacctggttagcatgtggaaaggcttgatgcctggaaggtctgctctagggtgctcctgtgtgcctcctcctgctcaccctgcccttccttttgtctaggtgagggcctgcatcctttgcgtccatcctcgaaccagagttgtgcacctgagcctgcgccccatcttcctacagcctggacgcccactcacccgactctcttgccagaaccttggagcagtgctggatgatgttcctgtccagggttttttcaaaaaggctggggccacctttaggctgaaggatggggttctggcctatgcccgggtaaggaggcctctttgtttggtcagggatcttatcactggaaggacttctggagcacagggggccatttctgcttctttcattccttgatgctagtttaaaatttttggatattgtagttctaattcctgttcatagtgattagaacaatgtctattgactgtattaggatgccttagaaccagcttgccatatctgatacttggttaatagttaagtataaggatgagttaggatccagaccagggcccagcagagtttttcttaaagggctatgtcataaatactttaggctgtgggccctgtggtctctgtcctaattgttcaacgctgctgttatggcatgaaagcagccatagacagtacgtaaatgaacagatggctgtattccaatacaacttctatttacaaaaacaggcactaggcacagttgactgacctgtgttctggactttccctgaccttgctgaaattctgtgatgataaagagcagttttttagtgtgaagaattacttaaccaggcaatcaaagtactgtttttatggtacatgataagtgttgagtcctctctatgggctgtaaggtctcattggctcagacctgttgtccctggcttatcctcaatcacttggtactttgcagctcagccatctctctgattctaagaacgtcttcaatcctgaggccttcaagccagggaacactcacaagtgtagaattattgactacagccaaatggatgaactggccttgctctctctacgaacgtaagtctgtcattaacaggtaggggtgtagagatgtgcacctgtacatgttcatattccatttctcctggctgtgcttgggaagggttttctttcttgccagcatgcctgtggtagccctgaattttaggcaacctctgccctagtttatttaattctgtgttttctccttgtcctaggtctattattgaagctcagtaccttagatatcatgacatcgaacctggggcagtggtaaaggtaagacctcaagcatataattaggtactgcctcaccatcaggcgttctttagttcacgcacaggtgactgtcagcccgttagtcctcatgttaacacattgaatgtcatgttccttgcttctgcctgctgactagaatttctttctctttctttgggtaactcatagttaatttcaaggtaagatcttactagcaccacccagctacacaaaggcagtagatcataaatcctgagatttgggatttgatggtggttagtagacctgatcaaaagttagtcctgtgattattgatctacctgggatattagtgagaagccagttccaggtacctgtcctgtccgaccatttggctctaatcgagcagctccctttatatgtagagtttattccttaggagaccttgacatagtcccttcctttggggaatgtattttaaggcacacagaaagcacatgctcacacagaaagatgtgaaggctcccataaataaagctgacagaataatccagctcagtgtggggtgtgtgcttcacccatgtgccatctggaataacaggcacagttagcccaggaagttggctgtgaaggggaggtatgacatgccttgttgtaagaggtgggggaaaggccattcttgagacattgtggcagcttatctttggattctctagggcacagtgctaaccataaagtcatatgggatgctggtgaaggtgggcgagcagatgaggggcctggtacctcccatgcacctggctgacatcctgatgaagaatccggagaagaagtaccacatcggggatgaggtcaagtgccgggtgagcctcctgaagggtctcttggggttttggctagatgggaagaaagcagttctcaactgaagtttctgcctttttccacaaagtga

SEQ ID NO: 5906 - DNA, 2300 bp, Homo sapien
gttgggccatgcagatggctgggccacaccaaagtttctaattcagtaggtctaggtggtgcttgagaacttgcatttctcctaagtttcaggcgatgttgatgctgctggtctgcacacttagagaatcgctgtagcagcagagatcagcctgcagttctgtccttctctgtggagaaaggagatgggagagatggacatttcatctgccctttctggaacattccttgatgaagtaccactagcttctttgcaggaagccagccttggtctccacagtagaaggtggccaggatcccaagaacttctcagaaatccatcctggaatgctgctcattggttttgtgaagagcatcaaggactatggcgtgttcatccagttcccctcaggtcttagcggactggccccaaaagctgtaagttcaactccatgtacaagggctttgaggagagatacaaggtcacagaacctgagggcgggtagggaggagtaggatactttattccttttttttttgagacagtcttgttctgtcgcccaggctggcttgcagtggtgtgatctctgctcgctgtaacctccgcctcctgggctcaagcgattttcctgcttctgccttccaagtagctgggattacaggtgcccaccaacatgccaggcttttttttttttttttttttgagtagtagagacagagttttaccatgttggccaggctggtcttgaactcctgaccttaagtgatccacctgcctcggcctcccaaagtgctgcgattacaggtgtgagccaccgcacctggccaaggatactttactcttttgaaagattttcaggggtacctcttaaggtgtgtgtgacataaaggcacctgggaggggtgagtgcagctgagcttttggcccatgttcctctcgcccagctgtgtgaccatctggaggaagggacacctttcccactccacactacacattgaaggccttagtctccagtgtgaagatgactgcacttgtttttattctctcagcacacttagacagggaaattgatcatcctgagctactgagtacaggttttgcagacttctgaggtttttgaggtgttaagggaccagaatgtctttgaaattattacctcccccacccccatgtcattgagtcctgcactttcagatgggaacaatcccagcagtcccctagcagagcctcctggtgtgcctggcacgtcagccgaggcctattgaggggatgggactcaccaaagtcatggaagacagcgagcaaatggcgtgcagctgattgctgctgcagatcattcatcagtatttcttcccctctgtaggcctgtctccctggtgttttgcctgggaaaatctcatttgcatcccctgccagaaacattttaaaaatgggagcagaggggagggccccagaaacaagcccagtgaggggcagagggttcccgtgggttgttaggggtgaggacagccctggtgtctgcctggcttgctgtgaatgtgccttcttgactgggtgccctctcctggaggctctgttttttttgttgttgttgtttgtttttgtttttgttttttttttttgagatggagtctcactctgtcgcccaggctggagtgcagtggcgcaatctcggcttacagcaacctctgcctcccggattcaagtgattctcctgccccagcctcccgagtagctggaattgcaggtgcatgccaccactcctggctaatttttgtatttttagtagagtcagggtttcaccatgttggtcaggctggtctggaactcctgaccccatgatctgcccgcctcggcctcccgaagtgctgggattacaggcgtgagccactgctcccagccaatccggaggctctgtttttatggaagggaagtagagctgtgttcagagagggcttgggggagcttcctaggccccatttccccctactcacgtacccctttccaggaacatcaagtgggttgtcttaatgaagacctttcctcttctcatctcctgcctgttcttctgttcagatcatgagtgacaaatttgtgacctccacaagtgaccactttgttgagggccagacagtagcggcaaaggtgaccaatgtggatgaggagaagcagcggatgctgctgtcactgcggctgtcggactgtggtctgggggacttggctatcaccagcctcctcctcctgaatcagtgcctggaggagctgcagggcgtgcgcagccttatgagcaaccgaggtggggcacctgtggggcaggggag

SEQ ID NO: 5907 - DNA, 2300 bp, Homo sapien
ggtggatcactggaggtcaggagttcgagaccagcctggccaatatggtgaaaccctttctctactaaaaatacaaaaattagccaggagtggtggtgggcacctgtaatctcagctacttgggaggctgaggcaggagaactgcttgaacccggaaggtggaggttgcagtgagccaagatcacgccactgtactccagcctgggcgacagagcaagactccatctcaaacaaaaaaaaaagacaaagaaaaaagaaaaagaaacgtaaagagagaaaaggctggagatagcaccagagcgggaagatggtagacaaagaaatgatacttatttgatgctgatcaaatgcccccagatctctgtacaggagcaagtggtgaaacaaggatgaccttgcctgtccttgccctccaagcatttcagacaagcacatgtgtgacctccaaacaaggcagatggtgatgagaggaaccaggccacgggagattcagaaaaggcacaagtgctcccagaggggcctttgaagccttcccagaggtggcatctgagctgagcctggcaggttgagctgggttttgatggcctgagatgatggcaggggaaggaggtgctcttaagtttgcaggggtggcagcagaaaacgcaggctaagtctaagcgcaagtagagtgtgagttaaagggggtaaggaaacgatggaatcacagccacaagggcctgcttctcttacccaagcagaacttgctccttttccattcgctctggggggtagggcttaggcagttcctcgcccctcctgaactgtgcccattctctggccagctctttggatggctgctcatcggcgtggtggccatcctggtgttcctgaccaagtgcctcaagcattactgctcaccactcagctaccgccaggaggcctactgggcgcagtaccgcgccaatgaggaccagctgttccagcgcacggccgaggtgcactctcgggtgctcgctgccaacaatgtgcgccgcttctttggctttgtggcgctcaacaaggatgatgaggaactgattgccaacttcccagtggaaggcacgcagccacggccacagtggaatgccatcaccggcgtctacttgtaccgtgagaaccagggcctcccactctacagccgcctgcacaagtgggcccagggtctggcaggcaacggcgcggcccctgacaacgtggagatggccctgctcccctcctaaggaggtgcttcccatgctctttgtaaatggcactacttggtcccaaactgaaccccactgcttgctcacatccatatcagaaggggatttttaaaaaactgttatcttcttggccaggggaaaggaccacaaggcaatctggggtgtggacagacccagtagacaatggaagccccagccagcagggccaggtgacagtgaagctcaccagtgggctcctttatggtactctatgcagttaacatgtatctagctgcatagggacacccagcgcagcagtgcaccactgggaagtggcctccagtgcagcctctggccttattttatatatttaaatttttgataaagtttttcttactaaaaggactagcctggtgtctgtgtgattgaatgggcatgccacagcaggctggtggtcatagggccaggcccaaatcctatgccgtgttagggaaggggacaggactaaaatggcccacaggggtggcagggagggtgcagtgagtaccaggggttcaacacaggggaaggctctggggctgatgatctctttgcagttgggttctattatctgatttggtgtggggaagagatgaagcctggcctttctcagaaggaaacagtctgaaatttcacgagtcagaagattctgcgctcagtgggcaggccagaactagctctcgtaacctagtgctcatgtccaagaagcaggccagccccagcttctccttcctcccatccctgcccgccacccgccccacctctagaacctttggatgctctcccttggccctgtccggcttcctggcatatgactcagtcatttcccatggaaaagctctcaggacacttaaagctctgccagagaaaacgtttaattccctcatgaccaagacaaaaaagaactggcttcaacaactagctgggtctgtgctggcctccaagaccttgaatagcccagatatggagaggttaggtaatgtggccatagtgggcgtgggatgagacatcatcagttcacgccaacacccgtggctttcctcagcagcccaggtttct

SEQ ID NO: 5908 - DNA, 2300 bp, Homo sapien
catccccaaggcttgagaagttagacacagaagctgaagtctctccatttttctcaaagaccccacctcttggggatggagttctaagaggctaagaggagctccaaggctctagcccaggtgggatgagggtggaggagagcagtgtaaagagaaagcagctcagattccagagtgagacagaactgggtcaaatggtgtctctaccactcacaaaccctgtccctgggccagctgcatcactgcctgtgccttcgtttcttcatctatacaatgaggatgaggcccccccggcccgccatcatggggttgctgtgtgtaaaagcacatggcacatagtaggcacccagcacagggtggctaatgtatttgttgatttctgaacctaaggacttccttcctcctcccctgggcagggatgagacagcaacacaaacactcgagcttccatcttgttgaggaggaaacagaggtacagataggtttctcagcaccgccctcagctctgagacataagtcccaagcatctaaggattcattttgatcttggcatgattccatccttttttatccatccttccctctattcccacttctggggtccagtttccctcctcttaattatttgggaggagttgctcagatctttgtgggccaaggtgggctgggagggctcttccaggaggtaggagttggtatgggccctgaagtcagggaggattaggatgagcaaaaaacaaggtgtatgttggtgggtggcagcacttccagtgggaagagaaggcccggaggtatcaggaggtacaaatgtgatgaagagcaaagctttgggtcaggcacacctgagttcaaataccagcactgcaggacttgtggccagtcacccagccactctaagcctcagtgtgtctgtctataaaatggatattagaagacctgcttggccaggcggagtggctcatgcctgtaatcccagcacttgggaggccaaggagggaggatcacttgagcctgggagttggagaccagcctgggcaacatagcaagactctgtctctgtaaagtaataataataataagaagaagaagaagaataaagagaagatttataatttttttaaaatgaaaaaattattttttaaaaaagacctgattttcaggattgtggtaaggatagaggaagataacttttagggaaggatctgggactgtgtttagcacatgctgggatctgaaacaaacaaataaacaagcagaacttggtaccttttctttccttcgtacatatggtcaagcccagctcagggaggccagcgggtcactcggcagctccaccatgacggaaccacgagcactgcagagctgacagatgtcgggggtcctctccctccatgctaagggtcatctagcctgtccgtagactctcctgtgcagcattcctgacccgtgacgcttcagcccgcatcttgaccacttttagatacaggctgggcagctctgattattacacagggcttccttcagaaacctgcctccttgtaactttcacccaccagttggagctctgcctgcaggacccggagaatccctaggctcctgaattcaatcctcagccctccagggatccgaagcaggtcccggggagttagctgactataggtcaaagagtcagcattggggatggtttgtccagtcaatggacaactctgagggagaagggccagtagagggtggggccctggccctgagcatcctgcagggctcagcgcgggcctgacgacaccctcccttgaccctcgcggggtctcctttggtagcttctgcccagcgggggtcaagtacgtggggtgctcttgaaactgtcatggggggcaggtctgggtcagatctccccaatgcctccacatccccacgtggccctcccgactggtcccattggtgtggagcatggcccggtccgggtctgggccgagggcggagggccagcacggcccagggacggcgagcagcgggtcggtgggacgcgcagcagctgcagaacaggcatctcaacttcctctcggctcctctcctctcgcgccgccctcggggcccgccctcctctgcctggtggcgccgggaggctgtttttccactcactggcgcgcagactccatcccactgttttcttctctcttttctggagttagattagtctgaagccgccaccagccccaggcccccgtgcagaagaaaagcgggagggaacggcggaggccgccgctgccctgcaccgccctcctggaggccacttggagagt

SEQ ID NO: 5909 - DNA, 2300 bp, Homo sapien
tcatggcaggtacagggaccaatggctcccctctgcccagcccttcccaggctgatgttcactgtctcctcccaggttcaacagacatccctgccccagggtccaccctcgtctgtggctgttcagtacctctcttcctttatgctccgggctcggggagtgggaatcatcaggcgtctcatgaagtgggagccctctgatttgggcaagcgtgtcgtaggtgagactgggtgtgccggggcaggtccataaggacatgacacacagcctacctggtgtgacacacctggggtgacaggcgatgagacaagatgtcagaagctaggttcacatggaagaggtcagagtgtgtggtcaccatgggggtcatgtgacaattgtccaggtggactgcatgtttatttagcacaaaccaagcacaaaagtcctcctgtagaggggtctttgaaaaaccaccttaatacccccgtcacatccaggtctccaggggaaatcagaccatccccaaggcttgagaagttagacacagaagctgaagtctctccatttttctcaaagaccccacctcttggggatggagttctaagaggctaagaggagctccaaggctctagcccaggtgggatgagggtggaggagagcagtgtaaagagaaagcagctcagattccagagtgagacagaactgggtcaaatggtgtctctaccactcacaaaccctgtccctgggccagctgcatcactgcctgtgccttcgtttcttcatctatacaatgaggatgaggcccccccggcccgccatcatggggttgctgtgtgtaaaagcacatggcacatagtaggcacccagcacagggtggctaatgtatttgttgatttctgaacctaaggacttccttcctcctcccctgggcagggatgagacagcaacacaaacactcgagcttccatcttgttgaggaggaaacagaggtacagataggtttctcagcaccgccctcagctctgagacataagtcccaagcatctaaggattcattttgatcttggcatgattccatccttttttatccatccttccctctattcccacttctggggtccagtttccctcctcttaattatttgggaggagttgctcagatctttgtgggccaaggtgggctgggagggctcttccaggaggtaggagttggtatgggccctgaagtcagggaggattaggatgagcaaaaaacaaggtgtatgttggtgggtggcagcacttccagtgggaagagaaggcccggaggtatcaggaggtacaaatgtgatgaagagcaaagctttgggtcaggcacacctgagttcaaataccagcactgcaggacttgtggccagtcacccagccactctaagcctcagtgtgtctgtctataaaatggatattagaagacctgcttggccaggcggagtggctcatgcctgtaatcccagcacttgggaggccaaggagggaggatcacttgagcctgggagttggagaccagcctgggcaacatagcaagactctgtctctgtaaagtaataataataataagaagaagaagaagaataaagagaagatttataatttttttaaaatgaaaaaattattttttaaaaaagacctgattttcaggattgtggtaaggatagaggaagataacttttagggaaggatctgggactgtgtttagcacatgctgggatctgaaacaaacaaataaacaagcagaacttggtaccttttctttccttcgtacatatggtcaagcccagctcagggaggccagcgggtcactcggcagctccaccatgacggaaccacgagcactgcagagctgacagatgtcgggggtcctctccctccatgctaagggtcatctagcctgtccgtagactctcctgtgcagcattcctgacccgtgacgcttcagcccgcatcttgaccacttttagatacaggctgggcagctctgattattacacagggcttccttcagaaacctgcctccttgtaactttcacccaccagttggagctctgcctgcaggacccggagaatccctaggctcctgaattcaatcctcagccctccagggatccgaagcaggtcccggggagttagctgactataggtcaaagagtcagcattggggatggtttgtccagtcaatggacaactctgagggagaagggccagtagagggtggggccctggccctgagcatcctgcagggctcagcgcgggcctgacgacaccctcccttgaccctcgcg

SEQ ID NO: 5910 - DNA, 2300 bp, Homo sapien
tcaaactattattattattattattattattattatttatttagagacaaggtcttgctctgtcatccagactggaatgcagtattgtgatcatggctcaccacagcctcaaactcctgggttcaagtgatcctcccaccttggcctcccaaaagtgctgggattacaggtttaagccactgtgcccagcctcaagtattttaaaataacactgcgcttagaatttgcagaatgtgtatatgtggttagagcacgcagtatgggcactactagaaaggcacattatctacaaacagggagctgtgtgcaatatacaagacagaattccaggtggccccctgaaaccactcctcctggtttcctggaccaccccaagcccaccccagctctggcatcagctcacacctgctgttggccatgcacgcaaacactgcaggagacgtgcagggtaggtcgcctccatcactggacctccctcatcctgccatccacctatagtgttccctggggagcctctgcaagggtcttccggaggctaccagcctgggggctccatttgccccaagcccagcctgacagcaagaggagcaacatccttccccactgtatcctattggtgacactccagcatctccacccagaccagcagaacaggagcctgatttgcccagaagagaaaggccaaaaaacatttcctgacccctcctccaccccccactcccagccccacgagagagctagcctgggttccagtcccactcctccacctacaagctgggtaactctcagctgataacttaacctctccaagcctcagtccccatctctgtaaaatggggatggcagtacctgtcccataggattgtaagaagattacacaggcaatgcatgtaagtgcctgccatggggctccacccagggcaagcctgggtcaatgctggttctggtcagtgatacagagaccctcagacacaaagatcactaacgtggtcacacacacacacggatacacagatgcagaggcccaaaggcacagtgagctcacatgtgggcacacacatggggaggcacagatctgtgggccccatggggatgtcctggccaggctctgtctcagccccagaccccacccctttccccagacaggagccccccggctggagctggatctgacctgcccttgggaggtcagggagagccctgggcatcagagcgagcatgctcagctcctcctctttgatgtgtctgtggaggagggctggccaggtttctgcaggcactctggaggcccaaactccaggcatgaaaccccatcaccccacccatttaattttttcacccccttgctgtcagcatgcagacccctttattttttgattggggaagtagaggtcggaggtggagccaggaaagggtttgccatccacagcccacaaacacacaggcacacccacagagacacaggcaggctgacacaaggacccctgcagcacactcacaggccacagcccctgcccaggcaacttatcaaattcaagtcctctgccagcaaatccaggatgtttcattctacgccacgtccacattagcaccatcccctgcaccaccactgccatcccctctgtggctagtatccccacgaccaccagcagcaccctcactgcagccaccaccaccgcagcaccacaccgtcatcggggaactgatggaggagccctctaggattctgatacagcatggaggagacccccagtgggaagggcaaaaggagggcgatgagcttcctaggagcccagaagacaaggtccaggacctcaggcccctgcagcagccctggactctccaaactccagccctgctggagacagtgtcttcccagtctgtgtctgagccttctctcccgcccctccctccctccctcccacacccacagaaagctggtctctagcaggtgctagcgccggaggtggaggcggctgcagagagagagaagcccaggagggaggggcacagccctggctgaacccacaggattggtcaatctgcatcctctcagccagcacctgactaaagattcctcaaagcgacagtgacctcagcctctgctctgagctctgttggtcccagccaggagagcccgagtcatgaggtgggcacccagtgggcagggtgggcagcaggggccctcttggaggcagcagtgagttgggaagaggaggccgggccccacagcgggcatgatggacaagttccggatgatcttccagttcctgcagtccaaccaggagtccttcatgaat

SEQ ID NO: 5911 - DNA, 2300 bp, Homo sapien
tcctatcgtttgtcacctttccgtggccagtgctgtaaacataggaatgacacaggattcccaattacccaggccactctaggggctgcgggaaaacttcctctttgccctctgaagctctgctgaaaatcaactgacaaaaggcagattaataagagaaaaggcatacaaatttatttgattaccgttttatgtgccacagaaccttcagaataaagacctaaagatacagaggaaatggttcatttttatgcttaggttcaacaaggtttggatagccacgcagaaatagaattggattaaaaaagggatgaactgatgttatagacggagtggggaaactcagcaaggccatctaggttcttcttggcctctctatacagtgttcctttctcccagacacggggcaggaccctctctagaagggagtcttatgatctacaatgaaactaggtaggtcagatcatttctttacggccagttttcagacagaaaggcggggggaaattagaatcatatttttaggttttatggtggcagctttggagaaaaggagttctggtttctatgacccaccttggggaagatggattctagtttctatggctagccttgggggaaaataaggagccagagattgggtgggggggccaggcgcggtggctctcacccgtaatcccagcactttgggaggtcgaggcgagtggatcacctgaggtcaggagttcgagaccactctggccaacatggcaaaacccccatctctactaaaaaatataaaaaattagctgggcgtggtgttgggcacctgtggtcccagctactcaggaggctgaggaaggagaatcgcttgaacctgggaggcagaggttgcagtgagctgaaatcgtgccactgcactccagcctgtgcgacagagcaagactcaaaaaagacaaaaaaagaaaagaaaatgctaaagccaccactgcctagaacatatttacagctcacactgggtaggccatgcacgcacacacctggcacacaccattggatgttttgtgtacaatccaattcagaaacaacatctgcatccggtgcaccctcagcctctgttccatgttctcagggatcacatctccctgcaattcagctgtgcagggtgggtcacaggcactgggtgtgtccttggccttttcctctggggtccagtgggcacagctccactgggctcctgtcctgtggccaatacccagtcgaggtcactacaggcaggggcagagttgatctggaaaggcgcctgaggccggtcagagggtgggctcctgggatgccttgtgggtaggggtgttagaggtgctgcttttggagggttactgggcagggctgtcttagcttaggctctcctccaaaagcaggctctgaaagaatgtgataatgagtgggcaactggggcttaatccttcaggggaccccctaagggcatgcatagaacacatctcagaattttcccactgaggatttaagaagctgggatatttatccacaaggccccatccctctggggttgaaggttgatttgggggttaacttttcagtgcttccagcctacccctctctggagcaaaaaatcctccaaagccccaggggcagaacaatgcagatgcttgaggtaggaggccctcaggccctccaggtgaatagaaccagccactgcacccacagatgcctctggcatgggcagggcaccagcagtgtctgctgtaaggcctagggcaagaggaataccaagtcctcagtgctccagtcctggggatcccaggggcccctgccctcctttctgcctgtctctgtcactgggacctctacactgggagctgcagtctgatgtaacccagcctgggacttcccagcagtccatccttgcacctcccctgctgcagctgacttccagctgccccttgacccccctccttcctctgctgccaggtacatgtgctcctctgtgctgcagagggcgctggccgcccccctggtctggatcctgctggccctccttgacgggaagtgcttcgtgtgtgccttcagcagctctgtggaccctgagaagtttctggactttgccaacatgacccccagccaggtacagctcttcctggccaaggttccctgcaaggaggatgagctggtcagggatagccctgctcggaaggcagtgtctcgctacctgcggtgcctgtcacaggtaactggggtgatcctcccccggcccttgcaccctcacaaatcccccgcattggttctggagtggggtgagg

SEQ ID NO: 5912 - DNA, 2300 bp, Homo sapien
ttatgtttttctaattaaaatgttttatgatttttgctggaaatagttaaaaatcattattatgattatagtaatgatttattatgtctactattataaaagtcgacaattcagaaaatagagatttaaaaaaaaatgtaagccatcccctctctttgacagataatatcccttttgtggtgggcttctttctggcctgtttctttactgaagtatttcctgtaaatacccggcaagggtcagccccgctgcagtcactcagcacctgttgccctgcagggctccagggacccaggctgacctggtagctctgtcttacctctcagaggctggagctgtgaaaaggttggcctggagtctttgacccagttttcttcaaagtgttcttccagaagcattgtctattgttttctgaactctcaaggttagagtggctggggacccttaggacactctatccctccctgagactagaatgggattgaggggtgctcatgaccctcccagcccagttagctccccgcctgctccacaccagccctgctggttcagggtcacgaagcctggccttgggccaggacagtccccttttctggtcagcagcccagtgggtgactaaggctgaaaggcacagatggaggatcccagcttcctccctggctctgtccccgccagggtatgtgacctccaacagcccctctgggactgtacccacctgaagttgtggtggtcctcctggcttgaagggtttctcacccctgccccgccctctcctccgctcagagtcagactcacagggccactggtggctctccccatcttctccagtgcctcatttccctcacacagggaaatctgtctcataggacctagagtaacgtacaaatatggaaaataaaaatactaagtggccaggctcagtggctcatgcctgtaatcccagcactttggaaggccaagggggccaaatcacctgaggtcaggagttcgagaccggcctgaccaacatggcaaaacccctgtctctactaaaaatacaaaaattagctgggcgtggtggtgggtgcctgtaatcccagctacttggaagctgaggcaggagaatcacttgaacccgggaggcagaggctgcagtgaaccaagatcgtgccactgcactccagcctgggtgacagaacaagactctatctcataataataataataataagtaagacccaggtttctgtctgtcttcatcagaagtacagaccacacagatggttacgaaatttgcaagacttatttgggatgatctgacttacaatatgggccaagtgacctttacaaaattcgttttgcaggtttcaggggtccctcaaacatctgggctgtcatccttcggagagactggaactgagacacaaggagagacctagtgatgtgggagagttaggagaagaagcagtgatttcaaacgcatgcccctcacacggaagaagggcagggggaaagccatgcaggtgtgggcgtggcacttgagcagcctctcccatgggcacccagtggttaatgcacaatgtttagcacgtcgcccagggaggccatccccttccgctacccctttcatggcaaatgctgaaacatcgttgaagactcctctcaagggtctcctcttccaggaagccttcggtcaggaataggtgccccttctggctcctcctagcctgaaagccaacatgaaatctccctgggctgagctgagtcgtcatattttgttgttgttgttgctgttgttttactatgcctgtgagacaagttcagagtcatgcttttgatcaagaccagaaaatatactaccttggctccatcagcatcttttcctcaccacacccagaatttgcctgtcccccgaaggaagctccaacggctgtcaagcctgagcatccagaccgtaaagcaaagagaaatgggccgggaggaatggagtgacagggcggggcccatttgcctagaggtgctttgggctgcccggtcacagagggtgactcactcccccagacaggaggggagtggcaccaggggaccattgggctgggcaggggagcctttgtggtgagagcctgtccctgccttaagtgcctactggatcccgggagcctgggctggggcctgggcactgcttcctccttggcccctcaggcccttggaagcagagagagaacctcttgcagatcccaggctcgtccccagcacagcagacaccaggaaggtggccagagcctcactgagccgaaccgacggccgcccacccacccagg

SEQ ID NO: 5913 - DNA, 2300 bp, Homo sapien
aaatcctagctaggcccttgtacttcaaacacactctagcaggatgagtctcaactatgcagagtcctcatatttgttctaacttgtgaaaggcctgattctagtggccactcacagtgacttcattccggcagatttcagggggaatataagtgtgtgtgcttgtataggtgtgagtgtgtgagatagtgtagcggtgtgttagcacatgtgtgagtgtgttgccattaagagcctgtggatttctgatgcatgagtcattagctgggagtgagccttgggaagatactgcccataaataagacagccatccctgacctgctgtggccatctgcagctgcctgcacacgtgatcctgggcatctgggaggctggaggccgggttcggggctgcctttccctccagattccagagagacagtggctgtcacagatatttctagcttgcctggagtcccagacatttaagggtagaatgcctggaatggggatggagagaggagagtaggagaggaaaataaagggtggttcaggaggctctgcccccagggatctcagtggagcctcctggcccacagtgggaagcatgcattccacaattattttctgagaatctgtcacatgccaggcattcccccagtgggtaaggacaccctggtgaacacgactgacctgtgctctcccctcacagagcttatgttctagcagggaggcagaagataaacgaggaaaggctacttgtaaacaagttccatataaaagctatgatgaaaataaaatggaatattgtggaaagtgactgacagtggagggggtcctttagttggggcagtcagggaatgtcaggacacgaattgtgcctagataatgaggagctgccaaatggagacttgggggaagaacctttattacagaaaaggatacatgagatgtccccctgcccacccatgtcttcactggactctggatctgagttgctgaagccagagcagggagctagagatgacttagaggagcaggaagtctgattccctggggggaaccttggaacatcttccatccctgatagaccaggagagatgccccgggtccaggaaggagaagaatgacttctgtttcccttcctgaaggcttcttggtgcagtgttgagctacaggaaggcactagccacatgagcagggcccttgctgaaacccccttcctccaggaagccttctttgactgccataggctgcagaggctcctctcccccaccttgttatagctaacagaaccactcagttcagagctggtggtcttctgatgatctgtcccggagatctgttccctcagcttggccagagctccaggcttgtgagtctggtccgcgggcattcaaaggccctcagtggcatctgtgcatcagtgagactgcccggggttcctgctctgaacccttgccctagtgcccctagcctggctgagaacggagggtcaagtgccggggttctaatctcaattactttatccaagcatccgctcgctcatttacatgtttccctgggctctccactctgcgccaggcccggtacctggagctagggaaaccgaacattagtgctggctcgcccgcccccgcatccggggagctcggcgttctcgcggccctgctccccttgttttcaagtgcaagttccatgtttccgtgctgggaataaggccagccccgggtgccaccatactcgcctgatgtcttaccccgacccgcgccgccgagagcttgcggctacgggaacgcggcgcgccccggggccacatctggcctagcgggcgcgcgcgtgtcactaagacgctcattcaccggcgcagctgtcaccataacaaccggagcgagggaatcctggagactgccggggcggggggcgggggcggcggtcgcaggagggacccggcgcgggcgggaccgcggcggtcgggggacaccagctgcgtcggagcgcccagaacgccccgcgctccgccgagccccgctccacgcagacccgcgggcgggagggagccacgcacatcgccgccgcggccgtctccgcggggcggtaaccgagcctgcctcggagccgccgaacgcccacgccagcgaccctgactctatggccccgggggagcgcgccggagccgccgcgccgcccacccccagccggaaccctagcgtcccggggagcaagcggggagccccgggcgtccccggccccggcccagggccctgcttgtggcccccgctcccgccacggggcatgggaggcaggtagcccagcctgcg

SEQ ID NO: 5914 - DNA, 2300 bp, Homo sapien
gggccttaaatatagacaaagagagcttttcctctgttcttccccattgcgctgaggggctgagggatagcggaggcctggaaaagtgaagccacgtgcccagcatcatagtgagtttgaggcagggctgtggcacatctgtgggctgctggtgcagtggtggctgtctctgaggtcccaggaggactggggagtgatgcggcaggtgccaggtgaggggaggagggggagcagggctctccagctgctgccgctgctgagctgctgccgctgctgagctgctgctcacctggcctgggcccttccgcctgttactagggctagagcctggagccaggcaaaggcacctccccatccctgtgcatttaaagagcctgtttttctaactcccctctcctctccccacaagatcagcttcacgtgccccaactggagaatgcaaactcccccatctagcaaggcttctgggggccagtgtcaggctgggaaggatgcatggtgtgctccagggaaggtggggctgccctacagctggctgagtcccccctcaggtccagaggctctgcctcctcagccccttgtgttcctcccttcccccaggaagggggtgaggttgctgttgaggttggccaggcatccagctctggtgtttctggacatgatgtctttctcttttgttttctgtacttttaagcggcattctcacaggccccagccttctctctgctcagcgtgctcaccatcttttgattacagcagcatcttgagctgctgcgatcaggggtagcatacaggttggcaaggatacaaggcttggggtcttgcgcttgagactgcaagccagcacctgaagcactggctacttgagtctcccatgcctggtttggccaaatgacctttctgtgcactggtggggctttctgccagttctagacactcacttcttgctcgaggcattgggtcaaggaatagccacttggcatggtgctcagagtgtcatgttaatgggcagagcagtggcgtgccatcgagggaggaaggccaggctttgcgtaagaggagcttggtcaacccagactctaagctcagccaccaaacagccaagtgacctcaggcaagccacttcacctctctgagcaccggctttgctcatccacagcatggaggggtgattaggagtggagacagtggccatggttgctttccagataccaagcttccccattcccctgacgactgtgctgttaccaagctgggcaagaagcccactttatctctgcagttctggagctcctaagattccatcttacccctagggacctgaaaacgggccagtttcagctcagagggagcaggcgaggggaatttgaccatgttggcaagccttcagccagctcttccccgcagccaaatgggtcactggctacaaacgtctttgggtttgtaatgatgatcacagggatcgtggactcctgaacacctttggaatgggctttgtgcagccaaatgcatcacagattaaatttctggagaaggaacagctgagacatagtcttgagcttccctgagccacttctgtactatggcagccaaagggtgtgcacacgcacgcgagggggcacgtgcattttctcccctgacaaaagggtgggaggtggggcaggagcaaaagacgatctgatcttgcaatttgcaatagccagtgggccagctggtgcttctcgtggtttttaggatagtgccgggaacagaaagaatatgatgaatgtcatggaatttcatgataggagtttggggtggcttcccctcctttttaaaataatgttttgaaaagttgccctggagaactgctgaaagcagagaggctgatggacgtttttggttatgtcagatgaggacaagattatccaagtgagcgagggtgtctctccctgtcggctgggctgcggggttccagggccgccctgccagaaagcaagcaaagggcccgtaatcacaaacaggctgggatcagttacaaccagaagtattactttagactcttggctttgatggggaagaatgcagttttccttggccccctcccccgtccttctcaagttaaacaagagccatgaaagcaatagctctggcgcttaaagagaggcttggtgcagggatctcaaaagccaaacattggagggctcccctgacccccactggtatcggggtagggatttgcctgacccttttactaccccatttcttcttgtgtgcactggggaatcctgtttttccatactctttcttgtctacctggg

SEQ ID NO: 5915 - DNA, 2300 bp, Homo sapien
cactggagcagcctcagaatccccaggggagtttgttggagatgcagaccatgcagtaggttggggtggggccctgcatctgaattttaaccactttctagatgattccattgaatagcaggctgagaatcaccaaccagggcctggcacaaaggaggccctccaagcatgtgagttttgtgtcttccccactcttttttttttttttttctttttgagacagagtctcacttgtcactcaggctggagtgcagtggcaccaccacagcccactgcagtcttgacctcctgggcttcaagcaatcctcccacctcagcctcccttgtggctgggagtacaagtgcttgctaccatgcctagctaatttatttttggtagagatagggggtctcactatgttgcctaggctggtctcaaactccctgtctcataggaacagcctgggtagcctcaacctgctcagagctggagaaggcagccattcctgtgaggcagccacccctgcctgggctactggcagccagggggatggtcagtgggccatcagtcctgggcttctcctgccaggaccagcaggaaaattgtgggacagcagagggtagctcctcagtgccctcactccctgcccttccccagtagccctcagtgaaaaggcctgaaaagctaatttcctccttgggagtggaaagtcttctgggcaggacacagctacgatctaatactctcctcctcctctcaggaattccctgcacagttgagcttttggggggcacagctaggactcagtctctgcccagtcttccttctgcaaggggggcaagcatgcctttgttaaggccttccctggactgactggtgggagccaggggagggggcaaatggaagctctcccacctttctgtagtccctttccaaggcaacggtttcccagattctcctccacaccatccacgctgcagtttttattccttccagtgggcttataaaccacagcccttccccagattgggcaaccttcggcaatggctgaacctctgtttcctaatctataaaatggattaggatgataggaccttcctcttagtgtgggtgagaggattgaaggagacatggaataccaagggggttctcaaacaagatggggaaggaaggggagagagtcagaaatgcagatttcctggaccttgcccccagcattctgattaagtgggttctaagttttgggaaaggtcgatgcctaggagagggggagctccccactcctggctgtgcaggcaaatcaccttggagattaataaacactccaatgttggagggcacccctagacctcctggattggaatcttggggagcctccatgaggatgactctgctcctttccctgggagcctgctgcctcttcctccaagagaacccccttccaccgcatccccccaaacccccaaccccgcctttccagtggcagactagcgggctagtttgcttcgaccaaagatgggcagcaactggcattttctttggcccctggggaaaatggaaggcatttccttcggactccggagagagccccagccagcccctccactgttccctgagcactgaacagaactttcagcctttaggggcatgtgaggctcaggttaagggagccagctcacctttcccagtcccctgaggattggtgaatggaggggggtgggaggagtggggagataaggaaggcaggagcaagggcaggatttgggaaatctgcccatctttgagtctggactctttgctggagggcagggcaggtaaacggaggctgggagggtgcagtgcctaaggtcacagcagttactttctctgacagcatttgaacccacttcctcagaagctccacttccgttcctaccgttcctggcctcccagttaaccttgcagtatcctctgtcccccccactacccgctcctcaccccgactccccagctgtagcctttgagaaggaccttatccatggcctctgccattctcggggcgtgcagtgagaggaagcagccacagtggcccccagcgagtctcgggtctaggacaggggcagactttaatcaaaggatcacacaaatctgtgattacctggcgggtggttttgaggaagacacgttgaggaggtgacatttcagtagtgacttacgggctgagtaggctgggttcacctcccaattctttgcatcgctagggcaagccatgcaaagaattgggaggtgaaccgctccggtggcggggagagcgggctcccagcgctgggtaggggccggg

SEQ ID NO: 5916 - DNA, 2300 bp, Homo sapien
cagcttttaattattacagtgcccgattttcttttgggaaacaatccctccttcattctcagtccatgggatttcagtggggttgatcccatcccaaactctggggctgatcattaagtacagtccagccatgggcatgcaacccacattggtccagtgggaatcagcctgggactactgctggaactaccaggaagagatgtgttctctctctacagctgctaactcataaatgccaagccccaagctgctaggaagcatctttatgtatctctgttaccacctgggggaagcctatcagagaattaagtcaacagaaaagacagcaaagctgagggcttaagagacacagatttggtcccctagatccagctatgcctgaaaccattactcttggttttcagttatgtgaaccaataagtttccccttttttcttaagccagattgagatgggtctatttcttgtcaccaggagagtcctgactggtacatctggctctgccagttactgttatgtgacaggggatgagtcataacctattcgaatgctagtttcctcagactacaaaatgggaggcagtaatgtctaatgcaaaggactattacgaggagccagtgaatgagtctgtaaaagcatttagcatggagcccagcccatggcaaatggtgaacaaatgggatctcttatgagttgacacttccaggtcaaggaggtgggatggggtggggtgggccctgcctgtctccttgctggccacgtggaatccaagtaccagaagcatttcccaggcacccagtccatccacctggcttcccaccaaggccaaacacgagctcccctcagcctgcggctgcccttcctgattcacccaacccataaacacatctgtgtctcccacacggcttccgtttctcggaggcccaactcagagggcagaggacgtgacacaatggcaaggaggccaattgttcattccacccgccccctaggggcattctagggtgactcacacaggtgtgtctgcccgctccagcactccccactccctctcccacacgcccagggaaacacacttgcaaaagcccactggggttcacgacagagtgaagccttcaccctcctgcagccacggcttgcttgcagaaagcatcagcgcaccttggagggaagaacgatctcccaaattctggttcggaggttcccatacccagtaagcagagccaggctgaagggaacagtatctttctctccctcaccccaggtgggtcaactgggattttatgggtgtctgctagtgataaagcacctagtcccaggcccatggagggactaatacatctttgctgaaccaaatggaatggaagtctttttgagcagcattctagagcagtgggaccagaaccatttctttcttttttatttttatttatttatttattgagacagggtcttgctctgttgcccagcctggagtgcaggggagtgatctcggctcactgcaatctctgcctcccgggttcaagtgattctcccacttcagcctccggagtagctgggattacaggcatgcgccaccacaccaggctaattttttgtatttttttgtagaaactgggtttcaccatgtagcccaggctggttttaaactcctgggctcaagcgatcctcccagagtactgggattacagacgtgagccactgcgcctggcctcagaataatattctcaaaccataacccttgcttaaccctttcagtgactgcccagggcactgaggataaaatccaaactcccttctgtggccgggcaggattcagctcctgcctctctctccgcccgcccatctcctgtcactctgcccacgccacagacacatcctgctcttccccacctcaggcctgtgtgttcgctgtccctgttcctgttcctggagcactgttcctgctgccctttgcccagccattgccttgcatccctcattgggaggcctttggtggccatgtgccctctctctccggcctccgttgtttccctcccagaatctgccaccattgataatgatcttctgaacctgcctctttacagcgttccctaaggacagaatgcaagcttcttgcagccagtgaagcccacgaacgtatcctcagggcccagcacaaggacgggcacacagggaccccgaccgcgacttgctgaaaggtgagtgagtgtgagtgtgtgttcacactggcttgctctaggctgtctctcatttacacacccccagacccctggcagactagcaaatacagctcacccc

SEQ ID NO: 5917 - DNA, 2300 bp, Homo sapien
atgcaagagacaatcctaaaattgtgtgttagagctggatgggtggacaaacggatggatggatggaaataaatgcgcgcgcgcgcgcacacacacacacacacacacacacacacacacacacacacacacacagagtctagcctagaaccatgctatagcttggatatttgttccccccaagtcttatgttgaaatttgatacctggtgtcggaggtgggcctaatgggaggtgtttgggtcatgagggctgatccctcatgaatagttggtcctgttctcatagtaatgagtgagagccagttgttaaaaagagcctggcgcctcccccttgccctctgcttcctgtctcgccctgtgatctctgcacatgcccactccccttccatgccgtgagtggaagcagcctgaggcttcaccacatgcctagtagattgtgagccaagctaaataagattcttttcttgataaattacccagccttgggtcttcctttatagcaacattaaacagactaagacaaaccgcttttcaccacctccagtgctaacaccttggtccaagtcaccttcagtaggatcctaactggtctccctgcttccaccctgtggtccattccctacgccgtagctagagccgtcttttctaagtgtgaagcagatcgtctgtctctgcacagaactctccaggacttccccttccatcacgacaagccctgagtcttcaccacagcctcaccaggccctctgtgctctggcccatcctgccactcagatctcattgcctgtccctctcatcctggctcactccactccagccacatcggccttgccaggctctttttgcacgtcctgcttccctgcctgaaacgttctccctctccagcgtagcttgcttcctcgcccccctgcaggtctctgtagaattgctagctcgaggtcaggccttctttgccgccctatataaaatgacaactcctgtactgttcccgtaccatatcctacttgattttcctccgcagcactgatctgatcttccctggcacatgacattcttacttgtttgctgtttgtctccctccaccggagtgtaaactccctgagcgcaagaactttgtctattttctttactgccctttccttagtgcccagtgctgtaaagtggatgctcaatatgtatttgaaagactgattggacttcaaagatcatgtgactgatccttctcattctaccaaggaggggcctgaggcccaaccttgagaggctccattccttgcctgaggtcacacagctggggcagcaggactagatcatgactcccctcctgcctatgcctcagaaaggaaatcagccacacacaaaggggccctggcctcatccatcctgtctcctgtgtgtttttccagtttacatagaatttcagtccagaatagcaaaaaaaaaaaaaaaaaaaaaaaacaaaacagttgttcctccagaaccctggaaactcttccagtgggtccgtccttggaaaaacagcagcgacctcagggtgggaaggtaggaagtggaggaatggtcttccggcagcaggggcaatgggatggatttggttttgcaattaaaataacagctggttctgtttccacagcacggttctggaaggtgggtggtctgtctaaagtatcaggtggggccttcccccatcctggcccaagagggttcgggatggccagtggctgaaggattcaccccacagacgaagtaggaaagaaactaggcccaaaggagcctctggaaaccctacaggcagcctggcctgaaagcctctggtccctaccccagccttgctcggggtcatctcctgacaccttcccctgcactcctacccgctcactgagattgatcagatgccctctttgatgcagagagagctttggcctcctccctctcatgccccatgtggtttgttaatcatctgtgaaatgagggatctcaggcgtcactcatccgtgtgaggacactggggccctggagcagtggagtgagtggggaagggatgatgaggaatgttctggtcttctgaatcctgtccctctgtctgtctggcttctcagatgcagcttttggataagtttcccattgaaggtggccagaaggaccccaagcaaaggatcatccccttcctcccaggtaagcattgggtggctccacccagggatgggggatacccgggaaggaccagtccttcccttaggccgagaagagtactaagcagcagattctgggcggggcatgcccaggaatctgcatatga

SEQ ID NO: 5918 - DNA, 2300 bp, Homo sapien
gccctctctcctacaaatttattgtgcttggtgtgttcattgtggatctgggtccgaaagaagggtaataaggaaaccactagtgctgttttagatgagctgactgctttgattcacaaggggacccaaatcaaactaaaccccctcctcttcttccccccacaacagctaaacaccagctcccctcgctggtggcttctcaggttttattagcacttccagaagactttgccatccacagaagacgagttatccgagagccatgatgaatctcttcctcacaaactcacaggctgtcttgatccatcatcagagaggacctggagctggccagcaccctcccaagttcgggagctcaatatggagggcccgttccaggtctacctctcatcccttcagggaataatccttgctcatggaggtagtgccctgtcctcccattttcccatcagctgagcaacattaccaggtgcaccttcccccaggactcctgctccaacattcacaaaggttttctgtcatcttctctgaccaagaagctctggcctggtgccaagatctctcacagtctgagccccctaggcccatccatctttttttttctttgtcccgtgccatcgtttggtgtcctagcgcccttccccaggaaggttggaggaatagtgggttactctgtatggagcaaatatgtgaataaataaagccttagatctgtgcctgggttctgacagtctagagaacgcgcagaagaaagtattaatgcaattaggtcacaaaattatttgtcctcttttcagatgtttcacattggtccacagtcacaaagctttattgtgattgtgtaacaactggagtagttgtgaaaacactaccctttaaatgtttgaaagcagaatgggaaaaaaatgttgaactagaaggggggaagctacattgaattaagtagtaactgtgctccaagtccagggaccacggacaagtggcttggaaagtgggttttccagactagagggaggggtgagaatgccagagcctggggctcacggtgagctggcctccaaccgggtgggttttcccaccattgtatgctcctttccctgtcgccagcttggggagggtccccaggggagccctgggcttaaggcagtggtgttatgcagagtctgtaacgttgtcattggtaaatgatgcacagggtagttacacaagcccagatcgatggacgactcaggcaacgaatcgatcacttttccggggagaattcaccctttatgacctgcagagggtcaggtggttcgtccaaagaggctctggcttgaaggatttaaagctggccttttccccattcccatctcctcctcgggggcctgggcagtaacagccgggtaataaactacttctcattaaagagatctgggggtggaagttgtagggggacataaaagtggggacaaaaaggcacaaatccgctccgaggcggaaagccaggatgggggcgcgcggggctcactttccccgctccctctccccccgaagccaccctgagtttttgtgcctagcgaactagcccggtgctgcgccaggccgctggctgcgcgctgggctcgggtgggggctcgtcggcccgcccctgccactggggccgggctgcagccccctccccgtcgccccgagcccctcccccggcccggagcccctccccgcgcgcttcccctctctcccctccctcccttcccttccctgcctgccaggccctgcctccgcctcctgcgcccacagcctccgccagcgccgatccccccggagcccgagccggagagcggcgaaggggagccgccggcccctccccaggacgctgacagcaggctccggggcccccgccccgtcccctcgccgacgggacacacccccgcccctcctctgctccgccagttcccgccggacccaccgggcggcggagagagcgagcgggcgagcgcagcgcggcggccgcgcgggagtgaaggggcgcgcggcaggccggcggggagtcccccggggcgcacggagcccgcgcgccctccgggaccctcccccgtccctgggccggacctgtgggcgccgggagtccgggcagcgttcggcgcgccgggccggggtggcgggcggccccgggaccccggcagctggagaaggagccggagcccggccgggatgagaaggtgacgccgccgggggcgccactcgctttgtgggggaagatgctcgcctactgcgtgcaggatgccaccgtggtggacgtggagaagcggaggaacccc

SEQ ID NO: 5919 - DNA, 2300 bp, Homo sapien
ctagaattctatattggggaaaatacctatagggaaaaagttaattacggttcttgggcacaatgaaatactatgcagctatgaaaaaaatgatgaaagcagacagacagtgttgccatggcacactgtccctagtagatttagtgggaagtagatagagttatagatctgtttctatagtataacaccattatctacagctccctgtgtgtatgtatatatccgtagagagagtgtatatttctgcatggaggtctttataaatgtagcacatgtacatatatatatatatacacacacacagtcgaccactcccttctcctggaagtactttccgcgtttggctttcaggacaccaagctctctggttgctccttctcaggttcctttgttcagtgctctgcctccctgaggactcagtcccagacctcttttctatctggcttgctcactggggtgtctccagcagccacatggattataccatctacatgctgtctaacacctcagtttaaacccagaatgggcctcttccctgaactgcagacccctatattcagtttgctactgacatctccacttaggtctctaatggacatctcagatttcacaggcccaaagccaggctcccaattactcctgaccccaggcttgctcctgatagtgacatgaggcagccaaatgcctaggcagagaggggagggtcccaaatgaaaccccacgttcaagcaaagatcagcctgaaggctaaaagaccagattgctggtcctggatgaaacccaccacgcagagtgggaacttctgttcctgtttgcccaccctttcccaattgttctttctgaataacgccttaaccaatcgaatgttgccttttccagtaatacctacagcctgcccctccccccattctgagcccataaaaagacccagactcccccatattaaggggactttcctgcctttgggtagggggaccacccccacgtctcctctctgttgaaaactgtttcatcactcaataaaactcccagctttgctcactcttccactgtcagcacattctcattcttctttggtgctgggcaagaactcaaccagtgtggaagccatacttggcccaggcgggtgaagtgggcgggccgtctcctgcagcaggtagcatggtcaagcgaggcccaggtgggccgtcaccagccagaggtccctggcttgcaaagtgaccgagaaaaaaatcctgtgccactcctttggaaaatgtccctgattcaggaagaggtagctccatccagttgctcaaaccaaatccattggcttctttctttctatcatacctcacatccaatctgtctgcaagtcttttggctctaccttcagaatatctccagaatcttaactgcttcaccctcctccccggcctcctcagtcctctctgcttccgccctggcccctcttgggctgttcacagcacagcagctgttgccaccctgttaatgctcccactctcctacagccttcggtcttgccccaggtaggagcctgaggctgcacagaggtcagcacggccccgcttaccctgccctcccagcccagccgcacgggccttgcacacatgcctcggcatattcctgccttagggctggtgctcctgctatttcctcttcccaggtaaccatgtgaagtgcctccctctgccctctttccagcctttacttgagtgtcaccttctcagtgaggcctgccctcattcctctttcgctgtttgcaacccatctcctgtcccccttcccagaactccctttcctacttcgtttttcttcacagtacttgatactgcctaacacactccatggtttcttacttgccctgtttattattttcccccaatagacagaatgttccatgatggcagaattctctgttttgtttccttccatgtccccagcacctagaacagtgcctgacgcatctcctaagcaatacgaccaataagtatgtgtctggctgccttccggctgccagtgtctgcctctttcctaggggcagtggttgcgggggtgctttctcacatgtcttagtaggctgtgcaggctggaagtgctcagaagtcacacccccagggagcagcctcagccaacagcaccttggctgtaaatgccccagctccctcgccctcaggtaagcattgctgaggcacacgttccatactcttttccacagttcctccgtgggactgagcaccacccagccacccacaggagcagctaacctgataaccaccagcctcaccctccctgcctta

SEQ ID NO: 5920 - DNA, 2300 bp, Homo sapien
gtgttttctttgcaagggccttcctcctataagagaaggtatcttctctctctctctttttttttttttttttttaattgaggcagagtctcacactgtcacccaggctggagtgcaatggcccgatctcagctcactgcaaccgctgtctcccaggttcatgcgattctcctgcctcagcctcccgagtagctgggattacaggcgcacgccaccacatttggctatttttgtatttttagtagagagggggttggtttccgtatattggcctgcctggtcttgaactcctgacctcgtgatctgcccgcctcggcctcacaaaatgttgggattacaggtgtgagccaccgcgcccagccagtgtcttctcttaattaaatcttaaaccctacatttcctagtgttcattgcagtagaatctgggcaatgtattttaccaaggactcttgtttttgagcttcttaaatggccggggaggtaattaaatgccatgggtctaatgacacacacactttccattccagcggctccaagttccttctctgataaatagtttagcaattatctctttggccaccacctgcctcccccgggaatggtctgccagggtgatctgtactcccctgccattttccagagtctctgtaaattaggaagaattcctgacgtctcgggtaacgtagctctttatgggagtggaacgtggctatctttcctcactttaaaatagaaattctggagactaagcaccatcaaggtggccatgatttaccaaaatgccagcttttcaaagttcttaagtgtacaaccttccagactgtagaccgaacaagggtaaaggagacaaaatgtattgtcatgattttgcacggctagtctctggcagagtcaagacctcacattcactcgagggctcaaatttagatattgacatctccaagtgaaactagagtcctaagtgtgtgagtcaggtcacttaccaactgtaaatgaacatttaaaatatgccacaatgcactcgtggcactgcttactttttatctgttttacatatcaggaatcaaaaagaaaaatagtctgatcctgacccaacctctaggaggcccaggttcagggtcccgccaccagcaggaggaggggtgaaaggtgactagaagagcggcgttagaactgcaggaatttcaaggtcgcctcctaggcctcagcggtggaggctagcacgaaggcggggctgcagcgctgcctgaaccaaaagtacgctgcgctgaggcggggcacggaacgggctggacttcggctggatggggcctagcggatggttgggccgcggcgggatggggcggggcttcgggcgggatggggcggggcttcgggcaggatggggcgtggccgcggcgggatgggtggggtctgggtgggatgaggcgggacttcgggagagatggggcggagccgtggcgaggcgctgcagcagaaaggaaatgcgctggcggggagaccggggttggtccctggcggggcagggggcgggctcaggccggaactccagagacgacctcagccaactgctcctgcgccgggcggggtcgtcgccgccagcggctccgagcgccggaagggccaggtctcagggctcctggagctgcaggcggcgggaggggctacaagtgggtccattttttagtatcttttttcctccttttcttggctcatccccaaaagcggaaagtttagggcagagcgacagtcagacccatccactatgccccaacacgtgcagggctgcgagggcgcccgttcctcccgggaccccaagcggtttctgctacgcctgtacagacgtatcttcccagagtgaaagttgatgtttagccgttccgaagttggtgctttgtgggaaggagaacagcgggagagccgtaaggaacgcaggcgtcctgacgtgaggaacgcctcttaacacgccccgtggcatggagtttgacagggccctggatccctgcgttcacccctcctggagtcctggacgcccacctgggagcagcgtcagggccgtgccactttgacccacgttaaacgcattgcatcctcatttctgtgtcccatctagatgcttgactcagtgatgcagaacctttcagagttagctggaagccacagccctgcctcttgatgcagcctggatccagccggtgtgaagaggagaccccttccctcttgtggggtttggatcctgtgtttctagcctttgcaaaactctacatcagggatatcctggacatgaaggagtcccgcca

SEQ ID NO: 5921 - DNA, 2300 bp, Homo sapien
gaattccagaggagccctgcagtgttgaggattttaggagtcccttcatacacgtccaggcggtggcttggggaacctgaaatctgtgttgatggagactaaagggaagaggatcctcccaaattcctctaaatgcttctgcagtctggaaattcttttctacatttcaccttaggtttcagttacaacctactccttcaggtttggggctcagatcaaaaggaacacccttagactccaaggagtcctcccttcattgtaaaagatgacattgggacattctgctctgcttataccacctgggtgtggtccttcccaaggctggcagtaagcatggagtccaggagggctcttttatccaacactctacccttgagcgccatgagcattattcctgaaatcatctcaggctctgacacttagtagtgatttcctcctttgggtttcaccctggagcagatgtgtacagtcaggaaaatgtcactcaacctgtctctccccatctgacaggtcagcaggaagcacctgtcctactgggtgtgttttctttgcaagggccttcctcctataagagaaggtatcttctctctctctctttttttttttttttttttaattgaggcagagtctcacactgtcacccaggctggagtgcaatggcccgatctcagctcactgcaaccgctgtctcccaggttcatgcgattctcctgcctcagcctcccgagtagctgggattacaggcgcacgccaccacatttggctatttttgtatttttagtagagagggggttggtttccgtatattggcctgcctggtcttgaactcctgacctcgtgatctgcccgcctcggcctcacaaaatgttgggattacaggtgtgagccaccgcgcccagccagtgtcttctcttaattaaatcttaaaccctacatttcctagtgttcattgcagtagaatctgggcaatgtattttaccaaggactcttgtttttgagcttcttaaatggccggggaggtaattaaatgccatgggtctaatgacacacacactttccattccagcggctccaagttccttctctgataaatagtttagcaattatctctttggccaccacctgcctcccccgggaatggtctgccagggtgatctgtactcccctgccattttccagagtctctgtaaattaggaagaattcctgacgtctcgggtaacgtagctctttatgggagtggaacgtggctatctttcctcactttaaaatagaaattctggagactaagcaccatcaaggtggccatgatttaccaaaatgccagcttttcaaagttcttaagtgtacaaccttccagactgtagaccgaacaagggtaaaggagacaaaatgtattgtcatgattttgcacggctagtctctggcagagtcaagacctcacattcactcgagggctcaaatttagatattgacatctccaagtgaaactagagtcctaagtgtgtgagtcaggtcacttaccaactgtaaatgaacatttaaaatatgccacaatgcactcgtggcactgcttactttttatctgttttacatatcaggaatcaaaaagaaaaatagtctgatcctgacccaacctctaggaggcccaggttcagggtcccgccaccagcaggaggaggggtgaaaggtgactagaagagcggcgttagaactgcaggaatttcaaggtcgcctcctaggcctcagcggtggaggctagcacgaaggcggggctgcagcgctgcctgaaccaaaagtacgctgcgctgaggcggggcacggaacgggctggacttcggctggatggggcctagcggatggttgggccgcggcgggatggggcggggcttcgggcgggatggggcggggcttcgggcaggatggggcgtggccgcggcgggatgggtggggtctgggtgggatgaggcgggacttcgggagagatggggcggagccgtggcgaggcgctgcagcagaaaggaaatgcgctggcggggagaccggggttggtccctggcggggcagggggcgggctcaggccggaactccagagacgacctcagccaactgctcctgcgccgggcggggtcgtcgccgccagcggctccgagcgccggaagggccaggtctcagggctcctggagctgcaggcggcgggaggggctacaagtgggtccattttttagtatcttttttcctccttttcttggctcatccccaaaagcggaaagtttagggcagagcgacagtcagacccatc

SEQ ID NO: 5922 - DNA, 2300 bp, Homo sapien
aatcaaatatgtggaaaaagatttgtgtacaaagatatttatccgtattttattaaaaacagaggaattataatctaaatatctcataatggaagagaacaattattaattgtattgaaatatgcgaagtgcaggatgcaaacctttttatgtaatacaacctcaaccatgttgaaaaaagttaatgcacaaccaaaaaaatcctgttttgaaatataagttcttatcaatggttgtgtctggatagtagaattatagtacttttaatttaattttattttttaagcatttcattttctccataaatgataataattacaaataattatagtattgttttcacaggtctatacatttgtcaaaacatataaaagtgcacacttgcagcaaaccaccatggcacgtgtatacctatgtaacaaacctgcacgttctgcatgtgtatcccagaacttaaagtataattttaaaaaaaagcaaacaagtactagcaaaaaaaccaaatgcacactttaaatatgtacagtttattgtatatcaatatattgcaataacacttaaaaaaatagaaggatctcaaggaattgaatcatcttaagcgtcttactggaaggggggttttgctatgccattttggggctgaagggcaaaatgactgggggggcagacattatataaatagcaatatatacatacattgtctctgctccagataccgccattcattcattcattcaccagatctgccttcctattatatgccaggaatgttgccgggtacttggatatcttgatgaacaacaaaccactggcctgaaagagctcccgtctggtggaggaggggaaggtaggtcaccacctgacggattccagccaacgtccacactgccccaccagggagtgctgcccaagggggctggaggcagatcaggaagtgggggccttagctgaggtggagtcaccaagagtgacaccaggtttacagttgtggaggtggccagaagttagttttaccctcaagggagtgtcgcagtcatcagttgagaagtgggggcccggcgcggtggctcacgccagtactttgggaggccgaggcgggcggatcacgaggtcaggagatcgagaccatcctggctaacacggtgaaaccccgtctctactaaaaatacaaaaaaattagcggggcgtggtggcgggcgcctgtagtcccagctactcgggaggctgaggcaggagaatagcgtgaagccgggaggcggagcttgcggtgagcctagttcgcgccactgcactccagcctgggcgacagatcgagactccgtctcaaaaaaaaaaaaaaaaaaaaaaaaagaaagaaagaaaaaaaagagaagtggtcttaaacagtttttatgtatctgtgtctatcttgcctgcacacttaaaacaacaagagtaagaactaagattgagcgtttacgggtgcaggggccgcgcaaagggcttccatctattgtctcattcacaaccttctggtagggactattaggatcttcattttacggcgaggaaaccgaggctcggagaggtcacctgcccaaggtcacagatctctctctccaaagctcaagctcacaaccaccacacaaactcccctctcactgtacctggggcccgtctgagagcgaaaaagtccgctttcaggtcccaaccctaacaggtccggctttcactccacagtttttcccagatccagaatggagacaacatccgctagcacaatcaacagggtcgtcccacgggggccgctccatcaaggccgtggactgacaggatttggggcttggagggcaaatgagaaacaatcgtcagggaccgaagaacaaatgcgtccatcacaccagccccccgcaccccgagccccgtgctccgctcacgcgaaccctcgggggcagccagtctgagggacgtagcgcgcgtgcgcggggccagaggggacgcccccacgcgagcgcgcggtgagcagggcgcgtgaccgggcgggcgcgcagccgggaaagcgcgcgggcgcgctacggagtcggcgtcggcgcgcgctccaggccgaggctgtgtgggctggggagggagacaggcggcggcggcggcgccccagacccgaggggacgcgcgggccttgcgccgcgggagcggacggcggcggaggagaccctaggctcgcggcccgaggcgggagggctcggcttctcgactgcccgcctccgaggccgccggccgcttctctctcccagagtggccgccgcccctggagactcgccgtg

SEQ ID NO: 5923 - DNA, 2300 bp, Homo sapien
ttattgtatatcaatatattgcaataacacttaaaaaaatagaaggatctcaaggaattgaatcatcttaagcgtcttactggaaggggggttttgctatgccattttggggctgaagggcaaaatgactgggggggcagacattatataaatagcaatatatacatacattgtctctgctccagataccgccattcattcattcattcaccagatctgccttcctattatatgccaggaatgttgccgggtacttggatatcttgatgaacaacaaaccactggcctgaaagagctcccgtctggtggaggaggggaaggtaggtcaccacctgacggattccagccaacgtccacactgccccaccagggagtgctgcccaagggggctggaggcagatcaggaagtgggggccttagctgaggtggagtcaccaagagtgacaccaggtttacagttgtggaggtggccagaagttagttttaccctcaagggagtgtcgcagtcatcagttgagaagtgggggcccggcgcggtggctcacgccagtactttgggaggccgaggcgggcggatcacgaggtcaggagatcgagaccatcctggctaacacggtgaaaccccgtctctactaaaaatacaaaaaaattagcggggcgtggtggcgggcgcctgtagtcccagctactcgggaggctgaggcaggagaatagcgtgaagccgggaggcggagcttgcggtgagcctagttcgcgccactgcactccagcctgggcgacagatcgagactccgtctcaaaaaaaaaaaaaaaaaaaaaaaaagaaagaaagaaaaaaaagagaagtggtcttaaacagtttttatgtatctgtgtctatcttgcctgcacacttaaaacaacaagagtaagaactaagattgagcgtttacgggtgcaggggccgcgcaaagggcttccatctattgtctcattcacaaccttctggtagggactattaggatcttcattttacggcgaggaaaccgaggctcggagaggtcacctgcccaaggtcacagatctctctctccaaagctcaagctcacaaccaccacacaaactcccctctcactgtacctggggcccgtctgagagcgaaaaagtccgctttcaggtcccaaccctaacaggtccggctttcactccacagtttttcccagatccagaatggagacaacatccgctagcacaatcaacagggtcgtcccacgggggccgctccatcaaggccgtggactgacaggatttggggcttggagggcaaatgagaaacaatcgtcagggaccgaagaacaaatgcgtccatcacaccagccccccgcaccccgagccccgtgctccgctcacgcgaaccctcgggggcagccagtctgagggacgtagcgcgcgtgcgcggggccagaggggacgcccccacgcgagcgcgcggtgagcagggcgcgtgaccgggcgggcgcgcagccgggaaagcgcgcgggcgcgctacggagtcggcgtcggcgcgcgctccaggccgaggctgtgtgggctggggagggagacaggcggcggcggcggcgccccagacccgaggggacgcgcgggccttgcgccgcgggagcggacggcggcggaggagaccctaggctcgcggcccgaggcgggagggctcggcttctcgactgcccgcctccgaggccgccggccgcttctctctcccagagtggccgccgcccctggagactcgccgtgacacgggcctaagccgccgccgcgggagtcctgaccgctcggacccgtcggatcaggccgggtgggagcgagcttgcgggcaggtgccgctcccggagggtgggccggaggcgaggcgcccaccgcgcggctcgcgggccgggctcggcggaggggccgctcgcgcagcacccccaccgcgggccggagcccgggtcgccgccccgccttctcccgggaccgcccggccggagctgcgggggccgagggacgccgcgcccgccgccgccagccgggctcgcgcgggagagcagggaagagaaactttgccttttattgtttttagtccttaagtgcaaggaactctgtgttgggaggaaaaatgtccttcttcaatttccgtaagatcttcaagttggggagcgagaagaagaagaagcagtacgaacacgtgaagagggacctgaaccccgaagacttttgggagattataggagaactgggcgacggagcctttgggaaagtgtacaaggtaagagggggaaaac

SEQ ID NO: 5924 - DNA, 2300 bp, Homo sapien
ctttataatagttatcatattcttgcagttgctcttataatatatatatatatataatctgcaattatatattgtacgtaactgttataggctgaataatgtccctccaaaattcatatgtgaagccctagccattagtacctcagtgaatttatttgaagatagggtctttaaagaagtagttaaatttaagtaaaaaaggagcccatcagggtggactctaattcaatctgactgtgtcctttaagaagaggagatgaggacacacagagagagacatcagggatgtgcatgcacagagaaaggccatgtgaggatactgcaagaaggcggccatctgcaagccaaggagaggggggtctcaggagaaatcaaacctcctgacacattgatcttgaacttctggcccacagaactgtgaaaaaataaatttgtgttgtttaagccacccagtccgtcgtattttgttatgggaaccctcaccgactaatacattatgtaaggcctgtcttcctccattagactgtgaactccataagcagagggactatgttcatatttcaccaccaaactcttagcacatagtttaatgtctggctccaagcaggagccaatatatttttgtttaattcttgaattcatgaataaagaaataaatgatgcaggggcatgtctattttatgctgaaagctctgtgtgttctgggttcttcagtgttcttctactatgaaactgacggaagacatattgagtatttatttggggaaggcaagaacatcctacaaagcaagtgtcaaattctgcataattgaaagggttctgaaatgcacgactccagtgtggaatatgggcagcttaggagcaagagccccacagctgttgttgtggtctgctacccttccatgggatgcagtgcccacaatagcaaggtgcagttgcacatcggtgctatgctgtaagggccccactgctcccctccagtatcttaggataatgcctcagaactgggaatcccagtgtgatgctgggtcccaggaatgtgctatggcctcaaaggactgcctgagtgagttccaggttcagacttcccattttaccaacaccaagtgtctcaagctagtctttaggccccctgggaagccagatgctatccaggtattcataagaattatcctgattgatgcaagttgaccctctagggaaatctaaaggtccccaggatgtacttggagttgcaggacatctgggagcccacacatgtctttaggtgtatggagactatgcggtcacctgatttgaaggacaagaaggtccttatcccttcccaacagcacctctctccattattaggtggctaaatgcctaaaattccatcactaacatgtcactcttttaggtcagcatcactatatctggttgcctcttttgtaaaacgaacccctaccccaccaattgctcagtacattcagtcattagcatattatgaattagttcaccaactattttctccagatgggcttgacctggcttgagtcacaagaggggaaagaggacaaagacatctataggggaaacaagacaaaggacacaggacacaggaacagaggacgaagacatctataggggaaacagatcttgaatataaatcctgccaacttcagtttttctagggctcaggcagtatgaccacaggccatccatgtgcctagaccatgctcatccatgagcccatccacgtgcctagactcatgaatcatgcagtgggattccagtacccatggcactgaggaagggtactgccacaaagttgtggcagttctccagctgtagaaggtaggcaataaaaaagcatttcctttatgctggtcctttgtttccttttccccatgggccttataaatagttaatctacctaagctggaaggagaagctttctgcctccagtaaagtttgattcctggaggcagattttttttttaaatccagcaagtgtcagataattggaagggtggagtaacgctgtaaaccatgacacacctttgtcaggacatgtttggaagcaaagagttgaaagaaacaaggtggagagaaagaaaagtgaacatttttgaaagatcactcagctttaacacaccttggctgggtctggataaaaaaaaagtgagcactgcaaatttctagaagaaaacatcaggagaagaaagagagagggggatttattcaaagttgtttccaattccttcaaaacctcaaaccaggtaagtaaacaggaagactgacctttctccttttctctgaga

SEQ ID NO: 5925 - DNA, 2300 bp, Homo sapien
ttgtgatcagcccgcctcggcctcccaaagtgctgggattacaggcgtgagccactgcacccggcctatgtattcgtttcttttaaaaaaaaacctatggatactagttatgtctacatgacacaaaaatttttgtcaatacagaaaagtctatggtaatataatttaagttagcttgagactattgttaagattaaaaaataatactaaagctgagaatttaaaaattaaaatgaacattttaattatggctaaaaagtacgtgtgtttgtgcttttttgtataggtagagagagagactgagagactatttactattcttttcttgccattagacaagaataagaataaaaaaaatttttttgtaaaacctcataaagattttaggtctatatcatcatcccaccaacaataattacagacaagaacgaagcattttaccactccctgatgagtaacaaagtagccaacagtagccttgggtattgaagaaattttaaaacacaaggaaagcctgacttaagttgatattaattactattattattggagtctactgcttaaattgttctctatggcagggtaaggagtctttgcttcctggctcactgggccagtattttttcctgcctgaaaagtttcatacgaaacatacaatgtcctgtgtcagaaacaccaaagtcttcacaggctaatagatttgaagtcacttaagacattgaaatgtacgctatgctttatctaaaggtacaattaaaagtatgggggctatattccagatctctgacatgaagccgagaggaaactggatttccagtttgttatgtgaaaaggttaagtaaaatacaaacttctgtacagggagataattcagttctaataatgcatgaaagccagagatgtagatcaacaaatgcacatttctgaaatacgggtttttctgagtatatgttctgaagttctttgaaaatctggccaaacaatcccattttaagataccagttcacataataagcaagtcagaacatttgcaaggcaaaatgttgttttcctttctgcagccaggaaaaacacagctctaagcttaggttgtaacggtaaaaggatttgggagctgctgattttagagactcataaaaacaactcgcccttatgccgggaggtataaagaatatgcagagtctgcactgtgcttctagtgtcaggacaaatcattctgctttttctttgagattaactgatgccaatggatgagtaaagggagaaataaatgtacagactgagacctgcagcttggtgaggtgagtaacacctttatcacaaaatcatgagttctctcttcccctttgtaaattccttggggttaacttatgtaattttaaaaaattttaggagtgaaatatgtattattaatcatatgtgaggctctacattttctgctatttatggtttatattgtgtgggatcttacagatcacagcatctttttaaaatatatgtgcttttttggggggtgggagataaatcaaggggtgaaactgaaggtgatacattcccttaaatccattagggaatggtgaatacacttgcatatataaaataactactgagtgcttcctagatacctagctctgttccagctgcctctcaccagttctcatttaattctccaatcccatattaagaggtgaagaaactgaggcacagaatcacctcattaagaagcacataaagtatggtgccaggatttgaacctagacaatttgactgtaacgtgtacgcccctaatcattcccttaggtagtcctcaggttctgtaattattatacctgactgcttaagactcaggtaactcccttttggccacttctaagccactactgtcagatgttattaatagtaaagagacgatatcaatgtttaaaatggccattcaataagaggactgaaaacactggcccctggaaattcccaacttccacgtgactcagaagttactcaactctttcactaaacccagtgctccacccaatgtagctaactttgtcgtcgcgtagcaacagaacctcgccatactggaagcggggcgcgggggggggattttctcgactgaggatgctgctgcccggtagccagcaagggccctgtcggtctcaaacgtgaattttggaccgacacaatctcatgtagtgattgttctgcttcctgtgttgcgccacaacaaatttccttgggctacattttccctcagatttgagtaaaagatttgaggtcacgctaaggagcctgcatactgaggt

SEQ ID NO: 5926 - DNA, 2300 bp, Homo sapien
tctgagtatatgttctgaagttctttgaaaatctggccaaacaatcccattttaagataccagttcacataataagcaagtcagaacatttgcaaggcaaaatgttgttttcctttctgcagccaggaaaaacacagctctaagcttaggttgtaacggtaaaaggatttgggagctgctgattttagagactcataaaaacaactcgcccttatgccgggaggtataaagaatatgcagagtctgcactgtgcttctagtgtcaggacaaatcattctgctttttctttgagattaactgatgccaatggatgagtaaagggagaaataaatgtacagactgagacctgcagcttggtgaggtgagtaacacctttatcacaaaatcatgagttctctcttcccctttgtaaattccttggggttaacttatgtaattttaaaaaattttaggagtgaaatatgtattattaatcatatgtgaggctctacattttctgctatttatggtttatattgtgtgggatcttacagatcacagcatctttttaaaatatatgtgcttttttggggggtgggagataaatcaaggggtgaaactgaaggtgatacattcccttaaatccattagggaatggtgaatacacttgcatatataaaataactactgagtgcttcctagatacctagctctgttccagctgcctctcaccagttctcatttaattctccaatcccatattaagaggtgaagaaactgaggcacagaatcacctcattaagaagcacataaagtatggtgccaggatttgaacctagacaatttgactgtaacgtgtacgcccctaatcattcccttaggtagtcctcaggttctgtaattattatacctgactgcttaagactcaggtaactcccttttggccacttctaagccactactgtcagatgttattaatagtaaagagacgatatcaatgtttaaaatggccattcaataagaggactgaaaacactggcccctggaaattcccaacttccacgtgactcagaagttactcaactctttcactaaacccagtgctccacccaatgtagctaactttgtcgtcgcgtagcaacagaacctcgccatactggaagcggggcgcgggggggggattttctcgactgaggatgctgctgcccggtagccagcaagggccctgtcggtctcaaacgtgaattttggaccgacacaatctcatgtagtgattgttctgcttcctgtgttgcgccacaacaaatttccttgggctacattttccctcagatttgagtaaaagatttgaggtcacgctaaggagcctgcatactgaggtacagaaacggttttttgtttacaacaacaacaaaaaacctcgcgacgggaccgccgagtttgcggcagccaaaaaagctagcgatgagctcagctaaagtgccgggactctcggatagatttctaacatgtttgaaatgtggaccccaacgctggaacccaacgctgttcttttgtggtctctggaaccaccacgctggaataggctggaacccaaccaacgctgttcttttgtggtctctgcctctggggagtccacaagctgtaaatctaacatgcagccagccgtgcggcttctggccgccccacgtctgagtaaagccttcactgtgactagcagggagaggagactgactggagccagagaatggaggcggcgggctggcgggggtggggagaggcactttcaggcgcacttcacagacgcacaaaaacaaggaagcctgaagggaaggcggttgaaaataaggcaacagaagccgcgaacggaagcgcgcccccctcaggattggtttaacattccgaagctcagcctcgcccgccccgaagacctgctgcggatcgcggccgcgcgcgcgcgcactcacgctgctctcgggcgctgggcggggagagccgcgcgcaccggttaattctgccaatcatgcgtctgggcctcccatcgtgtgggccaagccccgccccaaccacccgctggcggaggcgcgcgcgcagtcccaccgctctgagtcgctgagtgaagcggcgcctcgcgcgtcaggcaatctggccaattgcgcatcttttccgcctaccgcacggccccgcccctgccacaggatcgatttacggccgcaggtgcgcgcgcttttttgctctcgctgggaatggcggagggaggtaccctgctgaggggaaggggggatccctgacacctgggcttccccgggagtcggctgtg

SEQ ID NO: 5927 - DNA, 2300 bp, Homo sapien
tttctgcagccaggaaaaacacagctctaagcttaggttgtaacggtaaaaggatttgggagctgctgattttagagactcataaaaacaactcgcccttatgccgggaggtataaagaatatgcagagtctgcactgtgcttctagtgtcaggacaaatcattctgctttttctttgagattaactgatgccaatggatgagtaaagggagaaataaatgtacagactgagacctgcagcttggtgaggtgagtaacacctttatcacaaaatcatgagttctctcttcccctttgtaaattccttggggttaacttatgtaattttaaaaaattttaggagtgaaatatgtattattaatcatatgtgaggctctacattttctgctatttatggtttatattgtgtgggatcttacagatcacagcatctttttaaaatatatgtgcttttttggggggtgggagataaatcaaggggtgaaactgaaggtgatacattcccttaaatccattagggaatggtgaatacacttgcatatataaaataactactgagtgcttcctagatacctagctctgttccagctgcctctcaccagttctcatttaattctccaatcccatattaagaggtgaagaaactgaggcacagaatcacctcattaagaagcacataaagtatggtgccaggatttgaacctagacaatttgactgtaacgtgtacgcccctaatcattcccttaggtagtcctcaggttctgtaattattatacctgactgcttaagactcaggtaactcccttttggccacttctaagccactactgtcagatgttattaatagtaaagagacgatatcaatgtttaaaatggccattcaataagaggactgaaaacactggcccctggaaattcccaacttccacgtgactcagaagttactcaactctttcactaaacccagtgctccacccaatgtagctaactttgtcgtcgcgtagcaacagaacctcgccatactggaagcggggcgcgggggggggattttctcgactgaggatgctgctgcccggtagccagcaagggccctgtcggtctcaaacgtgaattttggaccgacacaatctcatgtagtgattgttctgcttcctgtgttgcgccacaacaaatttccttgggctacattttccctcagatttgagtaaaagatttgaggtcacgctaaggagcctgcatactgaggtacagaaacggttttttgtttacaacaacaacaaaaaacctcgcgacgggaccgccgagtttgcggcagccaaaaaagctagcgatgagctcagctaaagtgccgggactctcggatagatttctaacatgtttgaaatgtggaccccaacgctggaacccaacgctgttcttttgtggtctctggaaccaccacgctggaataggctggaacccaaccaacgctgttcttttgtggtctctgcctctggggagtccacaagctgtaaatctaacatgcagccagccgtgcggcttctggccgccccacgtctgagtaaagccttcactgtgactagcagggagaggagactgactggagccagagaatggaggcggcgggctggcgggggtggggagaggcactttcaggcgcacttcacagacgcacaaaaacaaggaagcctgaagggaaggcggttgaaaataaggcaacagaagccgcgaacggaagcgcgcccccctcaggattggtttaacattccgaagctcagcctcgcccgccccgaagacctgctgcggatcgcggccgcgcgcgcgcgcactcacgctgctctcgggcgctgggcggggagagccgcgcgcaccggttaattctgccaatcatgcgtctgggcctcccatcgtgtgggccaagccccgccccaaccacccgctggcggaggcgcgcgcgcagtcccaccgctctgagtcgctgagtgaagcggcgcctcgcgcgtcaggcaatctggccaattgcgcatcttttccgcctaccgcacggccccgcccctgccacaggatcgatttacggccgcaggtgcgcgcgcttttttgctctcgctgggaatggcggagggaggtaccctgctgaggggaaggggggatccctgacacctgggcttccccgggagtcggctgtggagtcgagttgagctccctttccgggtctggggaactcaacctcaccttatgcctggggtctccggggaactagtgggctttctgcaacggggggaaggaggggacgactccc

SEQ ID NO: 5928 - DNA, 2300 bp, Homo sapien
caggtaactcccttttggccacttctaagccactactgtcagatgttattaatagtaaagagacgatatcaatgtttaaaatggccattcaataagaggactgaaaacactggcccctggaaattcccaacttccacgtgactcagaagttactcaactctttcactaaacccagtgctccacccaatgtagctaactttgtcgtcgcgtagcaacagaacctcgccatactggaagcggggcgcgggggggggattttctcgactgaggatgctgctgcccggtagccagcaagggccctgtcggtctcaaacgtgaattttggaccgacacaatctcatgtagtgattgttctgcttcctgtgttgcgccacaacaaatttccttgggctacattttccctcagatttgagtaaaagatttgaggtcacgctaaggagcctgcatactgaggtacagaaacggttttttgtttacaacaacaacaaaaaacctcgcgacgggaccgccgagtttgcggcagccaaaaaagctagcgatgagctcagctaaagtgccgggactctcggatagatttctaacatgtttgaaatgtggaccccaacgctggaacccaacgctgttcttttgtggtctctggaaccaccacgctggaataggctggaacccaaccaacgctgttcttttgtggtctctgcctctggggagtccacaagctgtaaatctaacatgcagccagccgtgcggcttctggccgccccacgtctgagtaaagccttcactgtgactagcagggagaggagactgactggagccagagaatggaggcggcgggctggcgggggtggggagaggcactttcaggcgcacttcacagacgcacaaaaacaaggaagcctgaagggaaggcggttgaaaataaggcaacagaagccgcgaacggaagcgcgcccccctcaggattggtttaacattccgaagctcagcctcgcccgccccgaagacctgctgcggatcgcggccgcgcgcgcgcgcactcacgctgctctcgggcgctgggcggggagagccgcgcgcaccggttaattctgccaatcatgcgtctgggcctcccatcgtgtgggccaagccccgccccaaccacccgctggcggaggcgcgcgcgcagtcccaccgctctgagtcgctgagtgaagcggcgcctcgcgcgtcaggcaatctggccaattgcgcatcttttccgcctaccgcacggccccgcccctgccacaggatcgatttacggccgcaggtgcgcgcgcttttttgctctcgctgggaatggcggagggaggtaccctgctgaggggaaggggggatccctgacacctgggcttccccgggagtcggctgtggagtcgagttgagctccctttccgggtctggggaactcaacctcaccttatgcctggggtctccggggaactagtgggctttctgcaacggggggaaggaggggacgactcccgcccctagtttacccctcaaaagttaatgcctttgtcggaggaagcaatttcagtccactctccttttcagtccctgttggccgcttaaactaaaaggctacagacgggcttaaatgcgtctccgctgtgtttcttatgcctcgggccggcagggtaacgggttctagtcacagcttgtagagttcaggatgggtgacattcaggtcctattgtttttgagtcaaggtttcggctatagcttcttgaattatgaagctgtcataataaagaattcctgattatctaaagctgttattcttccctacttccaaggcagaatttgaatatattttggtggatgaaacgaaaacaaggagagtcttgtgactatgagatactagctggttgatgtatcatgaaaaacttagtggtccctatgtgggaaggtaaatggaaaactgcaaaaagagcaagaatgaattacaaagtgaaattagaagaaatatctggcttacttgtggatgctttgtacaccaatacaatatattatttgataaaagtcgactatagagaggtgtggttaattcgattattttataatttttcttttttagagaaaaaccaagatttcactttcaagatggaaagtccgtcagactcagctgtggttttacctagcactcctcaggcctctgcgaatccatcatctccctatacaaatagttcccgaaaacaagtatgaaaatctttgttcttccagtggatccattatgtgtttctaagtattgtggcagtggtggtttaaattctacg

SEQ ID NO: 5929 - DNA, 2300 bp, Homo sapien
cacagagagtttgagtagtttgaccacagttacaaagctagtaagtgtcattgttggggctttggacccaaaccatcatgccttagagttcatcctcttaacctgtgcactctgctgtacttgtttaagcaagtcatttttcctaaaccagactttcactatgtgacctaaaactctggagcaaggtgacagcaaggacctcactctgctgctctctggagggccctgcttggggcagtcactttgtacctacttctccttgggctctagtccatcctacatttaggagagtgctcttgctgcaagccaaacttactatgtcccttctctgcctcaccccttgcagtggctgctcacttcacttgggataaagcccacgagcctcctcctaaatgcccaccccaccccctttcttgcccaacttctctcccacctggctccattctggtcacaatttcattcacacagtcccttgaatgccccaagctctcgacctcttaggacccccatccttcagaatttggcttagatggcacttctttgagcccccctccctcccctccttaatctatcaggttccctgttataatctttttagtggtggacacaagctttgagagttaatagagaagtaaagatctatttttccaactctctcattttagacctcatcttattccaaaacagaaaattgggtgcaaagtctgcagagtccctttaatccccttagtatcttccagcctcctcccagtatgtggaaggaaagtttagtttgaattttgtaagaataatagcaggaaatgacattttctctttcagattacagcccacaaacacattaagccgtggcacaaagccaaagaattgatcgtgaatcatgaaaaggagcactggcttctgatacaggcatgtagctttgcttaacacaggtcctaagaccctctttgctttagggatactgcttcctagtttggtttaataacccatcaacacatttgtcgtggtcagaggtcacttgaatctcagttggcctcctttccccttctctcctccaggcactacctaccttccccaatcccaaatgcagtcattctaatgttgggtgggaagctgcctctggagccacctggaatgtcaggtctctgtctcagtattcctctctgattctggctctttcccaggatgccagtacaagactccgagctctgatggacatgatgggaggagttctggaagtcaagaaggaagatattttgagaatggtgatatttctgttcatccttatagaaggtggaatggggtggaaagagctacttaagttttaccatttttgtcctatataaacctgggttttagaagttctacagcaacaactattatacaacctccgtagtaccttataaacctaccacattagggcctggcgtggtggcttatgcttgtaatcccagcacttgaggaggctaagtgaggaggccaggaattcaaggcaggaggctaggagttcaaggctacagtgagctgtgatcacaccactgcactccagcctgagagacagagcaagaccctgtctcagaaaaccaaaaacataccacgttagacagataataaatttgaaaatgcaggtttgccttccaatctgacaagacacaaacaaatcaataaaaataagtaactacagtggttttggtctctattgaaggcaggaatactgtttcatcagtaattatccagatataccaggaaacattttctttgatacctgacataggttttcctggggctcaggggtagttctcactataaagataccaacacacccctctgagtctatcacctaagagtccaggtatatcccaccctgctcaccttcacctaagtcacagaagaactgttgtaaaattttaaaatatcttttgcccaagatgtcaggtcgttttccttgccaatgtgaaggactgtatccttttaaagggctttttaaaaaaaactctgagcttttactgtactactgcatttaacgtttgagctgaaatatatgcttttcttcatatcttcaggtgattcctcaacctgctttcatggcaaaacctgatgctgtgtggactgaagaagaaagaaaacaattcaaagattatgagaaaaaagtaaaggagttaaatgaagaaagagataagtatagaaaggtcagaagagcaaataattaatataacctaccatatccagagtgctgtttaaatatcttttcaaatgttttctactttgtcgatatctttaatagcttaaggacagtgtttcag

SEQ ID NO: 5930 - DNA, 2300 bp, Homo sapien
caatgtttaatttatcgaaaaactgaataatacccctgtaactttagccagtatgttcacatacagaatctcttacaattaatttttataaaccttccacaacttatttaaacctttagtttttttttttacttaaagcaatcctttaacacttaaatgtaggcagagaaaaatccacattcccattacttcttataatctttcaccaaaaacacattttactttctttacacaccttgcatgtaaaactgtttctttagtagttttaattacatgttataatgttaactttttgcaacttttatttttggtgaaaaccttggtaagtaagagattttaattgtgtactaggtgtggagcctagcctaggacacaacaggcagaagtgcagataacagctgactctctagcatagctagagggcatagctaactccacatgtccacagggctcacccttacttaagcaggcaagttgtacagtaagagtcatagggcattgtatgaagcatttaggaggcctaacaatccgtgaattgtacaacatttcttgcataaaatcactttcataaatcctttcacaacttacacagaccatctgagaccatgtggatatctagcccaactccctggatcccaccagtctctaagttccaagaaggaagaaactttatttgtttttctattttttccaagtgactagcacatgcatgaatgcatgcgggatgctctgtaaatatttgtgaaagaaatggagagaagaaagcaagacaggaaggaaagacctaaagaaaggaagggaagggtagagaagggaagacgactgaagggaaaggaagaagggtaagggagggagtctaagggaaggtatgggagagaagaaggaatgacaagctgccgaccattcaatcaggttacttccagagctgtctgcttccctgaggaagcaagagggtacatttcaaagtgttatatggtacttaagggcttggagctctaaattagctagacctgcgtttaagtcccactcagggctgggcaaggtggctcacgcctgtaatcgcagcactctgggaggccaaggcgggcgaatcacttgaggtcaagaatttgaaaccagcctggtcatcatggtgaaaacccgtctctactaaaaatacaaaaaattagctgggcatggtagcacgtgcctgtaatctcagctacttgggaggctgaggcaggagaatcgcttgaacccaggagatggaggttgcagtgagccaagatcaagccactgccctccagcctgggcaacggagtgagaccctatctcaaaaataaataaataaataatataaataaataaagtcccactcaactttgtagccatggacaaattatgtgcttctcttttcctcacgttacttatctgtaaaatggggctgatgggagatgtgaagacgttgcaacaatgtttggcacagtcagcactctaaatgaaagtctgtttagaaatttattgatttttaaaaataattatttatttagagacaggtctcgctctgtcgcccaggctggagtgctgtggcgtcatcccagctcaccgcagccttgaactcctgggctcaagcgatcctcccacttcagtctcccaagtagctgggactacaggcgtgcaccaccatgcccggctgctttttaaatttttttgtagagatgcggcacgggcgcggcaggtttcgctatgtcttccaggctggtcttcaactcctagcctcaagcgatcctcccgctctgaccttcgaaagcgcggagattgtaggcatgagtcttacttgcaattattggcccggacctggggaaatttgttaaaatgcagattctgattgagtagatctggtgtgggagccaagtttctgcatttataacaagcttcccaggtagcaccaatgttgctggtaaacagaccacactttgaacagcaaggggcccgcccctcgcttggcttgccgctcacccattggccgagagcggcagaccttccaccaatctgctcggctcagaagggagcgggccaaagcgcagagccaatgggcgcggggcttacggtctccgggatacgggtgtacacagcagcggcgtcgcggcccgcagccccgcggcggcggaaaggtaaccgacccgccctggggtgctgcgtgcgctgcctgctcccgcctgaggaaaacactgcccatggcgcaaggccgggagcgcgacgaaggcccccactccgccggcggcgcgtccttgtccgtgaggtgcggtgttcacggcccc

SEQ ID NO: 5931 - DNA, 2300 bp, Homo sapien
cctcccataatagggctaatcaaaataaaaatagacatctaccccaatctcaccccaataaatggcacaggagttaccagctttcaaatctaggcaaacaaggaaatcattgaatagtctttttcctcatctgtatgatggccctggaacccctctttcctgacccctaagttaaaagagctgtttgagaggactctctggccagacctttattcccagacccaaaactaaattcactcatgccacctgcttgattctgagcctgtgcccttattgtaactgaaatgcaggttcagttgcttcccgctttcagagtccaattattaataagaagagcaaagtctggtataaagaaagtgattttttattccaaagctagcttagggggagcaaaacaggcttcctgccttaagggtaccactttgcttctggggcagaaagcaggggcttttaaagggggcagttggtatgaactgcatgctggggagggagcgagtgggtgggggttcgcatgactcactttggtgctttatctgctgggttgtgccatcatgggcagaagtcatttgtaaagtggccttgtctcaggcatacttttggatgtaaatggactgttatctctggaggcagtctcctggggggtgagagtcctgctctggagcttttaagtaaacacccagttagataagcttgccctgtagggagtgtcaggtgaagggaaggtaaaagatgataattgcatttctaaagagctaagtaggaagtggggaacagggagaaaggaggaaacagagaagatgggagaaataaataatgtaaaaaataactcatcctctatctcttagaaaaatgggagtactgttatattaccagggctccaaaacacaaatgtttaataagtgggagagttttgaaagcagcaccattattctgaggttgataatatccaggtttgtgctgtctcctatgggttaaaatgaaaaggatgtatcctacaggtgacggtagggacagaggccctcccagtagtcacgttaagctagtactgacagaaaaaggaaaagcctgtccaggtggctgggcaaccctgcagcgaggcatagatgagcttgtaaatcaaaggaaatgaccaaggtgagtctcaatccttttagaggtttattttgccaaggttgaggacacatctgagaaaaaggaacacaaaatcacaggaacatctgtgatctgtgctctttccaaagagggcttgaggacttcaatatttaaagggaaagagcaggcagtaggggaaagtggaaagtaaaaagggaaggtagataaaaggggagagtagttgcattctttggggcctttgatcagcattcactgaatgcgcatgttacattcgtgaaaggaggtcgtagaggaatagtcagttatgcattcgtctagtgcttggtgaatctgcatttttacaagattaaatatagggtagaggaagcggtcaaattgcatttttctccagcgagaggaaggatgactcctagacctgtctttgtcccatacttgggaagataagctgttagtttacattgccaagatgaaattcaactgatctgttttagagtaaagatcttgcgggccaacaaggaatttccttggggaggtgtgtggcctttgatctttgtagctatttagcaacaaaatgggaggcagtgttgcctgactcagtttccaagcttgactcttccctttggcatagtgagtttggagtcaagagatttttattttcccttcacaagctgaacaggagcctttggagagaacgctctggaccggtgagtgagccatgaggtcgggccacaggctctgaagtcgtgaagccttgggacggagcgggtggtgcttcgaggtcagtgtcacgggagggaggtcagggtcagggtcagacgtggagccccgtggagtgcggagtggtgaccccttcgttcgggggcggagggatgactgagcatttataacttttgtgtatctccccgtgggtgcagcccttggccagcgagatgctttgacacagccccttaagatgttttaagggctatcccataaagccgggaaggcacaacgggtggagctggcggccgccgggggcaggcacttttgagctaaggaggaagcgggggagggaaggagggcgggaaggacgcgccacctacttcctgaatcccctgcaaaccccagaggagctcggcctgcgctgcgccacgatgtccggggagtcagccaggagcttggggaagggtgaggcctgcccgccgcga

SEQ ID NO: 5932 - DNA, 2300 bp, Homo sapien
aggatgttgttgcgggattgtacgaccagtgttacctcccatttaccgtaagatttccacattattttccaaattctgttttgagtttggcagccaccttgccttactccggcttcttggacgatagagctattcagggttacttttggtcataatctgggtgtagaataattaacatagaacattcctgattgtattccctgttcttattttaataaattgtcagtttctctctttgggcaagttctcacattaactgaacaaattgcttcactctagtctcattccttttgtgtaaaaaagggacctctatagtgtctttcaaattgaatattctattacaggcatttttaaatatttttaatgaaatatttaagggaaaaaagtgaaactgtagagtaataattacatatgggagactctgtgatgtcatcctagttgacctagctcacacctttcattttttcctcttcccacaggtgtgtagaccacactccaaaactgaaactgtggatggcagccatgaaggaagatcccacagtctcagccctgcttactagtgagaaagactggcaaggtttcctagagctctacttacagaacagccctgaggcctgtgactatgggctctgaagggggcaggagtcagcaataaagctatgtctgatattttccttcactaatatgaataatagcatgcttttattttaccaaggttcaggttgcatgggatcatcttctctgactgatttgacatcaacagccaaacggtgggggtctccttaacgcccccctacagaaatgaaaatgcatttcctgtctcaggatgctgaaacgactctgagggttctatcatagtccatgctgaaaacccccaaattatcatctttagcaaaatctggacttgaatcttttttttttttttgagacggagtttcactcttgttgaccaggctggagtgcaatggcctgatctcagctcaccgcaacctccgcctcctgagttcaagcgattctcctgcctcagcctcctgagtagctgggattacaggcatgcgtcaccacgcctggctaatttttttgtattatcagtagagaaggggtttctccatgttggtcaggctggtctccaactcccgacctcaggtgatcggcgcgcctcggcctcccaaagtggcatgagccaccgtacccgtccacaatctaactttataactgctcacaggaaatacccactcagttaccctgttgtgtgatttcatgagatgctctcttgttgcttgtcttctggtttcttagttgagaagctttcaattcctccttctttcatttccatcatcaacttaatttcacattctctctattgttggccctgaagaccagacgcacattacccgaaagctgggtggctgggcagactcctatttggtctccctgtctctaaccccttcaaatccttcctatcaaatcccatgttgggcacataggtggtgtcccatttatgtaattaaatactgtgtaggctgcatcagtcaattctgcctacaaggttgatgagtaataggtaagagccccactgagaaatagaaatgccatcttccacacatttccatagcccactgggttgctcactattcaatttttattatcacatcaccaccacgagaaggtaggtcggagagcaatcatttcattctatagatgatgcaactaaggtcccgaggttaagtgaggccttaaggtgctggcagaaagatcacacccagcgcactgctcttaccattggaatcagggctgtcggtccgctccaattgtctggtttcctgaacttattttcaagttcgccattgagagaaacctccgaatgactaattcttaaatttaagggtgcataataatcacctatggctcaccgctgcatttccgattcagcaggctggggtgggtagcgaagtctgtatttcaaatgagcccctcaacccaggtgacgcaggcggtgtggggaccgcatccggagggcgacctggagccgactgacttcacaaaggcctcctgccgcaaaccttcagcggccaccaaagccccggctgccggcggcggaccacctctgctgccgcgcgcctaccggagccgcttggccctagtgctttccagcggatttcccctcaggtgcggagccgggtgccggggtcccacagccaaccactaccggttcctctttcgtcagccaccggcgccggcaggacccgcgaatcccgatctccaggagcctgtaaggaggccgcccattggctcagccg

SEQ ID NO: 5933 - DNA, 2300 bp, Homo sapien
gctatggatatatttttctcaactatcttgaaatctgctttttttatatgagggatgcatgtgtatgcccagaagtcatcttacctaccaggagctctaagatgacatggttgtgtttcttgcttctattttaccatccaatttgtccttcttgatcagaattagctccaaagtagtagaagttactctgttactttctctgtcttcttaaatgaaaagttgtcagcgtagcaagccgggaaccaatatgtcttctccaacaccagatttcttgctgacatatatgcattttattttcagagaacatttattcaaacatttttgccattccctgattcttataaaatgttaatactttccatattattatctaagcttatttcacatgaaatcattgaatgacagcaaaaaatgtagttgagtcactattctgaagatttgcaaagattcttattcactagcaaaaaatgttaacactattattaaccaagaagttctggatagactggaattccaaaggccaaacagtacccagttataagctacataattaggctctgtcattttaataaaagatatttagattcaagtattatttgttgagcagccattacgtgctatatcttttcctggacttaaaatcctttcctcctaacactattaccagttttaaaggtcaagacaacgagtcaagctttggacttttaaagttcttcaaccctactagctggtcactttgggcaaataatttcatttttctgaagctgttttctgttttgaaaagtagaaataatatgagttgcctgactgagcaattgtaggaatcaaggtaatctatggaaataatttagtcagtatgagtgagacacagaaaatatttttctttccttcatgatctgttaatcctacaaaatgcatttacaagcaattcccacatcagctcaattctggaaaatttaaggaattatttttttacctgctgaaattcaggatctcagcttatcagcatcagagccaaagccacgtctattatctcacgtaaacagaaaagctgtgcaagtcgcccctatatggctgggctgttggcaatgtatccttggcaactagtaagagtgttctcaaaaatttatgctggggaacgggggaagctcacaaattgttctttgcctccaggtatcttaattttattcattgccagtttttcagagcttgggtaaaatctcacaagtagggccaggactgggatgaggcaactgaggtgtctagggtgcaaaatgtgagttgtctagacaccaaagttgtctaggtgtctaggaggcactcactctctggggtatgtgagatttcaacaccaatgactttttctttcctagttgctgtatcatgagaatgtttggccttattattttttaaagctgtacttacttaccaaagagtggccagtttagtgatgcaagagattcagaatgggaaaaaaaaagtcagctttaccctagtcagttttgattaaactcctttgaaatccatgttggagtttaaatgcccattcttgagggattcttgatgtagaggaggcccctccaaagctttaagcacatgtccagagcaagggggagcttttctggtgttattttgtcttgttttgttttttgccagctcctactctcgggcttccaaatctggggcgatgtctccccaggttaaattaccctagctcctgctccagatcgcttccccgtgccccgccagagcccagtagttcaaaaattaaatttggggcaaggggtgcgcgccagagcgcagctgtttctggagcctgcggcagcggtggcgagccacagggcggcgaccgtgagctccgggagctgcgcaaaccacctggagaccatgtctggggatgcgaccaggaccctggggaaaggtgagtgctctccatggggtccgcgagctgggggcgccgcgtgacagaaaatgttggcttcggcggagctgcctggccttggcctgcagaccggcggggcaggaagggacttggagggctctcctgaagaaaagccacatgcagcactgccctctctgggacttgggagttggagctcccacagccatcttgggatctgggcaagtgagcgagctccttcctcaccgggctgactagcctctcctttccctgtccccctccatcgctgctctgcaggaagccagcccccagggccagtcccggaggggctgatccgcatctacagcatgaggttctgcccctattctcacaggacccgcctcgtcctcaaggccaaaga

SEQ ID NO: 5934 - DNA, 2300 bp, Homo sapien
cagactcaagcaatcctcctgcctcagcctcctaagtagctgggactacaggtatacatcgttatgcctggctaatttttaaaattatttttgtagaggaggggtcttgctatgttgcctaggctggtcttaaacttctaggctcaagtgatcctcctgcttcagcctccccaagtgctgggatcacaggtgtgagccaccgtatgtgtgagaataaacccttataatacgtgagaaagaatgttatgtgagagagtaaacccttacaacatgaatttacagtagttagacttcagcagccaaacacaacccctaacctttacagaccttgacctcattggcagaagctacagaagccatgcagagctactcagggagatggggtgactctgggaaaggaagcaattcatggcatgtcctccccaactcctcatcagattttccagaataattctagaccaggttagaggagggcaaacatgcaatcagatgatcagaagtctgacttatcaaaggcagaaagaataagcctgtgaaagctggtgttagagtgaccaggttagcgaccctgcctagcttcctccactgtagctgaccaggagagggacccctttttgtacctcttccaggttgctgaattcctgacgcagggctgccttcagattagtgcattctctcccacatctcaacgctaccaggcactccttggtcaaatgtgggacctaatcagaggacacaggttctcagtggagaagtctgtggaaacttccagttcctgttctgcctgaaaaggcagcgaagctttataactccagcctaacagggcaacacccacatcagaccccccagctccctgtgagaggcactaggttttctctgtggttccggttctcagtaggaatctacttcttatagtaccctgggaaagcagggtgctttaggagggtttctccagtgctccttacttgatcagctgcttccatgctatacattcttaggtgggacactcaacctctctaagcctcagtgttctcatctgaaaaatggatacgatagcagtacccacttcaaagggcagttggattaaatgagttagctcctacaaagtaactaggacagtgcctggcacatcataagtgttcgatatatgtcagctgttaatatcattgaggtttttaaaaattccttttcaaagacaccatcttaaaatttctccattcttttttctttcattatcaaagctgccaccatttatctattcttcacatttcctggacagcaggcactcttatgcttctaaagagcatcactggccaggcacagtggctcacgtctgtaatcctagcactttgggaggccgaggcaggcagatcacttgaggtcaggagttcaagaccagcctggccaatatggtgaaaccccatctctactaaaaatacaacaattagggggtgtggtggcatgcgcctgtaatcccagctactcaggaggctgaggcaggaaaattgcttaaacccaggtggcagaggttgcagtgagccgagatggtgccactgcactccagcctgggtgacagagcgagactccgtctcaaaaaaaaaataataaaaaagcatcaccttctatgcataatcttcgcactccattactttttacctgaagctggagaaatactccctttaaggatcaccagttttcagttctttcagtattcctgcttcaagttacacggtcattgccatgtcataaccatacctcctgagcctgccagttgaaatggagaagcgcctagcagttaagcctttaatatcagtggccatgctctaccctaattccatgctagctaatctcctgaggatcacatggtatcaaaacaaaacagtttcaccaatgatttggctttaaaatgggttgaggtttgggaaagacatgcaaagtaaaatacagtgtgagtgactttttaaattgaatataccttacaaaatagctccaataacatcttttggcgagctcgttcataagggtcatatggaaacagcttccttcctggataagcatcatccaggtactcacaagcaataacagattcatagatcagttgacattggctggtctccaggacaggaatgtggccaaaagggtgctttgtatagtaccattcaggcttgtttctcaggttaatgttgaccacttcatgtcttaaaaagcaaaaggaaaacaagacagaacaaaaatgagaggcatctgcaggcaggcactcttcttgaaagcagaagcaatcagtttaaaagttaaaattt

SEQ ID NO: 5935 - DNA, 2300 bp, Homo sapien
gtgagactaaggaggaaattcttttcacagagaagctcagagccgaaccaatccttggctgtagagaaggaggagctttcagagtttgctggttccaagcttttttctgttacttaaatttaaagctggaacagaaggtcaagaaacaggaaggaaaaccgtatcaagatatcaagtcatggtattctttttcattcttacagaaaagaattcacaagagacttgaggaagcttttttatttttattttgttctgtttatttatttattttaagatggggtctcaccctgttgcccaggttggtctcaaacttctgggctcaagtgatctgcccacttcggcctcccaaattgctgtgattacaggcatgagccactgcgcctggccaattttttttttttttttttttttgcgacaaggtctttctctagagtgcagtggcatgttcacagcttagtgcagccttgacctcccagcctcaagtgatccttccacctcagcctccttagtagctaggactacaggcatcactaggactacaggtgccaccaccacgtccagctaattttcgtattgtttgtagagacggggtttcaccgtgtttctcaggctggtctcaaactccttggctcaagcaatttaaggaagcttttcattagagtctaaaaatacatatttgaattgaatgacacagggttgacactagtcagagaattaggaaaatgtgatatgcgtgttagttccagtgcaaaccggagagcccgttaacctccctgggactgggtttcctcctctgcacagcaaggctcccctgtccttccccatgggagacaagaatcacatcaccagcatgttttcctctcccctttggctgccaggaaactcaagagtcaaattcaaggctttattgaaggaactctgcaggacccaggacgtgatatcttgatactgttttccttcctggtttttgaccttctgttccaacttgcgttttccctgattatagcattttattatttttcatatttagtatgtagtgcacatttttacactacacttctaatcctttgtgtaatgatcatggtagaaataaatggtgaaatgaggaggtcccacttagatgagtttcaggggtccttccagtcccaattttccaggattcttaaggggaaaaagtaattttacatgtctggaaggttccaggtttgcacagaagggaactctcctatcgagagtcctgaggacttcagcagacctccagggaggcctgtccaggatgttctcctacgtctgtaaaggagtgagcactttgtgctagtttagggaaagacagcttttctgttgggattttagacttaccctgcttgaaattggtggaaaaatacctgtctgggatggggctcaataatctgcagctgtattaggaaatgcaagtagttttgatgtgggtggtttcaagacatatttggaaaatgtgagggaaatgtgtatgtgcatttgctgagcgggggactggtgaaggatcaccgatccatttattcctaatgctcatctcagctttttattgtgccgagtaccttgataaggcttgggttattttatgagcgtttatatataaattgatagtgtccatcagatcatgtatatttagaggcatgctcctactttgagtaaatggaaagctttagagatatacactaaataaacatcagttactaattaaaaattccctcctcactttaccaaaggacccaccatgggttccattaaatgtctatttatggtttgttttgacaaagacttttccaagaacacctctgttctgtaaagcagaagagctgtgtagatgttccagagtcgcttggtgtaaatttggttctgatttgtgccgtgaagcccaataacaaactggaggcacacatttcaaagccagtggtaagagtttgagtagtgatcatctattcctgaacataaagtctggagccttctggaatccataaaaatggaatgatttgttcctttcccctctaaccaaattttattcatacctggctataaatagcttctgttttgagttttcactggtcagaccctgctgttttagtgccatcctgttagcttccttgaacaaggtaatgccacctaacatgttttttcagacttccaggacaatgatcagggggacttctctatgccacactgggaggtgtgaaggtgtaggctttagggcaacccctctgagaaggggtggcaggtggaggagcccattgatcctttctatcagggatggatttgctttc

SEQ ID NO: 5936 - DNA, 2300 bp, Homo sapien
cttctcatggataagagcattttccagggcttcttgaatctctattttcagaacaaccctaatgcctttgactttgggctgtgctgagtctcactgtccaccccttcgctgtccagaattccccagcttgttgggagtctacgtcacggcttgtcttgggaaccaatccgtctctctttcttttctttgaagttcccaataaaatgaaaacaggaaatgtattcttctgataatcatttgtctgactcctctagcctgtagctgctgctactgctgcttttttttcctttttttttttgaggcaagatcttgcttcgttactcaggctggagtgcagtgggacagtcggctcactgcagccttgaactcctgggctcagttgattctcccgcctcagcctcctgagaagctaggactacaggtatgtgtcaccacgcccagctaatttttaaaaaaatgttgttgagacagggtctcactatgttgctcaggctggtctccatctcctggccgcaagccatccacccaacttggtctccaaagtgttgagattacaggcatgagccacctggcctgcctagcctgtagcttctaactattttctagaaagtgcctggtgctaatgtcagagcacattttgggagcctgtgtgcctcctaactccttggccttcagcctagtttgatctccagattattggtgcagatgctgatgctgaggttcagggtcaacctatgactgatgcttgtcactacagaatggcaccctccaaagacctccctggtgaaagcttaagaagagggagaaggaagaagaaaacactccaaacctaaataccttccatttggcaaatgaatgtcgctgtccacgtgggcgagtatgagtgtaattctccaaactttggccatgggcctggagacaccgagggtcttgtgactggaaagaattccaaagcaggaaatgaaacaccggtttatcacccaggactaactacgtcagaatttcactggtgctgtcagggctcaggatgtctcacaaaatgttctatagccggcatcctgccttaaaaaaatacacacgccccaaacccagccacaagcaaaggtcattccgttggatttgcgtcacactctcttccaattcatctcaacaaatgcctctggttgcctgttgtgtaccaagcccaggggcacactggggataaagttgaaaaagacattggctctgtccctgggagcccccatctctccacttatcttggttgaggttttaaacctagcgctttggagctgcttgtctgttgtagggatgcttgtctctgatgtggcccctctgccagcttcgccaggcagtaccaccccactgaagacagcaaagagctgaggatggctggtgccaacaggtcccttgggctgggagcatctactgcctgcactatgggagggggaccaagtttgtccaatgctgtttcatctcagtgtctgaggatcagcctgtgatcatttcagctttgctcatgctggatcctttcccatcctcctagctgtgctgagacaccaggcagcaacaggagcgatgttttgccttgtctgtgctccctaaggagctgtctgccacctctgcctctgagacagcccaaatcagccctcctctctccccacgtctcagtctggccctgccatctgctggctctgggtatattttgacccatgtaaatagttaccaggtgttactctgtgccagctggacagaaacaagcctgcttggtgaggtggccagaacttccagaagaggcagcgcatgacaggggcagtctgccgcaccatctgctccggatgtggagccctgttgccatggcaccctagttaatgctgagtgaggtctgtgaatcaccgttttcctgggatctttgctccaagaagaggggaatcttctcctgtggcctctcataggacttaggagattgatcagccttttgccggtacaaatcctgcatgctagtgagtgcttgtcataagaccaaagttaccactgatgcaacaggaaatggcatgcctctggctcaccaaaatgaaggtgttctcttttggggctccgcacactaatttagaaagcttgaagaaccaggaattatagaatggagaaaagcactcatgggggaggtttgcagcctggtggcctatagcccagtttgggatttgagtgcctcttggccaggcatgctccctgctgtttaccagggtcctggtcacctgcacatccttacacttcctccatctcgcttctttgtcacttgtctg

SEQ ID NO: 5937 - DNA, 2300 bp, Homo sapien
ccctgcttcatgcccacatttcatctagattgtcacctacccttccctaaacagtccgggtgaggaaagtccataggtacatgtctaatgtttcacagataccaggtcactgagcagcacagctcgtggcttcatgggaagagtataggcttgaaagtcagataggtttggattcagatcctggctctatgatgttggtgagtggcctcacctctgtgcctcagttgccttatctgtaaaatggagataagtgcctgcctcagaggtttgatgtgagaatgatacatgtaaagctttattgtgcaatgcttaagcctcaataaatgggatgcagtggttgtaattcattaaaccctcccatggtgtgtcagggccctgaggcttgtccagttttttcctgaaagaagaattacttctctgctccttctcttactctgtaatcctctgtttatttctacaagaagcttgagcaagaagggaggtgtccacggcaaggcagctgagggtcagaaaacgtgtcagggttcattcctgggccattttctaaacgttggcagtgagtctgcctgcagttacatgaaggccagtccagaccaaacggggctgcaaccgtctctgtctccagggctacgtctggaagggattttgctggaagggattttccaaggcacttacactgttagcactttgtttttctgactgcagtgcccctcccaggaagaaagaatgtagaagttactttatccagagctttccacttcactccaggaatttcaaattcctgctcctgggagtaaaggcagtgaggttcttttcccaatcctaactccattcatgtattcagcaagcattcattatagcaactaccctcttccaaagctgggtactcagaacctaatggaagagctgtcagtgtcaatgatgccagattggagggagtaagggagggtgctgctgaccttcctaggtctccaaacttcctcctcttcctctgtgtcagcccctggggcctttagaagaagacaaggaggtggaggagacaacttagtcatactccccaggcttctggaggagctgcagggatgttgttcacccacttcttcccagaggactccttaacatgcaaccatgacgatttaacaaatcaaaaaggagacatgaccgcagcaccagtaccagtgccaacagcagtatcatttaccaagcactgccgagtgactgtgagatggtccacaaggccataaattggacactattgccatagcaagttgtagagccaagattcaaacccaggccttctgattccagagtttgactccttagcaatggttctctaagcctctgcaaactgttaagctcttcttagctgatgagctttgggctgtttctttctcggtgacagtaggagtggaaatgagcctgtgtgaacttgacactatcagtggctgcttgctgcccacctcagtctgactgacgcacatatgagtcatgggtccatgcattcagcaggcattatttggacacctactgggtgccagcacagcctcggtggagcacccgcatcacaccttattgctccgtccctgtgactagaaaatgatgtcatagtagggttgttttgtgcaatccgtagagagtgtgactctgagtagtcataggtacttctgggagcaattttgctaactgttcctagccttaccatgtgggccctctgctctccagagaggaggaggactggtttgctctgactaactggtgtgggagggctggcagaggcccggctctattgttcagcccagatccttgcagcagagcacaagcaaagacgctcttaattttttttacagctgggctggcctcccctttgtctttgtgtctgttactgttcccctttattgagatgaaaggggtttttagatctttgcagggagagtgtgtgtgtgcgtgcatgtgtgtatgtgtgtgtgtgtgtgtgtgtgtgcatgcgtgcaggaggcccacagcgcttctcttcctctcccctccccgctctccccagcccagctggggcccaggctttgtgtcaggtaccgcctaagccgcagggggactcgggtagaagaacagtctgggatttctttcactgtgtggggcctagaatctcaggaagccaggacgtgggtaagagaccagtggggtggggaggctgaggtggggaacaagcctttccgaggtcgtggacaaggccttggggggttcatcctcccccatctcctagaggcagagtgtctttctaagctgggctctctttgttcccatcc

SEQ ID NO: 5938 - DNA, 2300 bp, Homo sapien
caccattcacacagcagccctgataaacaaccactattgagggcttaacattcgccaggctttttttttttttccccaaaagtacttagcctgtattaactcatttaatcctcacagtagccgtatgagttaggtattgttaactccattttacagatgaggaaactgaggcacagggatgttaagtgttccagagcctggaaggtgagtcttaatcactgggcattcatagaccaagaagcaacttaagcttaaaaagctagtttaattgggaaccctcgtgggaaagggggaagaacagttgcctttttctttctctgtcaaaggaggaaatacccattctcagtccaggtggaggaaggaggggaaattcatctggcaggaggcagaggaggaaagaaaagaggcaagccgggccttgatggctgatggggagcctggcccaagaatcaagtgactttccttaatctctgggcggtgtgaggtggcagatccagtttggggcctggcatgagggtgatgagtaagtgcccccaggtgtggctcagagggaaacggcggtggctgcacgcagggtcctgacctaggcagagagcgagtggaaggaggtgagacaactgtcctgaccttccaaacccctaatccccatctgtggtctcttgcttccttgttgaagtcccattcacccacaaatgcccttctcaagttcgtccaagaacccttcctgaaactccatttcacagttccatatacatgatctcttagtttccacaccgtacagctgagcgcttaattagctggaaccgagcatttcactatgtactgtcgataggcactttaaacaaaataggcttctcatcagtgaggaagtcaagatgcctcctgggaggggccagctggtgcccagcagattgctcagagggtggtgtttacctggatcacgtcacctgtcccagggcatggctcttagctgtgcccgctcagaaacccaatttccataattttcagagtggtttggactcaagctactgattcaccctgagaaagctcccagaagagggtgtacgaatcagaatgctggtttattaatttgcaaggagacttcgcaaacatcacacagactgaatgtcgtctcttccctgcgtcctagacaagccatatgggaaaccaaagaccagaaggtggactgcgcttatcaaagctggagtcagaaccaggcaggagcagcatggggtgagggtgggggacagtgatgtccaatagtgcagggctttgtctacctctgcggccctctcaccagcagaaagatagctgccaggtagactggatactcaggtcagcctggctatgggcatctccttggccagtgcctcaagggcagtatttccctgagaaatcctggtagcatttctccctttcctctctcataatgtagtaattttttattttatttacctatttgtttagtgctttgcaagcattagctcccagagacatagatttgcatttgcgtaaattcgataactactgtacaatctcagagttgtagggccaggccatgagagtaagtgctatatgcaaatcaagaggatgatccggtaacctggatggatcaatagaaagccaagcatagagcaaagacacgtggtccccaatcagcatggaggctgggccaaggctggccagttgttgcatcccctgcgtaggccagggggtgaagcattcctaaagcagtgcctgcttcggctgcctcaggcagcctgccctgctcagctggcctctttagatttaaagggctctttctggtctctgtccaggcccttcatggctcatctttaatgagccacatctccaggtgcccagagccaaggcggtgtgactgcacgggctttgaagtggggcagacttgagttgagtcctggctccaccactcggtggttgggcgttctcagtagttgggcaggtgccttgattcttcaagtctcggtaacatcatcagtaaaatggggatgaccctcagggctgtggggagggttgacccagacgatgcacagaaggctctgagcaccgtgcctggcgcagactggaaacctggccagtgtgcgctcttcaggacagcagaggtcggttggaggtctgcattctctgccgacttgggccccaacttccccatcaggtcactgctccctcctctgaggtctggacaaaggacaaggctgtagggacctagactgtcctagacggggaggacatctatcctcagtggtctttccagcagtttgtttggagctgctcatcct

SEQ ID NO: 5939 - DNA, 2300 bp, Homo sapien
cagtgttctgtagaaacgacaggaggggtgtccaatccagacatgagggttccaggaagacttcctgaaggagtaactgcctgttctgagacaggaagactgagcatacaattagtcgggcaaaataacatgcatgtgcactggggtgacagtttggaggaggaggtggggtggctgtggcaggcagaaagtagagtacatatgaatatccaaggggagagaaaaagcatatcatgcaaacagcatatcaaagagcatatcacgttctgggaagcacaggttccaagaactgcaaggagttttgtgtgggacacagagtgagatatgaggctggtgagataagcagaggccagttcatgaacgacttacaagccaggtagaagggtggaccttagaacagacaggaaccaatcagaacacagaaggtgaaatcatcaggttaaaagcaaaacaaatataataaatattccttatataaatatacatggctggttagaaattgctgaaacaactttgcagacgggatgacaatcccagagggcattcaagcactaaccttggcattccagcacaacgctgaactcttagcccaaggatgacaaagctcagcccagcgctcttacttcacagaaatttcccccacctgctttgcggagggtgtgagtaacccaccggaccaacttctagacattttggaaatacagctctttcaagaccgtttccccagatcgcccccaccacctccaacacacatactggcccccaaaattctgccataacctcttacgtaaggaaagaatttgagcagcagtagaaacttgaaaacaaaagtaccctgggccaagggccagggagtctatttttagaacattttctcattgcctgtttatctttcagactcagccaaaaagtcttccaggcgagtgttaaaggaaaagacgaaaaaaaggtgatctaagaccaaatagcagtagcaatggtgatcattttggacactgtgttccaatttccccaatgtgccttcactggcatttggtgcccccaaagccgcttaatggagaattcattcaaaccctgctctgccttttgtactgatggtaggatttgggcaggtcaaagggaagacaatagaagttatggatttcataaactattaagctcgaccagaacgctgctgctgctcctccaggcctcagttctctcgtttctaacataggggtagtaacacttgatctaccgtcacaacagtaaccagaaactaccgcgcctgtcccgtacagtatccggtcactgttctcctttgtgcccggttaatcccggagaaaagcaaccatgcatttgattatcataaaagtcgggcgcggtggctcacgcctgtaatcccaggcgcttcggaaggccgagaagggagttcgagaccagcctgaccaacatggagaaacaccttctctactaaaaatacaaaattagccgggcgtggtggcacatgcctgtaatcccagctactcgggaggctgaggcaggagaatcgctcgaacccgggaggcggaggttgcggtgagccgagatagcgccaccattgcactccagcctgggcaacaagagcgaaactccttctcaaaaaaaaaaaaaaacggtagtaagctattttaatcctttcaagctgcaaaagagaaaaaggctggcgttttgtctagagttatattttcctccaagagactaaataggtggccccaggaattccgccacttgtaaaacgcgccgcagaaaactctccccgactggtaaggacttaaccccttccgctccgcggcttaggacgacttttaagggcgtcctccccgcgcccctgtccactcgctccagtttactccactggcctgattccgtctctcccagtcactctccagttctgccgtgccggggaagtttctgggggctcactgggaaggtcttcccggcggatcctgggcccaaccaccgaaacccacacggtcctccttaaggagcttccggggccgcgggtagaggcgggtgttttgttcttataaggaggaaaaagtttttgtgacatccaggaaatgagtaactctgaagttcagtagagccggccgctgcaggccagaaggtgggagccagcgggggcatcgccgcccgcgcccctctaagtgccgggccgcaagctccaccgcagccgcctgcaagcagcggcgcctcggccctcgacctgcgcgcaaagcctgtgctggagccgtcctcccgcggcggggaccgggaccggggacccaagccaatcgtaa

SEQ ID NO: 5940 - DNA, 2300 bp, Homo sapien
gagaactccagatggattagataactgaatgtaaaaaagtaaaactatgaagctaatggatagaaaaaaatgatgggagaatacctttatgaccgtggggttaaggaggtctaaataataccaaaaaactatataaaaaatatagggaaaaaaagagctaaagagccacagtatcaaagttaaggactattgttcccttaaagacataaaggcagagtttctagtcttctaaagcagattgatgtccaggcttctcaaagatatctgtaaatcaaaagaaaaagaaaaaagatcaatagaaaaatagacacagacactgaaaaggcagttcacagaagggaatctcaagtagcctatgaatgtataaagaaatggtcaaaaaattcactagtagttagagaagtgaaaatgaaagcaaaaaatgagcttacactactttcatcatattgacagaaattagaaaattagctaattagatgagtcaatatttgcaaagcacttagaatagtatctggtatttactaaacactttatgagtgtttaataaaaaagacctatcaccttctggaagggatggatggaagtgttggatggaaaccccacactggagtgcagcgtagggcagtaactctggtacacaatcttaaagtgcttggtaagtacccagggcttgtactaggctactgggcatcgttgtgctcttggaaaactgttcatctggccagatgagtttgaaaatatcacaccctctagatagttacagccttctaggttcatgacttggctggcgtacagagattttgtgagaataaaaagtgcacacctttctccagtagggcacatggcacgggaaagagagtagagacagtttttcagcctccattgccccatggctggatgtgtttgtgcaggacgcagctgcataagcaaatgtccctgtgcatccctataactttaacaatcttactccttggcatatatttcagaggaatttgcacagaggtccttaagggaccacggacaaagacgatcatggctgtattacttgatgtattggagaattagaggcggccttgttacctaacacctggggaatggaagtgaagtgtggtagatgccccttatgaaacgctgtgcagtactcagaagcaatgaactatatgcttgccaatcgcaacgaggacagatccttaaaaagaatgttgagtgaaaaaagtagaaaataagataatctccaaagtccagtagcattatttaaacatttttaaaaaatacactgataaaaattttgtacatttcccaaaaatacatatggaagcacagcagcatgaatgcctatggggttgaggataggggttgggagtagggatggggataaagggggaaaataaaaccagagaggagtcttacacatttcatgaaccaaggagtataattatttcaactatttgtacctgaagtccagaaagagtggaggcagaagggggagaagagggcgaagaaacgtttttgggagaggggtcccagaagagagattttcgcgatgtggcgctacatacgtttttccaggatgccttaagctctgcaccctatttttctcatcactaatattagattaaaccctttgaagacagcgtctgtggtttctctacttcagctttccctccgtgtcttgcacacagtagctgttttacaagggttgaactgactgaagtgagattattcctcgttgtctcggaaggcagagtgtagccgccagtccttccctcatccggaaccttctggtccacatttccttccaagcgttagtcctcggctctccatgcttggctccctagtgtcacacaccgtcctttctgggtggcctcttccaattcgccctcttctttctcctgggtgtctccatctgcccacaccgtgggactcctcccagcctctcaggggcaccgccccctcacttccttggctccgccccattgggatatatttgcatatttctctgaggaaccctgcccaggtgccagccgcagaagctcctcccctttcgaattcccgctagcgcccctagagggcgtgtccgttgccaggcgacgggccgacgcgccgagcgcgggtttccgctcggggcgggcgatagagacagcgcgtcgcgcctttagcttctttcccagactccggcccagctcctgcgatctccacagcagcctctgaggccgcccccagagagcatcaggatggctgaggtcaggagtcagcgcccctctgtcgcctttcccttgacccctccccattgtccctct

SEQ ID NO: 5941 - DNA, 2300 bp, Homo sapien
tgagatgaagaagagggagccccgccccacttccgaataaatccagtccattggccatttctagtagcaggaccagagatccagaaaaagaatgcacagcagccccagcaagtggagaacctagctcaccagtcccagtatcctccagagaaacagccctatatattctgcctaagatgtggccctttccatattctcttcgcctcaagagggaaattttttttttctttctattcatgtctcccttaaaaatgagattccattccttccatgcaagggctgggcccaaatcagcaagaattccagctacatgggccaggggagggtcctgggagtccaaccaggtcatttcctggaggagcctgaatcagacatgacccaagaagtcatacaaatccaaggtaaagaagggagccaaaaagagcccatgacagtgcaagacaagccacattgggcccagaccccaggtgggacactcagggcagaaccaggaaacaaggtgtgaggtctggctcagcttgtggcccccgaagcaggctctgagataaggtttgggggtcggtggttcctttgggaggtgatcctgcaaagcagcagtaggagatggggaactaagacaaggaaaggaaggaggcaaatacagggtgtatgataagaagttcaccatttgggacaactgagactccatcacactggggaactgtgggagaccacgtagaacatatttcagggttgtcccaccagaggagtcagggagctggggtagttactcctacctccttcccattaatagctgagggatgctccacatgtgataactccaggcatttcagcctgccccacctgctcaggcgaaactgggtccccctgcagccagaggaagcccacaggcaggcagtcttgggtgcttgcagaaaaacccctcgttggctgagcccaggaactgctgaggtcagaacagagcaaacagaaactgggagggaaagagtgtaagaaaacggttaaaatcctcaaggtgacaaaggggacagaaggactgtgagctcaccagtgtacctggccgatgaccacatgacacagaggaggtggggctggggtttccagggtcagggctgggctaaggaggaagcagctcccatgggcataccatgtccatgcccctcacggacctgctctgtgttcccttccctgtcctagggatgagctggacaaccaacctgggcgtcagactccaggaaatggcagggtccttagtcctcctgtcaccttctagcttctctctcttcccccattctgccctgcctgaaaccccatgcacttgctccctaggtgagggcagcgtgacatttctaagatgatatctcctctctctccagcccagacccacagcctgaccctgtgacaaaggccccagagccatcactctgcaaataactgtggctgggtgagaggtaccaaagccaacgtgatgatctgagacagacacctgtaatttcacattcagaaaaacccagaccttcaaacagaagtgctatttcaattttctcactcccattcttctttaacctcagactaagaggggaataaaccctctttgatttgtagactgaattctttaaagagacagcttattctttttcaaatttattttttccttttgcttggggcagacaccagggtcccaaaatgggaatttggtaccttggttagatggctcaaactgccaaaagttactatagggaatactgcactaccaatccatttttcctgctaatccaaaagtcaaataagtccatggagggcttttttttcctctagaatttcaggctccctgagggctaatttctcggaaagctgcattaaactaatagcaccataaaaggcccattgtgagatgtaattggtttgcaggacttcctataaaaataataaaaagactgccagaggcagtttccaaaggtcaattatctttgtgttgcttgagttgagtggaggtcagtcccagaattccactttataggcatattaatcaaaactgggcctgcccacccatctgaccccatcagctgtgagggaagtcacaggtcccacccttaagctggttgccaaatggtgttttgggctcttcttttcccaagaagagactagcccattgtcaccaatgcagagctggaagctgaaattgttaaggcagaatgaaagggagaaaagcacgtcctgagcaccaagaagaagataactcggtgagtcacgcaggccatggggcaggcagtgtgctcagagaccaggctagacagggc

SEQ ID NO: 5942 - DNA, 2300 bp, Homo sapien
gccgggcctcctccggcaggggcgctgggaactcgcggatggccggctctcgtccagcgcccgatcccgcgcccacctgggcctgcggcgctggaacttttcttaggaatacccgctactccctgtctttggaaacccacagatgccaggacccgcaccattctgggccggacgttgtcgctggcttggttctttggcccagcctcccccgctgctaattgccattttggcaccgggtggaaaggcaagttcaagagggcgggggctctcgggaatcgctggatgtcttcttccttggccagcttagattctcagtcgcctcttctgcctcctccatccctcttggctcttacctggcgccctttcgcctcctcttctatctccctcttccttttgcaccattctctcgccccttttctccttcatcttgtctttcctctctccccttttccctctattttctccttcattccttcctctcacctttctttcctctccgcgcattcccctccctctcgctccactttaaccatcttctagagaggaggaactctatctactcccgaaggggaggagcagggctggaggctgtctctctctccctaagcctcctccctcctgcctcctcctttcttaatagctcctcctctagctcctctagtctcagacttttcaacccctagaatcccaggggcttctcggaggcggcgagctacaccacatgtcctggggcctgtaaaccgcagctcgaggtcgtctgtgggtttagctcatttcccttcagcccacctgaagtctccttcttcctacggtcacgaaggatctcagctgcaccaagcgcgcaggctacactcctgcagtagcggattggggaccagataagcccacgcggctcccgcctgagtaccctcttaactggcggccgacactttgaaacaattgagtccgttcagaaacggactggggagagtgagggcacgacctcaaaatcctaggcagcaaaatgaggtctggatcctccctggaagaacagacatctcgactactctctcgccccacctctggccgggaggtcggggcaaggagaatccctcaaccgagaagatctggcaagtccccgatcccaccggggccttccgcctcttttccctcatcccctaggaggctttatcaggttctaaccgcttgtagtgggggccgtgggtgctcggggcgccaagaggagggggctgccgagagcggcctgcctagttctcagcattgcctctttgaccactcgcaggctcctggaaatgcaaacacagcccgtgcgtgatccgcacgcgaccaaaagccgagcgcacacctcccgcccccgccccacttgccatcgctcacactaacgtgcacacatgctcgtgcaaacgcgcacgcacggaaccgcgcgccccctcacacccagccgcgctcccggcccggctcagccaggtgcccccacgcggcagcgcccggtctgcccgccggccccctgcgaacccctcgcctcacgcccgcctgcctgcgcgcacgcacgcgcacgcacgcattccccacgcccccgcgcgggggcgcaggccttgggtggcggggtttggccgggagccggccgggccagggagcggcgagcagagtccagggtgcatcccgcgcttggcttccgtgcgcagcctccccgcgcggaggcacctggctccctctcggctctagaacgcgaacagttggcgttgagcacacaactcctcctccttctcccccgagacccctgtaccctccccgcgcgccatctcccgcccctcataacaggcccgaagagtaaacccccaaacgcgtccagaagcggctcccaactcttcgccgggagcacgttggaggctggatttcggagagactcgggattggggtctattgccggcccctcctggatccggcttgattttcatattttaagaagattttcttattacctttgattactcctttttaccaaatttctggaggagctcagtggggaggattggggggaatctgattttaagaaagaaagcaccgaaggggcaattattaattttcctcgggtttggaatcaccctctggacaagagaacgggcgagcgggagctaggagggaagagtggagaggaccggcgaggcgcgccagccggagccacctccttcccggccgccccctccccactccccctacacacacacgctcgctcgctcgccggcgcgcgcacaccccccgcgccggacccgcacctcggcgggcgccacacactcggc

SEQ ID NO: 5943 - DNA, 2300 bp, Homo sapien
cgtcataaatggttctgatagaatccataaagcaggtccagaagggcccccttagaagtcagatcaagttactgtaggccctggaaagaacaaggttggatagtaaaggcacttaatatggtttactattgcgcgtgcacacacatgcgcgcacacacacacacacagctgttgcaataaagtctaattgcagacctccaaccagcaaggtgctcatctgagttgggcagcccagacactggagaccaaattgagaccaacctgcccactttaaatcctaggagtgccacgaaggcgccttgaactcaagtggcaaacactcctgaaactcagatgaatcaaggaaagctcagcaaggtgacacaaatggaaagtatgaggcctccttacatccatctattgccacatggggcaccagcacagcagctcccagaggaggtccatggcaaagcacccccagctcttagaaccctgtgaagcactaagctgacaccatcctacagacttggaccagttgtattaagagaaaaggtggccagatcacatgaatacaacttgaaatcacaatcataatgaacctatgcaaacaacgacaaacaagctgtagaacaacacaggattggccatttactctggggttttgttcccttttaatgctcacttgttacttgttcattcatttatcagccagcgtttgttaagaaaagtctactagacaatattttttaactgtgaaaaatgtagtcattttttttctttaaaaagggacattgctcatttatttctgtagcagaccatagaagcagtcctagatcaggctagagcctgatccttgggtaaaccaagatataaaacaggggaacagttttctctctcttgaggagtttatagtctagagaaagagaagatcagagatcagtaggaagaaacaggatcaagagaggagggcaggcaggaagatctcaggagaagggagaagacaaatggagaagcaaaaagatggggcataggcagagaaaagcagctgaggagaagggtattggttgtggggcccagcacgtgagctcgggaaagtcagtacatatgtgagcacagtgccttgcacgtctaagtccataccaactaggttcagagccttgtcccaaatttaataacatacaaacataagtagttcctatgcacactccagtatctcctcactgaaagcatcatgtctgttctcttcatgacacctaccacaattttaactatgtatatgttattaacttgataattgtctccaacatattctctctcttctctctcctctctctctctctctcccaacactaagctgcatgagaacacagtttacatcttatgcccctaataattttcagctctgccattttctagccgtgttaccttaggcaggttatttaacctctctgatccaatagtccaaagagactttgtgaggatgaaataagaaatgcatataaaatacaggatagaccagcctgagaaacacagtgagaccccatctctataaaaaataaaaaaaaatagttgggtatggaggcatgcacctatagtcccagctacttgggaaactgaggcaggaggatcacttgaccccaggagtttgaggttacagtgagctatgatcacatcactgcactccagtctgggcaacagagcaagaccctgtctctaaaataaaacaaaatacagcatagctctcattaaaattattccatttccctgaagaaatactgcacaggaacaaaaggtcccaggtctacattccacaaaagctcttcctccttatgctagataaggtttattcctgtggctcatggttagattctccattcaaggatccggacagaaaaatcctatttctgtgactgcgtcctattttattggcatttcatccctccaggcagtttcaatcctctcccctttcctcttctcctcctcctgcctgatgctatgatgccacaatccagtctctgtgactcggaggaaatgtttccatggtgatgagcagtgatgtcataaaggggggattgttacagggttgaataaaatctggcactagatgcaccctgcctccttatataagagggggcgggagacaagccctatcagcacatcccagaaaatgggaaaccgaatcacccaggggatggcaaggaatgaccagagggaaagttccagttctgtccaacatgcactaccagccccattttggaaaagaacagatttaatagacctcaccaagacaagaattgtttttcgtcaaaggaaatcaaagg

SEQ ID NO: 5944 - DNA, 2300 bp, Homo sapien
gagctatgctcagcccagcttgacttcatctctcttctccaaacaggaccataaacagccactattgaccctttggattttatatgcatgtcagaacctgcttacacctcatttatcgattaattcagaaggtcacacccatgtgtgtgtcatcacccagtcataagtatgggaaagaatgcctgaactctgaggtttgcccttagttaagggaaggagtatatccctttccatactccctttcttctttcatttaccaaatagaaaagaaatatgccagatgcttaggacagtatctgtaatcctgcccaactccagccatcaacctcgtcataaaacagagctatagaattttaaagcagaagaaattaaattattgtttcaaggccagttgaaaagtctgagctagaaaggaatttcagtattacagtagggacaccatctgaaagctgcagctgggagcctctgcagggttttgtacacatgcatccaagccatacatgggtatgttgtgaaggactgtcctgcccctcttaaagggcagctctgtgcttctgcagctggctacattgctactctccatcctgctgtcgtcctgacacaaagagaggagagagagtctgctcatctgcccctgtgacatctctttatcagctgccttagatcagcctccaactgttacgtcttactttccaaacagtagagaatttgagagggcactgactttaagatgcccagtgaataatgactcatcagactgaagatctgtactctcttctctccaataagcatctgctttttaatcaagattcttctttccaggaaaaaaaaatatatatatatatataattagagctgacccttgaacaacaagggtttgaaatgtacaggtccacttatatgtgggttgttttttttcaagaaatacagtcagccctccatatcgtcaggatccacatctgcaaccaaacttagattgaaaatacagcatttgcagaatgcaatacctgcagatatggagggtctacagtgggattggagtatgcatggatttttgtatacacagcggtcctggaaccaatcctctgtgaattctgaggtatatctgcattctatttctgtcttcatccttgagaacttcctatatgttatgattattgggggaaaaacagaaagaaaaagattaataaatgatcacaaatatgtttttttgtgtattttccaacctattaaaaatggtaaaaatgccttgcaatgggaaacacacatataatataaaaagtcagtaatctgatggtgcatctaatttacatatattttctgctctatgaaaggcaatgtgcggccgggcgcagtggttcacgcctgtaatcctagcactttgggagactgaggtgggtggattgcctgagctcaggagttcaagatcagcctgggcaacacggtgaaaccccatctccactaaaatataaaaaattagctgagtgtggtggcatacacctgtagtcccagctactagggaggttgaggcaggagaattgttagaacccaggaggcggaggttgcagtgagccgagatcgcatcattgcactgcagcctgggcggcagagcaagactctgtcaaaaaaaaaaaaaaaaaaagacagtgtgcttagggtgggtaatacagaagtaaataactatgtgatcacttctcagaaaggtctcataatccagtgaaatataggatgaaaatataagtgacaccagatattggaggagaagggaaatgatctcctattcccaaagtcaacagggacaggttacaaaagctgtttctactttgccccaggagaaggagcagaatgacatgcaaaatccaggatgcccagtcttatccttatttctagaatttaataatttataatgtgtttcaagtatactaatactcttcctagatactggaagaataatcacagttttaagaaacggtataacgtttgtttgtttgtttgtttttcttttccaagttaggatgacagtctgagagtttcaggaaaggaaataaagttgatatcccacacaagactgaatgagtattgttacttcttcttgtagcctctcatcactttggacagcagcatttccttcacattccttgcagaaggaaccgacaccatcacagtccaggtggctgctgggaatgccctcatccaggacacaaaagagattgcagttcatggtaagccctgaaaattgttctgtgatgctccttcccgctcagttaatctcctgtgtccactctccctacaatcattga

SEQ ID NO: 5945 - DNA, 2300 bp, Homo sapien
ttgattccttaatgcagtcatttccttgaaatatattcacttgtcttgatcttgctctttacagtaataatttaatcacagtttttccctggttaaccacttagccgtcctttaaaatttcaagaagttctggttatcacctgaaattaaataaggtaaccattgaccttcgaagttatataaaaaacttttttaaattggagatttttttctctgtagtcagagttactattttcccagggatgctaagtaacattaatctatgaagataggtgcattttccctgcacaccttctcacacacacacacacacacacacacacacacacaccaatagatacttgaattagatacttttatttggagagatgggattcttgaacaccttggctcaagaaatccatttgcctcaacctcccaaagtgctcagattataggagtgaaccactgtgcctggccaaaaaatattttttaagcagtgacttaggtatcaaatataaaatgaaaagtattttataaactggactagaacatttagtaaacttccttgtttttatttttttattttttttgagacggtctcgttctattacatgggctggaatacagtgggaagatcacagctcagtgcagccttgaactcctgggctcaagcaatgttctctcctcagctcccaagtagctgggcttgtaggcatgtgtcagcatgcctggctaattttctttttttcttttttcttttttttttttttttttttttttttaagagacggagtctcatttgttgcctaggctgatctcaaactcctggcttcaagtgatcttcccagtgtaccctcccaaaatgctgggattacaggcatgtggcaccatgcccaacctagtaaacttatttttaaggtagctcaatttaaatgttgaattgcgatagacaggagagactagacattctgcatttgtctgggacgattcaaacctaaaacttggaccttatcttatgatgtgaaggaaggactagaacaaaggtaataatcacagagagacccaaaccaagaaagaatctttgcttatgataatgttaagggagatcacctagacagcttctccagcctagctgctggggtagattctggagaggagagaggaggagaaagatgcctgggttttatctttggtgagtgaagaatattgtactttacttaccatactctttttctaaagggagagaagaaaggtaaaatacggtgggctttctccagttcgaaagcaagaaaaagaagaccatggaagtgacgaattttcccttctattaggaagaaaggggaaggcttgggaataggagagagtaagatactagaaattcttcctctgaagctcagtactattttaatactctccacatcacccccacttttttttgacatgtaacttatttcaaacaaacaaagtaaagtaagcactgaactgtaaatctatgaatgtggacctcagttttcttcatatgtaaagtgagaagtttgggctagtctctgaggtgtcttctatcctcgtgtacctgaaatgacccaagctgcagacactgttcgacacaccttgtcactactggagtggatggccaggtgaatattctggcttgctcatcctgcttgcaacagctggggctgaaacagcttgtggcaaatctcaggctacagaaggcctggtcaaggacttactcgctgagcactgcttcctctccctcttgctcagcttggtaacagtatcaagggcatagaaactgcaagctcccccaggatcagcaaatgcattttgttctttaggcttctcctcctggtactctgctgccctttcttctcagaagccctactggggcatttagcagctccttttagtcacttttgtgtccaagggctgatgcccatgcagagcctgctggctattgactgactaaagtttggtggtggccacctcatgcctgcaaaccaccaggtttgagtatcttgggagaaagctctgggataataccctccttgatgtcagagtgtatggggccttgttgaagagttgccaggcagccaagagaaagtgttccacacatagaacagggggagacttgaatcctagagaaaacaaaacaaaacctaacaaaacagaaatgaacccttgatgaacctcttgctctggactggtgccctgaaaatgaatgaaattgttttaaagattaccaagaagatataaaatatcaaatgcggcattaatgtgtgagtattatattttattttatttttaattgtggcata

SEQ ID NO: 5946 - DNA, 2300 bp, Homo sapien
cttgctgagaagtatcttattctgacatatgatttattgatattttatcttggattttcacacctatatttataaatgagttttgtctgtggtgtttgtactatcatctattttaggtttggttaagaaaatttatgctaacccacaaaattaattggacttttctttggtatggacctataagaattattaatcagttttaactaaatttttatgtaactcctgaggaactaacaaactcatctgaggtttgcacttttttttttgagacggaatttcgctcttgtcacccaggttggagtgcaattgcgtgatctcggctcactgcaacctccagctcccaagttcaagcaattctcctgcctcagcctccccagtagctgggattacaggcacccgccaccacggcgggctaatttttgtatttaatgaggcatgagaattgcctgaacccaggaggcagaggttgcattgagtcaagatcccgccattgcactccagcctgggtaacagagtgagagtctgtctcaaaataaataaataaaattcagttacatttatttaacaaatttcgaaaactttcctttgatcatttttctgttcaggctttataactttctcaaagtattatttatattttgttacaaaattatctatttttcatagtttcaatatgttttcaaagagttctacacaatggtattttttaactttctataatttttacagaaatcaggttaatacttttcattcttaattttggatgtatttatttcttttctttaatcaaaccaaccaatgttttgaaaagtagctatttattggattagatgtaatttctccactttcttatttcattgatttctatttttatctttattaaaacattcctctcaatattttggttcatttttatttttactttactaggttcttgaaataaataatttattcacaagtttattttttaaatttaaaaatatttagaggtacaagtgtttctctgagtacagctttagcttaaactcatattttgctatgatttattactttgattcacatctagataatttataattctaggtataacatcacttgaattaggaaatatttataatattgtttcttacctttgaaggggtataattttgttttcttgttatatgtttgtttctttgttgttatgtaatctgatttgactatgataaaagaattcatcctataaagtaccaaatatttggaagtttagattttctgttactaattaattatattagtgggcttttcagtgaatatttcatcaatttaagaaaagaatatgtatacatgtgatgatctctgtgaaaatacttgattatatttcaaattttgacttttgactactggatgtatcaaattctgtaaaatatcttcctttatgtatttcccttctttgaggtttggtactagaaggtaatgactagtctattactataggttgtatacattggaaaagaaagctattcctttattattaaataatggagttagcattgaatgaaacattattattaataaagccagtttctatttttgcacttacataatgtattaccatatttatagtaaatacaaaatatatattataaatgaatgcgtgcatatacatttcgtttattttaaacacacgtttaattaaaacataacattattaaggggtaaaaataaaatcatagttagctaaactattacgaagtgaccatcctgctgtaaccaccaccaaaagaaatgctatatattcagtttcaaaaacctcccttgtgccccatttcagtaatttccccctgtacaactttgtatacatacaaggcagaaagacttttaggggcttcccccgaagccctactaatacggtttggctgtgtccccactaaaatctcaatttgaattgtatcttccagaattcccatgtgttgtgggaggaaccaagggggaggtaactgaatcataggcgctggtatttctcgtgctagtctcaggataatgagtaagtttcatgagatctgatgggtttatcaggggtttccgcttttgctgcttcttcctcattctctcttgctgctgccatgtaggcagtgccttttgccttctgccatgattctgaggcctccccagccatgtggaactgtaagtccaattaattaaacctttttttattcccagtctcgggtatgtctttatcagtagtgtgaaagcagactaatatacctaacaataactcttcttgtattcatgcctttgtataaacccatcctactgag

SEQ ID NO: 5947 - DNA, 2300 bp, Homo sapien
ataaacatttttgtgtacaatgaagattattcaggcacaatctctgagtttacagtctagtaagggcataaaacagtgtggggtttgctgtaataggagctgttgtttgtcagtgtctggagaagggaggtacagagcactgggtcccaacacagacttcacagtcagaccaggcttcaaaagcatcagcagtcacttcctagatggccttgagccactgtctaatcttcctacagccaccatctttcctggagtggaaattgagatgcaccacccagatctctgttcagggagacacttattgtcttttctgggagggctatgggcagagtcttcaccagctgggttccaagtcgtgtcacttcttagggtggctcatgtctgatgacaggctggtgcagttatgtaaagtcctggccatctcagcccaatttaagacaactctgaagggccattctgtctcccctcggggtctcttgaagttgtcatgggcctacatggcagctcaagttttcccttgtccatgtttgtttccttccctttgctcccataggtgttgttcccaagagcacttcttagtaaacatcctgcatgctaaactcagagtcagcttcctgaggaccccagcatatgatatgttctcactgcagagtgaggtgtaatcatatttgcttcaaagggttgttgttggaggttgcctaaaataatattataagttacttataatagtaacgttgttggaggtcacatcaaataatataagttacttagcacaatacacccaggaagtacctgggattgtgctaagtaacttataacattaggtgaggacctaatacctggaatttcttgctacttcaaaaaaaaatgcagcacagtggagttcaaaaacaaataatcacctaattgggaaataatgaaataaataagctttaagatgactcatgaaggataaatagcaaaggcagagaaaagacattctggtggagataacatgcacaggaacatttgcaggaaaaagctgaaatattgagaaattgtacatcatcccatttggcaaaagcgtaagagttgtgggtaattagtttggaaaggaagcatgggaccatattgcagaaggccttgaatatgtccttaatcctgttagcattgggaattcttgcaagcattttggacaaggaacatgatcagaattggactgctggagagagaagctgggattatagctattgattctagaagcatctagagagaggattcaggggaaaccctggggtataagctcaagagagagaacagtgagctaggataaacaagaagtccttgagtgatatctgtaattttaacagaagagtcagtgtggccaagtggagggctcagggtgcttcagggaacagggctggtcatcaggtctgatgctgcagaaaagtcaacaggggcctcctgagggttgtgatatggggatgtcctcttaggttaggtggttaggatgtggtgggtctatttgaagagtaactccagtgggctgacgaaggaggaagctaggttagaaagggctaaggcatgaggggcagatgataaagtgaaggtcttctcactggcatggtcaccaccttggagatgctctctagcaaaaagagctaacatttgaatccccaggccctactgtaaatacttcatgtgtaactcatttaatcctcaaaatcagccatgaacaaggcaagtactgcaactgtcctgtcttctatttaaaggaatgtaggcatagagaacacaagcaatgagcttaaggtctcacggtgttgaagctgggattaaatcacagacagcctgactccggagcctggacctaatagcccagtgctgtctctcacatactccctgcctgatatgcccaggcctctgctttcaggccccttgtggtgtcttctgcctacccctgatccccccaccaaatacttggtcccttctcagctttcttctctgcagcactaatgtgagcccctgtgtctgtccctcaggccacaggggttccaggccagcacatcctggtggcggtgctccctggcttacccaccactgctgaactctttgtcctaccctatcaggatccagctggagaaaacaaaaggtcaactgatgacctggagcaggtgagtcccctggaaaaggagacgttttcagcttcaaccgtttgtggagtcttcaactttctaagcctccatttctgacccataaactggtgatcctaactacagcttcaccaaaagcacatgcaagagcattcatggtaggtgtat

SEQ ID NO: 5948 - DNA, 2300 bp, Homo sapien
ataactccgcagtcattccagaaacatgtcatattgaccttatgtgggccacctgcccatcacctattcagttgctgttgccagagaaatggaatattctgaaagccggttctaaaagctcatttcttgtgctgctggtagaagaaagtaggaaaaagtttagatttaatatagaaatatatctgagagggatgaggctgtttttcaaaaaacatcaatccatacacttggacctgtgtctcctcaggttctgcatcagattgaaaatattaaaaaaaatacaaagtaatacaaattaaataaatgatacaactatttacatagcctttacattgtattaggtattgtaagtaatccagagatgatctgaagtgtacaggaggatgtgcataggttacatgcaaatattacaccactttatataaggaacttgagcttctgtggattttggtatctgagggcaattgtggaaccaatccccctgcagatacctagagagagcaataattaccaggagaaatgtaaatagacattcaacagatagaagcacacattaaattaatgggcaggattcattttttgacctatccacttggggttctttctacaaaaatgttaccaaacttgagtatgtcatatggaacctgagtagaggtgaggaatataaagccctttggatatggacttctccctctgggatcacgagtttactgtgataaacggtaaagaggatagggagtcttgttcctacacgtctagaggagagtcagagctgaaatgctgcttgattgagaacatgggcatatatgacaataagaaatttaggttagtagttaggtggaatttccccgcactggaattgttaacaggaagattgtcagatttcctaaagcttttcaaaaatagagtatggtgcatctggaaagattagagcactaagtgatgccgaaaacaagaattgttctacgttgttcttctacctttgtggttatatgcaatctttgttttcgtttgtttgttttggttacttagctttaatttttttggtttttggaagttgttttatgactactatcttgggcaaagggtaaaatgcaggctagagcatatgaacagacatcccataaagaagaaagcaggccttggtctgagtcagcaagctttggactgtggtagcttccattgtacttctctagagttatgaatgggggaaaaagaatttgaaattcccaccccaggggcacttgttactgcctccgcgctacctttgctttaattctatcttccaggacaaacaggctctgaaaacatcatcagttatgcaggctatcttttaccctttttcactggaggattcctgcagaacctctcagtttagattttgataagcagctaagtctttgaacacactaacatgagggttagtactttgggtttctctggtgaatgttttcttagggctgagggtagaggagactggctaggggttgctgaacctttgggcagtgcttttcaaactttaatatgcatggtaattatttagcaatcttattaaatgcacattttgattcaccaggtgaggcccaaggttctatatgtttaataagcttccaggtgatgtccttgctgctggtccatgagccatgctgagacatgcagggtttgtctattttctctctgttcctccagcttttcctcatatctaccccatatatgccttctgagcaagtatcatatttgtgcttggcaaaaatatcaggatgcttgattctccgaatcatacatatttaagaaagcatttttcgaattatgtaatgaggcaattaaaactggtctatcaaacatcccttcatcctattttctcatgaccttattgcctaaccccacaagtgacaaaggaaatatatgattaatgcttaactattatttcttatatatgcaaaaggaagctatcttccattaaagtgctcattctggtattcctcatttgattccacactctttggatgcctgccaggttaatgtataaaactctttttccctcttcacgaccttgtgtcttttcacaggacatgcatgttatcagcaccgatgagaatcaggtgttcgcagcggtccaagaatggaaccagaatgacacgtacaacctctacatctcagacacacgtggtgtctacttcaccctggccttggagaatgtccagagcagcagaggccctgagggcaacatcatgatcgacctctatgaggtatgtcacgaggcatatgtggtcctaagccacagcagtgcccagctggct

SEQ ID NO: 5949 - DNA, 2300 bp, Homo sapien
ggtactattttgttgtgtcattcatttattcaatcagtaaatattcattaaataatgtaataacatgtacctaagagaatattacgtatatgaagactgcaaagaaatctgaaaccatttcaacccttagaagcaaactgtctactttaaaaaggattggattttgagaaatcctttgccgttttcaaagcccattcacctgctataaatcttcatctgaacttacgaatagtagcagggtgctaggctgggcagatactataatcatacaattatagaattttaggagcggaagggattttaaaggtcatctaatgtgaccatttaattttaaagcttaggaagctgacagattgtgatttgtctgaggtcccaaagcaaaccagtggcagagcaccatcacagacttgctattagggatctcaaagcatgtggcagtagcactgggccaggcaccaagtgacacagaataactataagtactgtgcctcctttcctgtatttatttgttatgcagatatgcattagactcacaataaatatttattgaactaatgactggcagatttcctcccatgtagggtactgtgccacgtactgaggaaaatggtaaacaaaaaacaggtcacttcctccaagttgctcgaaatttgatcttcctgtcctcaatgagtttgcagtctcttagggaaaccaagatatatacgcttaaaaaacgcgtagtggaaagcgttttcttaaatatgattgcatgcaggaagattgggttcaaattcagtgaatgctttaggaggttaggagagaaatctaagcgttaaaattgatgggaaaaaaaatcccccaaactaacacacacacacacacacacacacacacactcacacacgagatcatttaattacatcactctctgctgctgcctttccgggatctccccccaggctgggacacacaggctctgctgcgggtaaggtcaagatgccaactcaggaagcataagagagggaaggagcagaagcccacccatccctatctcctcaactagaaaagaccagaaagacggagaaaaaaggaaacagcaacatagactcatagaaacaataaagcaggaataggaagctcccgacacatcgactgctccgggagcccggggtcgaccgcccccgcgggcagggtgcgcggactcagcgccgggacccgcggccgcgggggcgcagagtgggcggcggggagaggcggcggcagcgcctgcgaggccgaggggaggtcgccggcggcgcctccagcgcccggagacccggtgcgcagcgcagctcggccgcgggacgcggcgcccggagtcccggcagcgcctgccctccctcccgcgtcgcccgccagcgcccgcgcccgctccgccagtgacttcagctcagctccacccccgcgcggcggcggctcgctccgtccggacccgcgctcggcacaagcccagcccgggcaagcggccgccacctgcccggcgccgcctccgcccgcccccaccgcggcgcaacttggatggagttggggtcctgagcgccggccccccacagccgccagcgcagagctcgtgccgccaccttcgttctgggacccctctctccgctgctcttcgctcccgcgatgggaaaagttggcgccggcggcggctcccaagcccggctgagcgcgctcctcgccggcgcggggctcttgatcctctgcgccccgggcgtctgcggcggcggctcctgctgcccctcgccgcaccccagctccgctccacgctcggcctcgacccctaggggcttttcccaccaggggcggccaggcagggctcctgccacgcccctgcccctcgtagtgcgtcccctgttctcagtggcccccggggaccgagcgctatccctggagcgggctcggggcactggggcatccatggcggttgctgcacgctccggccggaggagacggagcggagcggatcaggagaaggcagaacggggagagggcgcgagtcggagcccccggggagtgctaagagatggagggcagcaggagcctgggactcgggagcgggacccggacaaagccacccgcttccggatggaggagctgagactgaccagcaccacgtttgcgctgacgggagactcagcacacaaccaagccatggtccactggtctggccacaacagcagcgtgagtagaatgggactgagggtaaaggggtggaaagatggaaagggttaaagtcggctgtgtgatctgatggagaattggggggaaatagggtttct

SEQ ID NO: 5950 - DNA, 2300 bp, Homo sapien
ataatttatttgggttctgattctttaatctgcttttcctttcttggaggaattcccatgtacttatccagactggaaaggaggttagcagggcatagaaagaagtcattaagtaaatgatcctgcaaagctctaaaaacctttctgaggaaagaaaaaactaccgctctgggttttgacaaagaacatttgcaatttgaggaggagagaggacctctggctctcctctcctccatctagaggccatagcctgccagacagcctttctgttttggaggattcaggcataaaggagcttttgcttgtatttcttctttaacgacaaacaggacactcttttaggtccttttaggtactcaagtttaatggctgagaagcctgccctccttgcatttgcactttttctgcgctggtcgtaagaacaagaacttaggccgatattttacaacacctctctggattggattgatataacagacgttttcttggacattagaaagaatttcattaattgaagagtaattatcactctgtattactttgaacttggcctcatcgcaaacacggtatacagatttttcagtgaggttattattctagtatgaaaatgaacaaaaatgtaactagaaactggaatcggtactattttgttgtgtcattcatttattcaatcagtaaatattcattaaataatgtaataacatgtacctaagagaatattacgtatatgaagactgcaaagaaatctgaaaccatttcaacccttagaagcaaactgtctactttaaaaaggattggattttgagaaatcctttgccgttttcaaagcccattcacctgctataaatcttcatctgaacttacgaatagtagcagggtgctaggctgggcagatactataatcatacaattatagaattttaggagcggaagggattttaaaggtcatctaatgtgaccatttaattttaaagcttaggaagctgacagattgtgatttgtctgaggtcccaaagcaaaccagtggcagagcaccatcacagacttgctattagggatctcaaagcatgtggcagtagcactgggccaggcaccaagtgacacagaataactataagtactgtgcctcctttcctgtatttatttgttatgcagatatgcattagactcacaataaatatttattgaactaatgactggcagatttcctcccatgtagggtactgtgccacgtactgaggaaaatggtaaacaaaaaacaggtcacttcctccaagttgctcgaaatttgatcttcctgtcctcaatgagtttgcagtctcttagggaaaccaagatatatacgcttaaaaaacgcgtagtggaaagcgttttcttaaatatgattgcatgcaggaagattgggttcaaattcagtgaatgctttaggaggttaggagagaaatctaagcgttaaaattgatgggaaaaaaaatcccccaaactaacacacacacacacacacacacacacacactcacacacgagatcatttaattacatcactctctgctgctgcctttccgggatctccccccaggctgggacacacaggctctgctgcgggtaaggtcaagatgccaactcaggaagcataagagagggaaggagcagaagcccacccatccctatctcctcaactagaaaagaccagaaagacggagaaaaaaggaaacagcaacatagactcatagaaacaataaagcaggaataggaagctcccgacacatcgactgctccgggagcccggggtcgaccgcccccgcgggcagggtgcgcggactcagcgccgggacccgcggccgcgggggcgcagagtgggcggcggggagaggcggcggcagcgcctgcgaggccgaggggaggtcgccggcggcgcctccagcgcccggagacccggtgcgcagcgcagctcggccgcgggacgcggcgcccggagtcccggcagcgcctgccctccctcccgcgtcgcccgccagcgcccgcgcccgctccgccagtgacttcagctcagctccacccccgcgcggcggcggctcgctccgtccggacccgcgctcggcacaagcccagcccgggcaagcggccgccacctgcccggcgccgcctccgcccgcccccaccgcggcgcaacttggatggagttggggtcctgagcgccggccccccacagccgccagcgcagagctcgtgccgccaccttcgttctgggacccctctctccgctgctcttcgctcccgcgatgggaaaagttggcgcc

SEQ ID NO: 5951 - DNA, 2300 bp, Homo sapien
attgcatccaactgtaggccccagtctttaaaattgctgattgtgctttaaaaataaaacaaaaaataataaaattaggccacagaatacattttgctcattttttaatagaactatatggaaatgcaaattttattgaggcttttggcccttggaagagtcttgtccctggaaatgaggatttattgaaaaaggcatacccaatcggtgaaaaagcaactgggatgtctttccacttttctttctcccctactgtgcacagccctggctgcctatagctacatctcctgtgcatcaatccctgactttaaattcaaaccttagatcctttttttttttaaaaaaagaggaaatagttgtataaaatgtctatattttctagaaaataattagttgatgatatagtttggctgtgtccccacccaaatctcatcttgaattgtagctcccataattcccacatcttttgggagagatttgaactcccccaaagggagtttcaattaggagatattcaggtaggaaataattgaatcacagggacagtttcccccatactgttctagtaatagtgaataagtcttgtgagttctgatggtttttgaaggggaaactcctttcacttggttctcattctctcttgtcttctgccatgtaagacgtgccttttgccttccactatgattgtgaggcctcccagctacatggaactgtgagtccattaaacctctttttctttgtaaataacccagccttgggtatgtctttatcacagcatgaaagactaatacagttgaagttgttttgtttttcaccaaactctgatcgtgcctagttctttttaactttatttatccagaagacagatatctgtccgatgatgttcaaggaactaagaagatgggagggacataacagatatggttcctgttttcatggagctgattgaggatgtttctgggcatttctgcacccctccaccctcacattttaattctaatttttttcttttttttttcttctacaatgtcttctggcttttctcaactcttccttcctctctctagcatcttaatgagaagtgaatggggccctataaataaaacatctgtgtctgtggaaaaatatcctgatatatctacttgcacagctgttaaaaggcctaactccctgcaaaggagccaacatgggccattctcacaagaaccagaaatgttatcatggggctagataggagggaagattaaagaagagaagtacaagaaatacaaactgtaccctgcatatggtagcttctcaatacatgttcagtgaaatgaagctggttcagaaggcaagagaagattcacagttggttgccccacagaaggtgtctggggtatatgagagatttggaattaatgccacaaagccaatgttctgcctcacaccatgccttagttctatcagagatgggctaaatggctatgatactaacgttggtgatcatttatcatgtgtgatggttaatattaagtgtcaacttgattggattgaaagatgcaatattgatcctgggtgtgtctgtgaggatgttgccaagggagattaacatttgagtcagtgggctggggaacgcagacccatccttaattgggtggacaccatctaatcagccaccagtgaatataaagcaggcagaaaaatgtgaagtgatgagatgggcctccagcctacatcattctctggtgctggatgcttcctgccctagaaacccagacttcagttttgggacttggactggctcttcttgctcctcagctggcagacagtctattgtgggaccttgtgatcctataagttaatacttagtaaactcatatatgtatatatgtgtgtgtgtgtgtgtgtgtgtgtgtgtgtgtgtgtgtgtgtgtgtgtgtgtgtgtgtatcctatcctattaattttgtccctctaagagaaccctgactaatatagattttggtaccaggagtggagtccagaacaggagaaggctctgcaactgattgagactgcctgctctgtgcaaactgctctgccacttgggccatatgacccagaagatccagtggtgcttgaggtgtcagtggcagacaaggatgctgtttagagccattggcaggctcccataggtgaatcacagtggaggcttctaggaatttgaagcaagcccctgccatcttctgcagataactactctccttttgagagacagctcttggcctgttactgggctttggtggaaactgaatgtttgactatgggtcaccaagtcac

SEQ ID NO: 5952 - DNA, 2300 bp, Homo sapien
taggttttaatagtttaactgacaaacatcaaggagtttagtgtgtctgggcatccttatctgattcttgggggacagcaaaccctgtttgggtcatagtggatataatggaaagaagtgggagagaggtgcaggtaaaaagtgagcttgtctggggctatgacaaagttatagaatccaggattaatgaggctcttctgccaaatgagatgtcatcatggacatctcagtccttccaaattggttcatctcctgatgtagaattctccaggtctccaaagcttctcagaggtaaaggatgcatcttacatgcaaaggtcttttgggtgtgtctctacaggaaacatctgctttactaagtgagtgtaggattccatttcctcagtagctctgttgggtcagactataagcagagttagagaactgctgaatgtggctgccaaattctcccctgggctttgtgcaggagacaaaaaaatgaataagacgtgacatctgatgtcaaggaacttaaaatatggataggtattctattaggttttcagaaaggtattgtcacttgagtcagaaattcaaaagacaatgagcacaggagggtaaggattacataaatgttactcttcagatccagggttcaaattggagcattttatattatagtatgggttgctgtaaccccattgaagatgatgaagcttggcatactggctctgcaattcaccatctgtaagaagtgggcaattcaacctttctaaaccttggttttctcatgtgtaaaatgagaataatagtagtatgcccctgcaaggttactgtgaggcgatgagcttaaataggtcaaatgcttatcagtttctcctccaatagatacttagtgaatgatagctattatttttagaggaaatcaactgacaacccatggtaaatatggcaggggttttaaaggacgtttgtttttcttcaagatcatagggaagagattaaatgtaaacacaaaaaacctctatttgtggaatggatctcatttttcaagcttgtctaatttgtaatcttgtcccaattttacaaactggagagtatctgtctctgataaggattatgtggccttttaacccagtatctttccttctcttccattgtggtgctttgaaattaaagctcatctcataaataaaggctgtttgctttctagcatattttcttttcttttttctttctttttttttttttttttgatggagtctcgctctgtcgctcaggctggagtgcagtggcatgatctcggctcactgcaagctccgcctcccgggttcatgccattctcctgcctcagcctcccgagtagctgggactacaggcgttcgccaccacgcctggctaatttttttgtatttttagtagagatggggtttcaccgcgttagccaggatggtctcgatctcctgacctcgtgatctgcccgcctcggcctcccaaagtgctgggattacaggcgtgagtcactgcgcccggccgcatattttcttataagtttgtttctgtaatcttcattgtccatataaataaataaaataaatagattgttaaaaatgatggaagattgaataatgggaggccattaagttcctcatactttgttaccattatttaggtagtaaacagaaatagtaacataatttaggccaatatccttcatgactgtattagacagtgttttattcttgctccactgccccctgccagaaaagtcgaggtgaattccactgagaaacttctttctctcaacagaaattgcttctgttgttaaagtgttaaacattttcactccttttgaaggtgactgctctgtgattaagagcccaagggtacaccaggctaattatgttgttggttttagtccaaaaaaatgacttattcttgcaacttattactaagtttattggattgctaaatcatgagtgtattaaaacaaactgtgatttttcttatctttgccaaagcattggggttatagaataaggtgcttaaggtcattaaaggctaaaaattcataggcttaatgcttattaagcaaagctaatttggtttaaaagtaacaaagcatttgctttatacttggaagtcttagcaaattaactctcattccatgtgaaaagatatcctgggcttgaaaagaaattcaggtcttgaatttggttgagaagttgggaagtttgagaatttttttttgtggtcaaatggtttagtaagagataagttattattatatagaaactagcccttaggccagacaaggcggc

SEQ ID NO: 5953 - DNA, 2300 bp, Homo sapien
gaccttgtgatccacccacctcggcctcccaaagtgctgggattacaggcatgagccaccatgcctggactttatgtaaattattattattacatttttattatttttttttatttttgagacagagccttgctccatcgcccaggctggagtgcagtggagcgatctcggctcactgcaagctccgtctcctgggttcacgccattctcctgcctcagcctcccgactagctgggactacaggcgcccgccaccatgcttggctaattttttgtatttttagtagagacggggtttcactgtgttagccaggatggtctcgatctcctgaccttgtgatccgcccgcctcggcctcccaaagtgctgggattacaggcgtgagccaccgtgcctggccgtaaattatttttaaaaatataaattatttttacatgtctcttagtgtgcagataaattttttttctttttttttttcttattttgagatggggtctcatctgttgcacaggctggagagtagtggtgtgatcacagctcactgcagcctcagcctccccaagctcaggtgatcctcccacctcagcctcccgattagttgggactacagcccacctgattttttctgatttttttgtagagataaggttttgccatgttgcccaggctgatctgaaactcctgggctcaagcgatccacctatcttggcctcccaaagtgctaggattataggtgtgagccatcacacctggcttagatatgattttgtgttttattttattctcttagaatcatagtgtgaacattttccatgtacattgaggccttaaaaaaggatccaaatgaaaactgcatctagtggctcttctgatttactaacccagtcctcctatttttaaatgtttgggttgtttttaattttttgctgttatcagtaatcctgcaataatctctccgcatttatcttttttatttctctagaatgattttcttacgatgatttcttaggaggggatgcttttgaatttttaaacttagatatgttgttttgggaggttttaggataaaatactgaagcacaatagttgagtgaaaaattaaatgaatagaaactattggattttagatagctttggtgagagcctttgggagttctcccttgctaaagatgtgtcctgtagattggtcagttgggatgaagcaattgaggaaaaagtgagcttttaatgtacctcctctaatttgtaagaggcacacatgaatttatctcaccagatgatttataagcaattttctcataggttcccaaaggtggtgtgacagagatctcagctgctgacaaagctgaggagtttcgcaggtaaggatccatttggggggacccaggagcctcgtgctgattttcttgctagttgaatgaggctggaagggccctgaatcttagcacagtaaaaacctttaagccactctgctttctgtctttctgttacaggcaacaggcagactttgtggacctgagcttcccaacaatttccagtacgggacccaacggcgccatcattcactacgcgtaaggcatgcggaggagcatgctgcctggccttgctgcttctgcacaggagcctgagcaggggagagacattattttaccagaggcctctgtgcccaccttcatctgtctgttgagactgtaaaatgaagggaaataagacttctaagattttattttctcccaatccccaagcctctgccttttgggagcctcttcttaggctcagtatggcactggcattctctgcagggtagtcagatgggtgtccctctttcctttttgaagctgcaggaactgtatgcatagcccttgcatcttgatgactaagtttttttttttttggagacaaggtcttgctctgctgcccaggctggagcgcagtggtgccatcacaactcactgcaactttgaactcctagactcaagcaatcctcctgcctcagcctcctgagtagctgggactataggcatgtgctaccactcctggctaatttttagatttttttgtagagatgaggatcttgatgtgttgcccaggcttgtctcgaatttctggactcaagcaatcctcctgcctcagcctcctaaagtgctggaattacaggtgtgagccactgtgcttggcccatgactggaatttttgagtagttttctttcttggtaacagcagctgttttgtactagtccatacatcttgtgagctccatcagttccataccaaaaaaaaacttagtagtaggttgtgagg

SEQ ID NO: 5954 - DNA, 2300 bp, Homo sapien
aggttcaaatcctgcctctgctacttaattagctgtgtgatttggggcaagttacttaaactctctgtgcctcactggctattaccagaagttgcacactttgacttgtaccctttgcccacgcgtaagaatttcttactttcttcactccctaaccccttccatacagaggcaaggggattatcagctgagaagaccttggttttggacatgacattttattttgctgaagcctcctggattggatgaagcgtttccgctcactctgtagcaggaagggacagggtctgcatgggagagattggtgatgctacctcagaggaggacccaaacaggaagtttggaaacaagtcagtatctacagaaacttaagttagggaattgttggtgcttaacacagaaattcagccttacttttcagaaaaataacagatgcctaaatgtcagtggcaaggaggggagaaggctattattggtttgatttttgagtaagatctcagtgaagaaagagcagtttttatctgtttctcctgatgtgctttggttctcctaatgaggaaatagaggctaaagggaacagctctctctgcccttaattaattcaatcttctgcagtgtgtgctaatctgttgttttcagctagactgttggcttcttgagggcgggggccaaggattccccagtcttcatagtccccgctgagcctagcacaaggctaagcaggcagaacagtctgctcatgactgatcgaggcccactttgttgtcatctttgttttccagagtgagtatattgctccatgtgactgtcggcgggcttttgtctctggattcgatggctctgcgggtgagtcactactttttctctgttcttgctgcacctttgttcgcctcctaaaaataactgaaccgagtttcagcctgtgatatagaagcaaaaagaaaatgcaaaccagatgctccacattgactctctgcagaaaggtgtgggttcccagtctttccctgctccccaaggtcacctttcagtaaccctttttattcctctctgtatctttgcttcaaagttttaacaatttttatttttaaaaagtttttgaactttttattgaatataacatacatataaaagttctatcaattaaactgaatatacctgtgttactagcaccccaaataagaaatgagactttaatatagtttcagaacctcctctcttagcttattggtcccagataattctcccaagtgcttggcttttggtttctgttttcactcttggcttaaataacaaaggttaactctaagctgcattggtgttcctcaaaaccattatgcctttgagttttagggtggactccccacttcaggtttgttctctaaagcaagctggacaaggtgggagctcccctcccctcatggttagcatgctgcttcctttggcgtaagtgcttgtgttggttggcgcattaggattggctttggctgacacctctgccaaaaccccaagttctgccaggcctgtgggaacggagggcagataaaggtaggaggcataagcttcctgctagtgaccacagcaggaacactcatagggcccacttggtctttctccaggaaaggtgaaacagctcccctggggtgtctggtggagcagaggagtggctgtaattgctgagcaggaaccatccctccctgtgtcttgttgattatacgagaccactttggccataggtctacagttctccattctctgttcttgactcatactgtgcaagtggagtcctttttgtgcagggaccagtgccaggtagcttgggtctcaggactgttctttcagagcttgacacacagcttgttttcagtagtgtggtcttctcttgcccagaggtttctttggagtcaaggacccatctgccccactaggagctgatgcctcttactgctcttgcctgtctactgtcattttgtgcagcttctgagcagttgttagaaacctttcttcttcttttttttttctcccctgcttcaggcacagccatcatcacagaagagcatgcagccatgtggactgacgggcgctactttctccaggctgccaagcaaatggacagcaactggacacttatgaagatgggtgggtacaggcatggctagcccaaacttagttggcctgatctgggcagggatcctagaggtcctcaggactcctggatcttaatccttttatgcagtcatggacccttttgagaatccaaggaaaactgagaaaaaaaaaaatggcatgcctatacatacgta

SEQ ID NO: 5955 - DNA, 2300 bp, Homo sapien
ttttgtttcattttcttgcctacttaccctagatagaacttctggtacaatgttgaatagaaatgccaagagtagacatccctgtctactctgccaagagtagacattccctagattataggggaaagcattcagtctttcagcattaagaatgatgttagctgtaggttttgtaataacttttgtcaggttgaggaatttttcttctagtttgctgagtacttttaacttgaaggggcattggattttgtcgtgctttttctgcgtttgttgagaagaccatgtagattttgttctttattctattgatatggcctgttataataattgatttttcatatattgagccaaccttgtattcctgggataagacccacttggcgatgatgatcctttttatattgttctagattccgtttgctggtattttgttgaggatatttgtatttatattttagaagacatattggggtgtcttacttttttatgaaagaataatatgtttactctcgttaagaacatcccattctgtccagtaaaactaaagtcacagccatatgaaagcaggcctagagtcattggtaaagctgcctggttatctggttcttaccgtgtggtagactgagctaatgtgtccctctctgtctttaccaacatgtaaaaatgcggttaaattataacttaattgagttcatagctgagtaaaattcaaaaccttttctatggccccacagtaggccccctggtgcctcaatgatgttgtctctgaaccacttacctccccatcccctgatacaatcacactgcgctgaccttcttgcttttcctcaggtaaactagacatactcctgcctcatggcctttgcacttgctgttgtcctggaacattgttcccctagccgttcacatggcttgcttcctcactctttttaggtctgtgttaaaatgttgtctgttataatagaggctgtccctggctaccccatatgaaataatccttccccttacctccttgatgctttcttccccttgctgtgctttactttttttcacaaaacacgttcttattacttgacgtattgtgtacttgttttgtgtctgttgccttctcttccctgtcttctgcccatccccctgccttgccccatcttaatttgttaaagtcagagatcttgtctgttttgttcactgttgtgtccagaatagggcctggattatggaagatttttcaataaatatttgttgactgaatgaacttgaaagaaagagaaatcctcaagtgccaaaaatgtagagggaacctaacgcctgagtggtatgctagtaacctgagcctgggaaagttaccagatgcagatatagaccttcatgcctggtgtccagggcattagactatccccatatgggaacaagaagtttgtgtgtaaatcttctagctaataaattaatgtgaaagtcttagaagcaaacaataacagaactgcttgtacaaaccaggacccatcacattctcatagataaatagcctctattgaagataagctcttaataaaagatcacaaaacgcagaaggaatgaaccaccaagagggagaggcagcagacctagcaaacatgagggttagtctcccaagatctatttgaaagtatgggagaaattataaaataagggcctacagtaatgaaggcacaaagagaaggcatagaaaccagagtgcaagaataggacaccataaagaaagaacgggcagatgtgaaaaagaaccaaatagaacttgtgtaaggaaaaaacattgaaaataagtcttcttagtctagttaaataggaggtgtgagaatttatgaactagaagctgcaactgagaaggttaacctgccatggggatgttttacacctgcaagttttacatcaaacttttatttattctgccactgataatgggggtgaaagttcttctgactcatgttagagaactgctaagttaagcgatgcctcctctaactgagccttgccacgtttattgtggtcaaagtctgcaacttcctgttctttctctccttaagggtgaatcaccaggattttcaactgagaaatttaagaataattgaacctaacgaggtgacacactcaggagacacaggtgtggaaacaggtaataattttgtctggaaattagatggaacatctgtaaaggattttagatctccaccccaaccccaggttgggtgagaagaagagggtaaggaattagtaacagatcatgactgggggttagtatctggaagttaaaaaccatttta

SEQ ID NO: 5956 - DNA, 2300 bp, Homo sapien
gcttgaagccgggaggcagaggttgcagtgagctgagattgtgccattgtactccagcctgggcaaaaagagcaaaactccatctcaaaaaacaaacaaacaaaaaaacttcaagaggggaaagggttcctttttttatcttgcaaacaggaactcaaatccagctcagggaatgcaaggtatttctctctctcccctgaagctggatgccgtaaattctgagccaactccttttcttttaggcaatgtgattattaaatacctgtcccccttaagtttcacttatctctctctctcttatctcgttttctcttataacttgatttttcccaccagctttcagatgtgggctggaaccagtattttatttacaatctctctgtttttggcttcataaatttggggaaatgcaacagatgtgtgctgctttcccaggaagcacatctttagttttttcatgctttaactacacagtctaattcggcttgcctaaatgcttattcaataacgactttgagttcttgcaggtagcagaacctagctgatacaggtatattaggccttacaccaaggtcaaagcaggaggaggtgccattcacctttaaaaaaatgtggtcactttcatttagtgccaggtgttgttctaagcaccagggaaataacaatgaacaagagagccaccatccctgcttttgaggagtgcacattctgaaacattcatttctgcagaaaatatataatgagaacttatgacatgttagatattgttcatcattaaacaaaacagaaacaatctgcactgatggttttgttgtgtgcgtgggtggtggcaggagagggggaagaatacagtacacataagtacattaaaagaatcctgttaaaaggtggtaagtgctatggaaaaaatgaagtagggtaaggcggattaggaatattggaatgatttacaaatttaaataggatggtcagggtaggtgatacttgaacgaagacttgaaggaaaatgaggaagggagcctcaatatttgggggatgagcaagtccaaaagccctgggacatgagtgtaccctgctttttcaaggagagccaggaggccatttcagctgaagaagagtgaggaaggtgagaacaggaggaaatgtggctgggggtagatcaaatggagcttttatgctgcgtgaaacgagaaattaatggaaagtgctgagcaaagaagtgacctggtgtcacgcttcaaaggactggtctggcggctttgttcaggctggactgtgcaggtgcgggatggtgaggggatatttggggggctgctgtaaccacacgggtggggtggtacaaccctctgatgcacatcagagggtaggaggtggaggtggtgtgacacggccagattaggggtctattttggaggcagggccaacaagattttgctggcagattagatgtggggtgtgaaagagaagaggcagggaggattcctaaattttgcctcttaagaatagagtagccattgattgagatggcaaagaagactggtggagaacgtttttgctttgcttcggtgcattgggagttccaggagttccgtttggacgttaagtttgaaggggctatttactatccaagcggagcggagagctggattttgaagctctctgggaacatacttttggggacatttctaaagcttgagaccctgttccaaagcctcgaagaccctgtcgaggttcttccggagccggccacgtccctctcttctcagccctcctaaattaagccggaaaatccctgggacagtagcccctttattcggcaaagccctttttcctctttgaggaatgacgacaaaaacgaacaaaaatgaagacactcagcagcactgcgtcctttccccgctcgctgcagggagaggcaatgcggactggtgtggaagggcaggccccgctctgggccgcaggcgctgcggccgcgaaccccaggtccgggagtgtgggcggggcctgcgtgtgggcggggccgcggcgccagcgcccgccacgggcgagggcgtggccgacccggcgctagcccgcccgcccgcccgccggctctcgcgcctccttcgcgccggcccttccgcgggtgatcagctggtctgcgctcccctgacgtgggctggggcacgtcaccgccgaatggcagcctccagaaagccaccgcgagtaaggtgagggcactccgccggcagccggcgtccgggcagcgtgcagccctcgctgcgcggccgcgcgtgttgcacctcggcgggcagggacgc

SEQ ID NO: 5957 - DNA, 2300 bp, Homo sapien
gtggtgcaatctaggctcactgcaagctccgcctcctggattcacgccattctcctgcctcagtctcccgagtagctgggacgacagtgtccgccaccacgcctggctaatttttttgtatttttgagtagagatggggattcaccatgttagccaggatggtctcaatctcctgaccttgtgatccgcccgcctctgcctcccaaagtgctgggattacaggtgtgagccactgcacccggccaccctacattttttaatgatttgatttcctcatctagtagtaaaagtactgatgctatatataaagaaagcaatagcatggagaaagaggactgaaatattcctcaaaaatacaaaagccatcccaaccacaggtacatccagtaaaaactctggcaatctttttaaaagcagtcagggttgtatcaattctatcatcccatttcatggaaaagaaaaaaaaatgaagggtctttcagaaaccaccaccttctggactgaagcatgttgggtcatggccagacttcagggagactggctcagaaaatttacgctgtatttgaagagcccctgaatgtttaagagtaggctgtttgatttatgtgccacccacactccataccaggttgcagatacaagttccagtctggtttctcagttacttccctggcagagaagtgaaaccacctatcagaaaaataactcacctttctgagagagaatgccactcaccttctcatcccaaattcactgcaacaaagtataaactgcatttgaaaaccaaaggccttgctcatgcatttggagactttgattagatccctaaatccttactatttaacttaatgtaaagtctggataagtaaatttctgtaaaggctgctagaaaggcttatcattgagttaacaattaacatccaaacaatttgactcttggaaagcctatttactttgattacctggttcaggtagttttcaaaatgtaattcttaaacattcaaagtgagggttagaagggcctcaagtacaggcaaaagcaaagaccaggtgctctctcactaactggccaagcaatgttggaaggcggtaaagagaaggggctgatagcccagactcaagccattttgttgcctggtgttgtgctgaactcctatagactataatggggatggcaccacgttcaagaggccaaagaagagactcagagacatggagttttacagaggagagaggccagtggcggtgggctgggtatgagaaccacttgaaaaaagcatgcagtttacatagtattttcgcttaactccccgtgcctaaaacctccacctggcaactttcatttaaccgaaaacaaaggacctcgatctcctgtacagccctcactccactggacaggataggcgctcagatggtccttctaagataaggaacagatccctgatttggccactcttggatttcttagctcagaattctgaacacacattcaggtgcatctgccatgtaggatcattctcaggatatgcacatgtcaagttatcactgtcaggtgtgtctaacattacctggattcaaaacccaaccactgctatttacctgctctttgatcttgggcaaattacttaacctctcagtgccttagttccactgtttctaaacaggtatattagggcaatacctcatggaggtgtattaaatgaaacaacctacattaaaaagcacttaacacagtacctggcacatagtgagtgctcagcaaatgttagtaatactattatgttttaataagaatggtgatttttctccacccccatttgaaatgaaaatgattggccatgcagaatcaatattgttttatatccagattttgttatgtttaattttcacaaataccaaccgctattaaaaataaaaaatattaactagactggtttttacaacttgatctctatttatactgtatataatctgcaagtgattagatttcatttttattactcttgttaaactacaacatgcttcgttatctctccctgggtgtggcttacacccagaactcctgctggctttgttcagtatgctttctgttgttactttagtttcagtaatcattgtgaatgagactgtgagaaacttggcttgttcagaagatactgtgcataagacatgaggtaagtcattaatttcttagcgttttaaagagtcataagtcttttcaaaaatgggggaaggaggaaggtcaacaaatgactaggatttaactcaaatgattaaaaggacaggatgttcctcttttt

SEQ ID NO: 5958 - DNA, 2300 bp, Homo sapien
atggagtcagttgttttggacaatgcaaattaaaaacaaacaaaaacactttgtagtcagtttctggatatgttgggagcaattcattcattaaatcgtgtattcattttttaaagtatccgttaagtgcctttatataagagactgtgctgagcactttgggaagaggtaaagaaatgcattcaatttgcggggaggggatgtgggggaatgctttgaattatacaaataatcaccattttattcattgttcaatactacctggtagatgaaataaaaagccctccttgcagagaagcaaggaaaacaaaaacagatgaaggaaactgggcaactaatttcttttaattctctccctgtaggaggcattaaaaaaaaaaattgaggccgggtgcggtggctcacgcctgtaatcccagcactttgggaggccgagacaggcggatcacaaggtcaggagatcgagaccatcctggctaacactgtgaaaccctgtctctactaaaaatacataaaattagctgggtgtggtggcatgcgcctgtagtcccaggctgaggcaggagaatcgcctgaacctggcaggcagagattgcagtgagtcgactaatttttgtatttttagtagagacagggtttcaccatgttggccaggatggtcttgatctcttgacctcgtgacctgcctgcctcagcctcccaaagtgctgggattacaggcatgagccaccatgaccggccagaccctgggaaatttcaatccaacttcctcactttacaaaatagggaactaagaaccaaataaggttatttacttgttcaagatcacacaggtacatcattaacaaaagctgtgcaaagaaaattaaaggcagaatatttcctttatttctttctattcatattttgagatcacacctcttcatttacttatagagaaaaaaacataactggtaagtgcttaaatcaagtaatataaagataaaatgtaaggttataatgcagattctcaggtggacacgacacattttaatagtgtaaatagcagattcatatgcacttagagtcagtcaatccacttgtgtttcttaattttgctgacctttgaattgccactgaaatagcattaatactgtgctattatccaaaaattattttagatatattttgttttttctatacataatactgtaattttattttatttttttttgagatggagtcttgctctgtcacccaggctggagtgcagtggcgcgatcttggctcactgcaagctccgcctcccgggttcaagcaattctctgcctcagcctcctaagtagctgggattacaggcgcctgccaccacgcccggctaatttttgtatttttagtagagacgggatttcaccatcttggccaggctggtcttgaactcctgacctcgtgatctacctgcctcagcctcccaaagtgctgggattacaggcgtgagccaccacgcccggcaatattgtgattttttatatcacatgagcacacattgaaacctgtcaacaatatattttctaatactggtattcactgaagttccaagtatgcttataggtaggacttgaatccattgcttctagtcacataaacgagttttaattcatttttctttttattcttatattaaatactaaatagctttcctttatatagttattattttagtacgatgttgaatattagcacaaatattaaattaaattaaatattagcacaaattactaatcagtttcaaggcatacaactttattttgccattaccccaatgtttgaaattagcagggctctttaaaactggtgcttctagcatttcattgacttacactaaaatcattgcctccattcctcaaccacccagttaattttaaccttgacctcccacagctgtactcatttactcagtccacaaaactccctgattccatcctctctgcctcttatgaagcaatactagagaggaaaaacaaaacccattcctttaagaaagattccgcctcctctcataagcaagcgcctaatggtaattgtagagtttactaagtcaaacacttactactcagcattgagagaagctgctgctgctaatgctgctgctgctgctgccgccgccgccgctgctgctgctgctgttggtctgaggctgcagtaggtttctgtgcagcattgcagaatccacacctagagaacagaagacacagacacgtacgtctactacccttgttagaaggaagctttggatcttcggtgggtaaggagatctatct

SEQ ID NO: 5959 - DNA, 2300 bp, Homo sapien
cctgtacgccgagccctgtgcagcaggaagcggcgacacctgggatgccgacgcctctggcgcttgctctgtgttttaaaaaatctaatttaaacccctcttctttccctcccgcccctcacactggcgaccgttacgggctggcggctcgcgctctggcgggactagccgagcgcccctcgagcgtcccttggtcccgccccctaacgccccgcccctaggtccccaagcgccccccccggtcacgcccccaaggtccgcccctcgcagccccctacgcctctggccccgcctcttgggctccgaagcctcccggccccgcctcctcaagacctcgcctctggcagccccgagctctctctggccccgccccgagcgcccctcgggagtcctggtcccgcccccgcagccccctccgcgccctcaagctctaagtccgtgaagccgcagcggtgggggcctgcaggcccggcagccgggagggcctggttcggggcggctgcctggcgccttttcaacgtcctcttctgactgtgcagctcgaatccgcggcgtccccggagggccagagggggaaacgaccccgatagaaacccgaccgcgaaggggaggaggggcgcctcggaaatgtctcccgccctaaatgagcgagccccctactcctactcccgaggctgagccgccgctttgagtcagcctcggccgcccacgctggctgctggggctgtaggaggccactgcaaaggttcaacctccgcacgccccccgtggggcctggactttgctctcagcacagctgccttcgcgggcgcctagtccccacaacccctgcttcacctccacatagggggaggacaggggctctcgcttctgcttcatttggacccctcgagagtcttcactcccgctttggctcccggcctctgaaccttatgagagctcacttctttgaggcgaaaagtcgaggcatcgccaagaaccttcaaaatgaatgcggggccgggcaaactttgcaacacgcaattgcagggctgtggatccatccacaggtgacaccgggcctcccacccccctcgcccagacatgtttctcatcccaacctattcttgaaatagacctcccagcggtgcacacttttctctgccacccacgacttccacgtccctcctgcaccagtacacttgcaagcacacccctccgagcgccattctaatgattcatggtcccttgggccaaccccaccctaacacacacaacaaacttcgttccccacccttatcccccttcgtttccaaggcactggcgacaatccacttcatttcctttcctcatctgcagactcgtccccctcaaatacctcacgccatccgcctcatcttcatcccccccctcctccctaaaaatgtgctaattaaaatgtagtttcctcttcccacatatgaagtgtggaaaatgaatcttgtcttgacacaaactgtgatgcatttatcgttttctctctccactggactaaggctgtagaaattttagtctaccaccatctcccatttgctcaaaaaatccaaccatgccttattatttttaaatactcttaacgaatcgtggggaaggctgcctagtttgaggaagaaaattgtttagaaaatgctcagcctgacattttatttggtatttaaaaatatctgcagtatttgagagagatattgggagtggctggatattttcttgcatttaaaaagcaaaaaaatgaaaagctttgcatgcatcaaggttagcctttttatgaatagcaaaaaaagtatcctaagggcacctatcagaatatagtcctcactatattttgctagtcgcaaatctggacacccccaccaccaccaaaggaagacaaattaacataatccattttaagcatgtctgatgaacagtcttttccatgatcattccttttctcacagtttctggacaaaatagctagatagatctccttacccaccgaagatccaaagcttccttctaacaagggtagtagacgtacgtgtctgtgtcttctgttctctaggtgtggattctgcaatgctgcacagaaacctactgcagcctcagaccaacagcagcagcagcagcggcggcggcggcagcagcagcagcagcattagcagcagcagcttctctcaatgctgagtagtaagtgtttgacttagtaaactctacaattaccattaggcgcttgcttatgagaggaggcggaatctttcttaaaggaatgggttttgtttttcctctctagtattgcttcataa

SEQ ID NO: 5960 - DNA, 2300 bp, Homo sapien
actagagaggaaaaacaaaacccattcctttaagaaagattccgcctcctctcataagcaagcgcctaatggtaattgtagagtttactaagtcaaacacttactactcagcattgagagaagctgctgctgctaatgctgctgctgctgctgccgccgccgccgctgctgctgctgctgttggtctgaggctgcagtaggtttctgtgcagcattgcagaatccacacctagagaacagaagacacagacacgtacgtctactacccttgttagaaggaagctttggatcttcggtgggtaaggagatctatctagctattttgtccagaaactgtgagaaaaggaatgatcatggaaaagactgttcatcagacatgcttaaaatggattatgttaatttgtcttcctttggtggtggtgggggtgtccagatttgcgactagcaaaatatagtgaggactatattctgataggtgcccttaggatactttttttgctattcataaaaaggctaaccttgatgcatgcaaagcttttcatttttttgctttttaaatgcaagaaaatatccagccactcccaatatctctctcaaatactgcagatatttttaaataccaaataaaatgtcaggctgagcattttctaaacaattttcttcctcaaactaggcagccttccccacgattcgttaagagtatttaaaaataataaggcatggttggattttttgagcaaatgggagatggtggtagactaaaatttctacagccttagtccagtggagagagaaaacgataaatgcatcacagtttgtgtcaagacaagattcattttccacacttcatatgtgggaagaggaaactacattttaattagcacatttttagggaggaggggggggatgaagatgaggcggatggcgtgaggtatttgagggggacgagtctgcagatgaggaaaggaaatgaagtggattgtcgccagtgccttggaaacgaagggggataagggtggggaacgaagtttgttgtgtgtgttagggtggggttggcccaagggaccatgaatcattagaatggcgctcggaggggtgtgcttgcaagtgtactggtgcaggagggacgtggaagtcgtgggtggcagagaaaagtgtgcaccgctgggaggtctatttcaagaataggttgggatgagaaacatgtctgggcgaggggggtgggaggcccggtgtcacctgtggatggatccacagccctgcaattgcgtgttgcaaagtttgcccggccccgcattcattttgaaggttcttggcgatgcctcgacttttcgcctcaaagaagtgagctctcataaggttcagaggccgggagccaaagcgggagtgaagactctcgaggggtccaaatgaagcagaagcgagagcccctgtcctccccctatgtggaggtgaagcaggggttgtggggactaggcgcccgcgaaggcagctgtgctgagagcaaagtccaggccccacggggggcgtgcggaggttgaacctttgcagtggcctcctacagccccagcagccagcgtgggcggccgaggctgactcaaagcggcggctcagcctcgggagtaggagtagggggctcgctcatttagggcgggagacatttccgaggcgcccctcctccccttcgcggtcgggtttctatcggggtcgtttccccctctggccctccggggacgccgcggattcgagctgcacagtcagaagaggacgttgaaaaggcgccaggcagccgccccgaaccaggccctcccggctgccgggcctgcaggcccccaccgctgcggcttcacggacttagagcttgagggcgcggagggggctgcgggggcgggaccaggactcccgaggggcgctcggggcggggccagagagagctcggggctgccagaggcgaggtcttgaggaggcggggccgggaggcttcggagcccaagaggcggggccagaggcgtagggggctgcgaggggcggaccttgggggcgtgaccggggggggcgcttggggacctaggggcggggcgttagggggcgggaccaagggacgctcgaggggcgctcggctagtcccgccagagcgcgagccgccagcccgtaacggtcgccagtgtgaggggcgggagggaaagaagaggggtttaaattagattttttaaaacacagagcaagcgccagaggcgtcggcatcccaggtgtcgccgcttcctgctgcacagggctcggcgtacaggtccctccctcct

SEQ ID NO: 5961 - DNA, 2300 bp, Homo sapien
ttattttggctttggtcagatccgtggcccagcttgaagattcccactgggctttctgaaactcgcagacctatgagagatggaacagggataaataaataattacaaaacacccttcccccaccatggcactcatgcatgcgtgtgcctgtcttggtggtgcatgtatgttgcagtactatacatctgacccatgccaccaatgggcaattaaagagaaagcaaggttttctctgggcttagctggttcattgtctcagtaccatctttcatttggggcaagagagatcagagctgtttcacacaagggccagtttttgcaaaatggcattggagaaagcttgtttgaaactgtgcatacatgaggtcttcctaacatttttagatgtttacaggcatttcaacacgaataactcaggttgtggttctcacagaagcaaaaaatcagtaattgttctaataatggaagataaactttttttttttttttttttgagacggagtctggctctgtcgcccaggctggagtgcagtggcgctatctcggctcactacaagctccgcctcccgggttcacgccattctcctgcctcagcctccggagtagctgggattacaggcatgcgccaccacgcccggctaattttgtatttttggtagagacagcgtttctctatgttggtcaggctggtcgcgaactcccaacctcaggtgatctgcccgctttggcctcccaaagtgctgggattacaggcgtgagccactgcgtccggccatcaagagtttttatgacaatgtgtatgaagctgcctttgagtagggtggctgcatcgcacacctccagggggcagcattgtctttgtcctctatataaatggttcccctggaggaaaactccaggtgaccttgcaaagtaaccatatttagatgggcttgtcatagagatattttccaaggaagtgcagaagagtcttgttcactacatcttgttcctttcttagatacaagttacatcagaataggggactcaggctcttgcctgggtctggattggaagaaaaagagcttaccatgggccagagtgtgctaagtcagatacaatacacaagcatcttatcacacatttcaatgatgtggaaacttaggccaagagaggttaagggacttgtccaagctcacacagtctgtatgcagcagagctgggatttgaaccctttcctatggcaccctagagcagccttcaatcatcccctgacacctccagtacttcccagggctggaaagcatccatgattgcggacagcagtggcagtgaaacaatgtcagctggggtaggggttttcagaggcaaaaggtggaattcagctggggaggggggtggttcctgagctgccacttctgcctctcaaattaaagggagccaggtgtggaggcatcctggtgtgagctttgcacagctgaaccaaggctgggcagaggagtgtggagagggatgctgacatctcctcccacttctggaaaataactttgcatttgaagggagaaaggcatgagtaaatctgtaactcggatttggacggcctgggatttcatttgactgtgtgaaggcacacacaggtgcctcgcaagtgtgtgcgtgattacgtatgtatgtgtgtctgtgagtaggagtgtttgtgttgggggtggggggatcttctggttacacactggttcccttcttcccatttggattggggagcttttatttatttatttttaagtcatagcagccaccatgtatggggacctaactatgtgccaggcattgtgctggacactttctgaggcattatttttctgtgaaaaaagtagtttgtttttatgcaggtgcacccagagacatcaggtatttttttccattccggttaaaagacagtgttctactctgtggtaagccttggggagaggcagggaagcctgcggggacgggcaggggcggtccctgcctcgctcgctagtctccaccttttattttgaccggtccgatggcgacaggctcgcactaggacccaggcgccagagtgcctccgtctgtcctgtaggttcattcaatctcccatacacacagactcacagcgagaccgacacacactcccatacactcacacacacaactgcaggcagcgaggctcgggaagtcaggccggcttttcgccccggcgccttctctgctccagccggccgggtctccctgggggcccggagctcggccgggccgcgcagccccgttagaggacgagctcggcggacccccgctc

SEQ ID NO: 5962 - DNA, 2300 bp, Homo sapien
tcgcccacttgggcgacccctgttgcgagctcggcccgtcccccccccgcccaacatacacatccagcccttggcagtaaagccgatgacaccggagaaaggacacgcacgcacaaagctgctaaagatgtaacaaagacgggcgagggggagaggggcctgtcggtgcgtcggtctgtcctctccggcgggctggggctgggaggatggcccagcggaggagcgggggagtgttgttgtttgctgacaactgagccgagagctcatctctttgaggtcgcttttcttccttttttttttttttttttccggagccttctcaggcagacaagtgttgtttttctgttgctcgttcctgggtggggtggggattagaagccgaaagttggaaaccataggcagagctcagaggttccagaaagaaaacacacagacacacactacaacaataacaaccaaacagctctccacggcgtgggctcggctctgtctctctctctccctcctacttcgcctttttccttccctctagcagcaggactgggctcaggccatcacgtctacggacacagtccccctgcacgtccgttgccgtggggtgccaccgccgcccccccccccccaaagaaggaggccggcggggccaagcaacgccagcagctcgccccggacacgccgtcctgagcccgggaaacttggccgtggggacgcggctagaaggaaactttgggatctttgagaaacaatagttggggaagaaggtgtgggctgttctgtgctttttctttattttccgggagacggctcttgagtgagcgcacagggcaagcaaggcaaacgccttcctggtcgatttctactccccccacccgcccacccccagattcacgtggatagtagtgcgtgggtgggggtgtgctgggaaccccaccctggcctggcttcttttttgtatttatttgtttcatttttgcccctaccagccaggtcacccagctttccccaggcagtcgactcagcgccctaacgggggcacgcgtgtgcagcgtatccagcaccgtcctcagaataatagctgtgaaaaggaggaagggaactaggcagacagaccgacagatagggggaaaccgggatgtttaatgtgtccgaacaagtaggaagatcaatgaggcgcgagtgtgtgtgtgtacgtgtgcgcgtgtgtgtgtgagagagagagaaagaaagaagaaaggtcccgattgcaacgtgtcagatcttgcaaccttccccccacccaacacaacaaccctcagacacaaaaacaccattgctgactgataccccaggtcttcagggttaaaggaaccgtgtgttggcagcgcaattgtgcagacgctgtaaggccaaaacgaggatttgtgttgtgaggtcggtggtgcgttcttttctttctcttctcgcctgttttcccggagtgcctgggttgcgagaaaggcgcatcgcaggctgtgcagccgaatcgcttcgcaattattcatgctggtcggagggggatggggcgcgggaagctatgtgtgcatttgtctggagggtagtttctgaaaagccagagctggtggggagctgggtgaagacgtggttttgtttggtgtgtttgcttttgttgcaggggggaggggcgcgatttcttcagctacccccatccccggctaccagttctctggagtctgtcccgtggcgttggctctgactaggggtacaccccatgagggcacgttggcagtgtgtggcaaacctggcttgcccccctaccccagccaccccccctcaccagcgaggtgtatggaggaggcggtcggagattcctcagcgtcccgccccccacttcgcacccgcagacaatcggagacctccccctgccccaccccccaccccccaccccgccgccctggccgccgccacctcgttgtttaccccgtgccggggctccggcgtggccaccagtcacgtaagcagagagccgggcgcgccgggcttgggctgccccgcgcggggcgggcccgtggcggcgtaaccgggctccagaggctggtgaagccgaggggcttcctcccagcccatcgcccgaggcgtccgccctgcaaatctgccagcccccgagaggggtttggaaccttagcacccaagtctaagtcaacttcatgtgcgtaataagtccctcggccccgcagcccccctcctccggccggctcccggcgggagtatttttagctctcttgcttcttttcgccgctgctgtttggctctaaatgacgtga

SEQ ID NO: 5963 - DNA, 2300 bp, Homo sapien
tcttaaatgtggtgccaagtgtaatatttaaaaggactggcagaattttgcagcttgtgacctcactggagattttgttcactttaccaaaaaaaaagaaaagaaaaaagaaaacaaaaggtatgagggaaaggtaagaaaacaaaaggtatgagggaaaggtatattaaaatgcagcatgaagccgataacatttttaagagggtaagatttccatctcaagatggtattttctgcaggagccaatggaatgaccacgggagggggaaactcccccctcaccaggagcttcctgttattttggatgtgatgtcaagcagcaggttaatataattggggtggaaaaaagttatgggtatgtttgcacggttcccagcttgttcctagagcattcaagtacgattctcttgttcttcctctccctagatcccttgttcccaactgggggacaggggagggattttgtgccccaggagatatttggcaatgtctagaggcatttttggttgtcacacctgaggggtggtggtgtgctactggcatctagtgggtagaggccagggatgctcctaaacatcctgcaaagcacggaacagagctcctgctccaaggaggaattacccagatcaaaatgtcaatgatgctaaagttgagaaaccctggtctagactttgaggattttttaggtggaggacttagaaagagagtggccatgaatgagcagtcagtggctttttttttttttttttttctttgagactgagtcttgctctgttgcccaggctggaggccggagtgcagtggcgtgatctcggctcactgcaacctccgcctcccgggttcaagcgattctcgtgcctcagcctcccgagtagcttggattacaggcacccgccaccatgcccggctaatttttgtatttttagtagagacagggtttcaccatgttggcaaagctggtctcgaactcctgacctcaggtgatccgcccacctcagcctcccaaagtgctgggattacaggcgtgagccactgtgcccggccagtggtagtcttttaatgtggtctccgctctctaacttcctttttagctacagaggagagcataagagaaaacatcatcatcgcttctatttactgagtgcctagtatatactaagtgctggaattattatatttaatctttgcaaaaagcactactgaatacacaaacctcgagagcaggtctgcgtccgtttctctcttactatgcaaactaagtctagtacagtgcctggcacatggcacgccctcaacgccgtggatatgatcatatccattttatacataaggaaaatgaggctggaagagttcacacaggtctcagtgtaagtagcagagtcaggatttgaaccaaactgttccgcaccagggagaattttctggcgtctaaaagcactagtgaggagaggagaaagttttaaaaagtaagattaaagaaaaaagtaactacttgtctgtgtggaagctgaggtggaagaagggcttcatggaaaccctctctgatgaaatcatccctcgtttttgaacagcaattttggcttttccagtttctgtgtgcgctgttggtgcaggtgtgttactcttcttattttgcagatgagcaaactgaggcacataagttacatgagaaagtaggagatagaggactggaacatgatacttcgaataaagaatgtctcagcccctgggcaaccgcagggagtcgctgagaaacaagtttccccgggagtagactcccagctcgctcaaatccttcccattccacatcgtgtctggagggaggaaaaaaaaattcttccctcccagaagcaaagtcccgcaacttcttagtcttccctagagacaggaaaggaaacccagcgggactacaccttccgacgacctttgcgaatcttgcggaacgcaggcgccctgaaacggcgtgtgcactacgattcccggcagccgcgggcgggtgcgggactacatttcccagggggcagaggcaggggcgggagggggcgggccccggcgctgctcccgcccctcccccgtgctcgcggggagaggtaaacaaaccacgcgcgggctgcccgcggcacggcgggcgcggctggcgcggctggggcggcaggggcggcggagagcgcgccgagccgcggccgagctggcccgcccgcccgtcgcacatgttccggaacggcgcccggccgtagccgcctgcggcgcctcctgtcggcccgagaagggagtgcggagaggcgccggtcgccacccgc

SEQ ID NO: 5964 - DNA, 2300 bp, Homo sapien
tgagcaaactgaggcacataagttacatgagaaagtaggagatagaggactggaacatgatacttcgaataaagaatgtctcagcccctgggcaaccgcagggagtcgctgagaaacaagtttccccgggagtagactcccagctcgctcaaatccttcccattccacatcgtgtctggagggaggaaaaaaaaattcttccctcccagaagcaaagtcccgcaacttcttagtcttccctagagacaggaaaggaaacccagcgggactacaccttccgacgacctttgcgaatcttgcggaacgcaggcgccctgaaacggcgtgtgcactacgattcccggcagccgcgggcgggtgcgggactacatttcccagggggcagaggcaggggcgggagggggcgggccccggcgctgctcccgcccctcccccgtgctcgcggggagaggtaaacaaaccacgcgcgggctgcccgcggcacggcgggcgcggctggcgcggctggggcggcaggggcggcggagagcgcgccgagccgcggccgagctggcccgcccgcccgtcgcacatgttccggaacggcgcccggccgtagccgcctgcggcgcctcctgtcggcccgagaagggagtgcggagaggcgccggtcgccacccgcggtgcccatggagcgggtgaagatgatcaacgtgcagcgtctgctggaggctgccgagtttttggagcgccgggagcgaggtaatggctgggcgccgctgcgtgagcccgagcgctactaatctttttcggcagtgcggtgcggccggtaagggagggcacgcgtgtgaggtgcgcgcatgaggtgaggtgtgcgcgcatgtgaggggaggggtgtgcgcgcgtgagggtagaggagcgcgcgtgtgtggggaggggcgtgtggggaggggagcgcgcgtgaggggaggggcgtgtgagggaggggtgcgcacgcgtgaggggagcgcgcgtgtgaggggaggggcgtgtgagggaggggtgcgcgcgtgtgaggggaggggcgtgtgagggaggggacgcgcgtgtgaggaggggcgtgtgggtaggggagcaggcgtgtaaggggggcgtgtgaggagcgcgcgcgtgaggggaggggcgagtgaaggaggggagcgcgcttgtgatgggaggggcatgtggggaagggagcgcgcgtgtgggaggggcgcacgcgtgaggggaggggcgtatgagggaaggggagcgcgcgtgaggggaggggcgtgcacatgtgaggggaggagtgtgtgaggggaggggagcatgtgaggggaggggagctcgcctgtgagggaggggtgcgcgcgtgtgagggaggggtgcgcgcgtgtgaggggaggggcgtgtgaggggaggggagcgcgcgcgtgaggggaggggcgcgcgggtgtgaggggaggggcgcgcgcgtgtgtgtgaggggaggggtgagcgcatgtgaggggaggggtgcgagcatgtgaggggaggggcgtacgcgtgtggggaggggcgtgtgaggggagggccatgcgtgtgtgtgagggcaggggtgcgcacgttaggggaggggcgtgtgaggagaggggcacgcgcgtgtgtggggagggtcgcgcgtgtgcggggagggtcgcgcgtgtgtgaggggtgcgcgcgtgggagggatggtgcgcgggggggaggggcgtgtgcgggaagggcgtgcgcgtgtgggaggggcgtgcgcgtgtgggaggggcgggtgcggggaggggcgcgcgtgcgtggggaggtgtgtgtgctgagatcgtgagtggaggcgtgtgtgagaggtcgcgcaggtgctgggggaggtgcgagggtgcgcacggagggtggggctgtgggtgtgcggcgagcgggaaggagacgggtggagggaagttggagagagggcggtctggggctggagagagggtgaccgtggagaagcttggagggccccggagcgggagagggtgctgggagataagaggaaggaggaacacggatgctggggggggtcaggggaagggacgaggccgggagaacactgagcgggggaaaaccggtggagaggggcctttgaatacctgcggggtgatgagatggggtccctttagcggtggcagcccaaggggctgtagagatggcgcagaaagaccaggaactcggagactgtggtgtcgagagagaaaatgtctttctaagacttgttcgaagtacacaaaaatattgggcttaaagagactctttagaacagagagagttgaaagtaa

SEQ ID NO: 5965 - DNA, 2300 bp, Homo sapien
ttggagcctttacattttatttatttactgtctttcaataaaataaatatcacgtttcaaaactaaaggtttaagatacttttttttaaataaacatgattaagtttgaatgcaaatgttttaagaaaaatcagacactgaaagtaaattttgacacttcaaaggaaatagtaattcagaaagcctatttgaagtattgctcttagttttgtctgctccagttttgtctggagcaacaccgcatacaattgtgaaaattaaatgaacctgtgtaaagtgcttagaatggtatctggcacatacaaactgttatttctttgtgaaaattaaaattcaatatagcttttctttataaatgaatgttgcatagataaaaacaatcctaaaaacaatcctgaaaaaattattaagatggtatagaaatctatgatggaacttataatgaatatttgcctattttctgatctatggggttcaggaaaagttctcatttaagagatttttacacaataaggttgactttatattcaaggaagttcctcctcgcatcggttcttaaaacacacaattacaataacagaagttctctaaaactacattttattttaaacgaatatttatttaaaagcacatgctttctgttttgtctgccttcttaattctagctacacactgctgccctctgctgcaatttcaatctttcacactcacaaacccgacctagtttccatctatacaggttatctgactcactgcaagggttatgtgtgtgtgtgtagagaacaaaagggaaggctccttgaaaagaaaactaggaactaaagatgttggcacagttcaaaagagcccatctgagaagtgggcctttttttttttttttgagacggagtttcactcttgctgcccaggctggagtgcaatggcacgatctcggctcaccgcaaccgccgcctccaggttcaagcgattctcctgcctcagccacccgagcagctgggattacaggaatgcaccaacatgctcggctttttgttgttgttgttgttgttggttttttttttttgtatttttagtagagacggggtttctccacgtggtcgagctggtctcgaactcctgacctcaggtgatccgcgagaagtgggcctttttatggatccagcaacaaactcccaacctcccaggaaaggttgcttcctgtcatctatataaaactttgtgtctcaggcctttattgcttttttaattgaaataaattatatatatatggtttaaaaaaaaaagaaaaggaaaaagggtaaacagcaaagagggtaatcaataaaacatttggcttccactccaaacctctgaacagttttgtgtatccgtccagaaagcgtatatattattacaaacatacacaaggggcatttctttttgaacacaaatgtgagtattcctaccactctttaccattctagactaacttggacgttgttccctatcaggcgagattaacccaactaaattaaaaccaagtaggttttaacaaaacagattttaaagaaatcaatcttctctccaataggttatttctgtcacgatttaattagctttctgttactactaaggcttgtatcatataaagtagtggttctcaggctgggcgcggtggctcacgcctgtaatcctagcattttgggatgccgatgcaggaggatagcttgagcccaggagctggagaccagccagggcaacgtaaagagagcccccaccaacaccccccgccacccaccaccaccgccccggaaaagcagtggttctcaaacgtcagcggacattggtatcatctggtgagcttattaaaacaagagtctctggattcaggaggtctggggtggggcttgagaatttgcatttccaataaattccaagccggaactccaggaagataacctgcattccgcgcctggcgaagcccagctacgccatttccttcctaggccccgcctacttcgtgtccctgacagccagggactggctagagggcgcgcggagtcacgtgagtcgagcgacctcgcgcgagagtttgtatttctcgcgagacttcaccgtctctgtcttttcctccttccagtgcccggcgttcctcccttccccctcgccgccgaccgagttcttccttttcagaccgggtcgccttgctgtcgtcgcggtgattttcctgctactgctactgctgctgctgccaccgccactaccactgggctcatttgccccgaccccttcccgccgccccgcccccagccccacacaag

SEQ ID NO: 5966 - DNA, 2300 bp, Homo sapien
ctcacttcctcaatgtgctcccattcctatggcctccccatagctgctgtcactgccaagttctggcaagtccatatcagctcatgtctagattacccatgaaatcctcccatccatcccccagactccggaccccaccaccactctcaaataaagcaccgatcccgcacagagccgcctcagcgatgttcccaaatgctatccggatcttgtcactgagtaagatccctcgttggggactgcccggccaaagactaagacccaaatgactcaaaacagcacaaggccctctgttgcctgaccctgcttaatctgctaataaataccagaagggccttagtctcccacatacctccagtacgcaccatgctgggggggttgcgttttttgttttctttaccccaagcagtttcctctgcctggaatctcccctcctgcttcgcagcctggcttacaattcattcctcggagttggcctcagctctcctctcctcgggaggccttctccagcccacgccccaccctgccacacccctactgggcgctcttccccacggactacaggccttccccttccctctgggctgggggcagctggggctgagtataagtcttactcacgttggtgccgccagccccaaaacaaagcctggcccacgtgggtgctccgcgtatgtgtgtggctctaggcggagatgccgggggtggaaagagccggtaacagaaacagaacgtgctagaggaagagcagcctgcagggaaggctggcacagataaccacaaaaagaaagaaggcccccgcatcacgtcttcaccaagaccccactggcaaggcgaggacagcgcctttgggtggatgcatctgtgacccagaggcaatgctggctgtcctggtgtctgatttgattgcatctgatttcaaaatttgatctctgcttccttctgaaaacctcattcccttatgtcagttgtcaacaagcccttgtctagtgcgggcagactgttttccatcaagcagtcccagccaggctaacaataaaatggttggcagtgagcttgggggcagaaacctgtttccatccatgtgtccccgcagctagcaaagccctggcacacggctgaccctcaataaatgcttgctgaatgggtgaattgtgtctgcttccccaggaataggggtgggaggcctgaagcccctggggaccggtgggggcagacagcctgagattaaacttgatccatagataatcccccaaatccagaagccacctggacaacagttggctgaactgagctccatcgtgggatacatgctgatggtactgctgagttcaccaagggtctccccgggaccagaaaacagctcctcaaaatacaacttattattctaatcattattggagagtgacagagaaaagagcgtcaatcctttgagggcagaatccatttaggaagattaaatggctattctcaccgccgacccccaacccccgtttttacttttacaaactttattatgaaaaatatcaaacatacagaaaagtggagaaaacagtataacgaatccggccacccatcacccagcctcagcgatgaccaacccgcgcctgacctctccagtcatctataccccacccctcgaggcaaatctccgacgtcctctccttacacgcgcagacctcggtagcgacgggaatccgttccggactcctctggggccctggccggctccctcggccctgctcagcgcggcgcgggcgggttctcagcccacgtccgtgaagctgaaggccggatcgtgcggcgccgccccgccccccacggcgcttcctcctcggtccgcaccgcgagggtcaccgcggccccggagcgcctgggacactcgaccggcagccgcgggtgatgcgcgagtgagtccctcagcgaagcgcggaagagagaacgaagaggcgccttccacttcctctcgctctaacgccggcacccgccccgcgcgtccctcgcccccgctgccccgccccctgcagggcgtggccacggcccgaggggcggggaaacacccatatttggccttatatgggcagccgcgtcacggacggcactcattcacataaaacgctgcgcggccggcggaatccccggcttctagggcggcgagcggccgggctggctatcgagcgagcggggcgggaacgcggagttgcgccgccgctcgggcgccgggctccgtcgcggccgcagccccgcgggtcgccctcccgtgcctcgcccgcggacaccctggccgtggacaccctggc

SEQ ID NO: 5967 - DNA, 2300 bp, Homo sapien
ttttatagactaggaagtggaggcttagaatttttttttttgagacagagtctcgctccatcacccaggctggagtgcagtgtcagtctcggctcactgcaacctctgcctcctgggttcaagtgattctcctgcctcagcttcctgagtagctgagattacaggcgtctgcaccacgcccagctaatttttgtatttttagtagagacggagttttgccatgctgagcctccacttcctagtctataaaatgaagatgataaaactccatcatatttagaattacaaacaggatgtataagataatcctatctgccacgttggccagactgttctgaaactcctgacctcaagtgatccacccacctgggcctcccaaagtgctgggattacaggcgtgaaccaccatacctgtcctaagctttaaataatacaactaaaatctagaagtaaaatgtttagattgagtgcagtggctcattcctgtaatcccagcatttagggaggcagaggtgggaggatcgcttgaggccagaagttagagaccagcctgggcaacataaggagacctggtctctacaaaaacaaaaaaaagctgggcttggtggccacagcctgtaggctgaggtgggaggatggcttgaacccaggagtttgaggctgcagtgaaccatgaccgagccactatgctccagctccaccctgggtgacagagcaagatcctgtcaaaaaaaaaaaaaaaagttagaaataaagaaaagaaaatgcttacatatttatttaatttattttgagacagtctcgctctgttgcccaggctggagtgcagtggcgcgatcttggctcactgcaacctctgcctcctggattcaagcaattctcctgccccagcctcccgactaactgggattacaggcacccgccacgacgcccagctaatttttgtatttcgagtagagacgggggtttcgccatgctggccaggctggtcttgaactcgtgacctcaggtgatcctcccccctcagcctcccaaagtgctgggattacacgcttgagccactcgaccaggcctatttatttttttaaaccaagggctggataggatttgatccgggctccagataaaggactcctagggagataccctggttagcagaggcagttaggaggctactaaaaatagttcaatctagaaataattagggccagaattgtctccagcagcgggcgggggtggggctggggatgatttgggtagttattttgttctcttcccagcaagtaatttcagagcagcccagagattcattttctaaacaaatgatgtttttctcccaagactgacaaggatcagacagacctagggttgccactagcacctagtatctttcaggctgttttcttttgtttttaaagtggattaaaagctttcagccttacctaaatctttgttgcaattgtacagatctgcctagatttatagcagatggtagaacagaaacagttcccgacggaattaatcatcacattattaaaacaaattttcgagcattgacaaatcccttcggggttgtcctccgagtgggcaattcgtaaccagcttggggcgtgctaagattgtaaacgttcctatggagagcgataacaaaggggcagcagtgactccgcacacagaattccaagaatcaccagcattccatgtgttccaaggctagcacagtgcgcgcgaggtccgcttttttaaacagcgcggaatcacgtggccgacagcccgcggcgctactggccctcggagtctccctcttggctttggcgcggaacctttccccctttgtggacgcgaccattggccccgcgctcggaggtggtacggaccaaccctacggtcatagattttccgagtgaagcttttgactaagtctcaggaaagcgttagctacagaattctagattcaaaagaaatccaccaaaaaacgctgtggaggactggttttgcctaaaagaaagagcagacctgaacttgactcctcctacgccctgtgaaggctgcaaggtggttccgtccgaggcgcggactccgcccccacgagcgccgccattttgtttggctgaggggagcgagcggcgctttgggggaggggtcgcgtaggcgcctcacctgaccctgcggccgtgcggttgctgctccggggcaggtctccttccaggccaggggcccggaatcatgtacataaagcaggtaaggccttcgcgtccctccaccccgtcatgggccggtaagggccgctccttgaggcg

SEQ ID NO: 5968 - DNA, 2300 bp, Homo sapien
acagaaaggtgtgagggcactctgactgtgccctttctacctataagtgtcctgaatgatttttttcatagccaagatgactctgttggggaaatgtcaccgtgatggttaaccctggggtcttggccggcccaagtcagttcaagttttgttgcttctactctgcaaaaaatacccagtttgccaggtatttctgccccctaaagacatcgggccaggcttcaagacatttctctgcctccatttgtctgtgtgactgtgagcaaattacttaacctctctgaacctcagttttctaatctataaaacgaagatgctgatagcagctgcctccaagggattctgggaggataaaggaaatgctgtatgtgaaacctatctgagagctgggacctgcattcaatatcattctttttttcttctccctgtcactgctcactgttgatttggtttgctctgttcttcctttgataaggctggaaaagaggaacaggagggcatggaagaaagccctcaatcagtgggcagacaggagaaagaagcagagttctctgatccggaaaacacaaggacaaagaaggtaaagtttgtttcagattctgcacttctgccatgagggactgagtcacaggagtcccccttttgcctggtgatgtcctgctggatggaatatggctgagaccccaccattagttccatgaatgaaccagtcctcctagcgctactttggaggagtggctgtgcctggaatcttcggacagtttttattgaagcgatctttacccacatgtctgggctctgctcactctccagcaatttggctgtgttcctacgagaaaacatgtgcccaaaaaaagactcaggcttcagagccaggctcccaaaatagacaagtcccttggcggggatggggcgagaagctgctttgggcactcaagctggggccctgacttcagcaggcccagaccctaggattaacaagccatctactgtgcttgtatagattgttttacttaattaaaatgaaaaaatccagttacagttctcctgggctggagctgccacaacaaaaagaaatatccttggaacagggccatcttcgtgcctttccggtcaggagaggcaggagaaatgagtatcgctggcagggaagctgatctcctaaatctgtctgtggagttgggagtccatgggctgctgcagatgccaaggggaaagttctagaaggggcctagtagaagctttggctgtgggagtgtatgtacccctgctgggagagggtgcttggggggaattttgtgaggggctttgctgcagttacatttagtgatgacccagatgcaagaaagatgctccagtaagtatttagagtttataacttcattattcatgcattcaaaaactgtatattgagcacccattatctactggggcttgaaattctttgcgtcactttaaatatggtggattaagcattaagggcctattccaaactttgagcatcaccctaaagatgagttggtgccgtgggacttgagtggttcacagtaattgtaccaggtagaggtaagaatgctcagattcttcctgatttgagtggtccttatggccaagtcttgtgccttccagttgaatgctctcaaccaccctctgacctccattctgcatttttgtacaggaacaagattgggagagtgaaagtgaggcagagggggagagctggtatcccactaacatggaggagctggtgacagtggacgaggttggggaagaagaagattttatcgtggaaccagacatcccagagctggaagaaattgtgcccattgaccagaaagacaaaatttgcccagaaacatgtctgtgtgtgacaaccaccttagacttagacctggcccaggatttccccaaggaaggagtcaaggccgtagggaatggggctgcagaaatcagcctcaagtcacccagagaactgccctctgcttccacaagctgtcccagtgacatggacgtggaaatgcctggcctaaatctggatgctgagcggaagccagctgaaagtgagacaggcctctccctggaggattcagattgctacgagaaggaggcaaagggagtggagagctcagatgttcatccagcccctacagtccagcaaatgtcttcccctaagccagcagaggagagggcccggcagccaagcccatttgtggatgattgcaagaccagggggacccccgaagatggggcttgtgaaggcagccccctggaggagaaagccagcccccccatcgaaactg

SEQ ID NO: 5969 - DNA, 2300 bp, Homo sapien
gaatctttgtaaactcaaatcaaggtgtatttattgcacaggcacaataaatgaacaaggcatcttaagtactacaatgacaggtgagtgggtcaggcacagtggctcacgcctgtaatcccagcactttgggaggccgaggcaggcagatcccttgagctcaggagttcaagagaagcctgggcaacatggcaaaaccccatctctactaaaaatacaaaaaactagctgggtgtggtggcacaggcctgtagtctcagctacttggaaagctgaggtgggaggatggcttgaccccaacaggttgaggctgcagtgagccaagattgcaccactgctctccagcctgggcaacagggcaagaccctgtctcaaaacaacaacaacaacaaaatcacagatgagtaagacacaggtctttccctaaacaaggttacagtctaatgggcagaagggctaggacagggactcagatgaaataatgccaggtagaatgtgatcagtgcccctggaggtgtggcaagccaacactgtgaggaatcagcggcaggaagatcatatcaaatcacgaggctccagaaaaactacgagggtccaggaatggtggctcacgcttgtaatctcaacgctttgggaggcagaggtgggctgattgcttgagcccaggagttcaagaccagcctggacaacatgatgaaaccctgtgtgtacagaaaatacaaaaattagctgggcatagtgagctgtgcctgtagtcccagttactcaggaggctgaggtgagaggatcgttgagctagggaggctgacggaggtcgaggcagcagtgagctgtgatcatgccactgcattctcctgggctaaagggcaagcccctgcctcaattaaataaaacaacaacaacaacaaaataaaaaactaccaggaagggccatgaggcacagaaggattgcatcaggcggagataggagatgagaagagagacatttcaaggtgatatataaagaactaccagggggtgaggaagcatatggggagatgtgtggagacacagcctgaaagtcttgaagtcacatcacggagccttgaatgaccgaccgaggcgctgacactcaagagaggcaatgggaagccagtgaaggtttgtgtgtgtgtgtgtgcgtgtgtgtgcagagaaatagtagcattagagatgattcccaggcagggtgactgggcagccaagggaaagcgctggcctgtgcgggatgaggcagttgggttctggagagcacaagcaatcattcggtgctgcccatcagacaactgaaaaatctgatcagaggcagtggctaagtccccgcctgggaacacaaaggaagcctaaggttctggttatcaccctcaggggaccgtgaccttgaaagagtaaggatagtaccagccaaaaccaatgcagccaagaggaaaagtcacagagaacagcgaggggaggtggaagtttcaatacagaaattgtagccatggctgagaaccccagcactggaggccggaatttgtgcgtttgaacgccagaggcttggctagtcatgattagcaaaggaacttcaaagagttttggagcctgctttatatctgtgaaatgggaattatttccatctcaaaggtttgaggggattcgctgagagaaacttcttagcatgggatctccagaaactggaagccacagagaaagcagcggccagagggaggaggaatcggacaggctgatcacttggagtgttcgcctaagcagtttctagaaatggaggcagggaccatcaggaagctcaaaacctttgcttcagccgagtttgcagaacgccctgtgaggagaatgggtgagctgggtcgaggaagcttcatcctcgtccccatcccccagcactgcccttttcccaacgctcccatcccgccacgcctcccaacatacccccaccccgacttcccgctcaactcccgctccagccagtcccaggagccacatgcgcatgcgccctcccgcgcccctccccaactttccacgtttcactcctctcccttttcctcctcagctccggctccgccgccacgattggccagccgaccacccggcctcggccaataagcgccgccctctcgcccccgtgttactgggtagaagaaaacaaaaacaaacagagcgagaagggccagagactctccgaggcggcggcagagacagaagagcggggtcggggccggctgaccaggaacctgggcgagcagcggcgggggcccgaggggtcagtaccagtaggcgcg

SEQ ID NO: 5970 - DNA, 2300 bp, Homo sapien
actatcatctcttttattaagataaaaacaaagttatcttaataaaaaaaatagtcctgtgtctttaggcaatgataacccgatcaggaactcaagtcatatttgacagcaacaaacacgttttaagagtttagataagacatgttccacgtttttacgctctttaaagtagtaggattttttccaatttatttaacaacccttaattggcccaaacaagaaaatataaagcaaaaaatccaaacgctatttccttcatactaacctacaaaaatgaattttcgatgagaaaactatacatacaagttagaagaaaatgaaggctgacattaaacactgttcttttctccagtgtgttacacgaaatatacaatcagaagtattcaactgccaagacattccctaagagacagaccctccactcccccacgaaatatatacatatgtatttcctgaaatatacctcataaattgctctggcattttggggagtcaagctttggccatttattaactaggattacttgtattcattcttcggctacgaacggctaattagcagcttaaaaccagctaaaagcattctactacagtaatgcaaaagcaagcactacagataatattcaagcggcatttatttttgcagtcctaatattttttcctttcacattagtaccacagaaaaagccagtcaattataattcaaatacacttactgagatattaacgtattcaataagcctataatgaaggaatattaagggcataaataccagtaactccttgcttaaaaagcacttggtggtttcccaaaaaagtcacgttaagaatatcaagattgtaacaattaaagtaaaaatacaagttaaaaacaggggaaacccttttttccccgacacctaatcgcatttctgatcgttttcatcatttgtagacactacacagttgctggctacgtagcgagttctcacaagggggaggggggcgaaattgacgtctgcagacagttttgaagctcttgcaaaaccccatgtacgttacagcatcaaactgacaaatggagaagatggcatgcgtttcacagaaagggggctcccttcccggctttgttttctctgggagattttattttacctaaactaaaaaaaagagaccctttgccggaagacgggcgcgacgaagttcgcgcagggatggggcggcgggcacgtgttcgcctcccagcgcccccggcgaggatagcgcgcggcccctccccacagcggccgggcctgttctcccgcagcgggctcaggctaggacccccgaagtcccagcccgggtcggcccccggaaggggctgggccggggccgaggccggggctccgggttcacgaaggacagggggccgcatcttcagaggattcccagggagggcagggggcggggagggcgcgaatcttcctcacaggatttcagtccagccggaaacacgccttccaatcccggcccccgaattcaacctccgccagagggggaggagggctgagggggaccttcaagggcgagcgcctcgcgcgcccctctcagtggggagatggctccgggagggggcgggcccgcgccgacacgctccaggctgggctcagaaagagggaaccaggccggatgcccgcagtccggggcgttggggagggcgcggctggacctgcggggctacaagaaggcagccggacccccgcaccgcaggcccggacctgacaggaccgcgacccccacgcctccgcccccgccccctcccatcttgcggctgcctccgaggagggatgggggagagggcgcagtcttcccgagcgtgtgagccgcgcctactggtactgacccctcgggcccccgccgctgctcgcccaggttcctggtcagccggccccgaccccgctcttctgtctctgccgccgcctcggagagtctctggcccttctcgctctgtttgtttttgttttcttctacccagtaacacgggggcgagagggcggcgcttattggccgaggccgggtggtcggctggccaatcgtggcggcggagccggagctgaggaggaaaagggagaggagtgaaacgtggaaagttggggaggggcgcgggagggcgcatgcgcatgtggctcctgggactggctggagcgggagttgagcgggaagtcggggtgggggtatgttgggaggcgtggcgggatgggagcgttgggaaaagggcagtgctgggggatggggacgaggatgaagcttcctcgacccagctcacccattctcctcacagg

SEQ ID NO: 5971 - DNA, 2300 bp, Homo sapien
ttctttcagcttttaaatatatgaacactttcataataaaacactggggaaaaaaatcatgtcagaaagacttcacaggggaaacgtaaaacaaagattgagtagcaggcgctcagctgaatttctgataaattgaaggtctctaaaacttggctggaagtgtcttgggcatccaagagacacccgatatattcaaactttcagtaagtatttaccaaaataatatcatgtgcatggtgaaaatgacgggaagacgaatctgatacaaaccattctatttaggtgcagacatggtagtgaagctaaaaacataagcgctattatatatatataacatactgattgtcataaaagatgtacaaaaaatgctaaactcagaggaaattacttcctgctgggaagaatctggaaacacatctccacgggtaacagaatcagatacagaatcacaaaaggtgactgctacaacagatttcagtaattaacagcaaagaaacaagagtagttcattttggctggcgtgtaagtactaaggaagcagaaattaagtcgagaaggtaggtttgcatctgtattgttgactggctggatattaaccattttcaattttacctgaaagttctggtctttttgctgcagctttaagcatccaacccggtattaccaagatgacttagagttcttgactcaagcatacagaagaaactacaagataatgtatgataactttgtaaagggccatataaaagcaatacagtattttcaaaaatcttcaacacgttgtttaagaaactgtagacctgcaggaatcccaccaccagaaccgcagtcaaagcttacaaagactcaaaggagagacgcggaaaggggggaaaaatcagaatgggaaggcaggtggcaggggaaaaagattgaggtcctgccctggtggtaggggctcatcttttccttttataggtgaaggtggaaaatgattttctgaagttcccgaattctcctccctccaaaggccaaggagtgaaagtacttaataggaacttgcggaggcgtggtcaagagctccgttttgccggagttaggagctccgccccgaggtccccgcccattccccgctggggtcctcccggccgggctgcctctggctgggttagggcggcctgtagagcggcctcaccccacagggagcctcacgggggcgggccgccgccaggccagcccggaaaaaaaccgccttccaacggaagcggccctgagccccgctcgccatttcagcgctctgtcccacagggaccgtccggcccgggtccggcccactggttggggtccacggactcacctcactttgcaactaaggtcaaaaataagcattccctggggcacgggcggccaggctattaacacccttccgccatgacccaattcggaagtgccaaatgcaacttccgggcaggagagggaatttcggagccctaaactgttgtccatctccgtaagtgaccagacgtctcagtaaaataagggccaggaaactggacgtgtaatccggagtatgaattaacttgtctaacatgggatgtgtggtcacccacggtacctctttgggcttacttacagatgcatcccttcccagacggctcagctgttgccccgggtaacggtgagactggcgaaggaaaaaaatctacgtcaccctggaaacaggaagccaggaatctccttttgccattatcagttatggccgccttagcttcaacagtaacttccgatcggggagttgtcactctaccctgctggaggcttactctgtagcccggctagccagaggcgcccagtgggcgggagacggcgtagaggaactgaggaaaggacaagggcggagagagagaagctggcggcactgcccgtctctgattgggcagcttctcttgccccggttccgcccatttttcttgcctagcgagtgacgggcccacggcagaggggtggggcggggaggctggagcgagagtagtggcggggcgggcggggcggggcgagtgggggaggggcgggcggggggcggcggttgggcagcgtcgcttcttaggaggaggaggaagaggaggaaggagggcgagcgaggaggatggcggagtcggggctcctgacggtaactcggggccgatgaggcggagggtgtctgttggtcggttcttcctgcctgccttcctgtccgtcgggcagtcgggctggctgtcggtagggggaggccccgtgcgccctgacaggcgcgagccggcagcgccggggcgaggcccgag

SEQ ID NO: 5972 - DNA, 2300 bp, Homo sapien
aggttgccatcgggcatgttctacgaggcggtctcgaagggctacaactcgcttcgctaggcaacacacccagagccgatccagcactcttcactcaagggtttttagggagaggagaacgggagagcaaggtggactccagggagggggcgagaagagaccccaccctgtatgaccgccgctgcgcccgggccctcgccaacgatttacacgactcggggcgccctgcggactgggcccgggggcccagggagccgagaggagagagactgtccgccgggggcccccggcccgcgccctcgcgccggctcgccgtcgcccaggcgctgtccgggccgcccgccgccgccgccgcaggcccggccccggccgctgtcacacccgaccgccttcctctccgcgccgggctgcaggctcccacgcgagccggctccaagggccccgcactcccggagacagcaaccaggaaagcggcggcggcggcgcctcccagggccccggcccctcgggcctcgccccggcgctgccggctcgcgcctgtcagggcgcacggggcctccccctaccgacagccagcccgactgcccgacggacaggaaggcaggcaggaagaaccgaccaacagacaccctccgcctcatcggccccgagttaccgtcaggagccccgactccgccatcctcctcgctcgccctccttcctcctcttcctcctcctcctaagaagcgacgctgcccaaccgccgccccccgcccgcccctcccccactcgccccgccccgcccgccccgccactactctcgctccagcctccccgccccacccctctgccgtgggcccgtcactcgctaggcaagaaaaatgggcggaaccggggcaagagaagctgcccaatcagagacgggcagtgccgccagcttctctctctccgcccttgtcctttcctcagttcctctacgccgtctcccgcccactgggcgcctctggctagccgggctacagagtaagcctccagcagggtagagtgacaactccccgatcggaagttactgttgaagctaaggcggccataactgataatggcaaaaggagattcctggcttcctgtttccagggtgacgtagatttttttccttcgccagtctcaccgttacccggggcaacagctgagccgtctgggaagggatgcatctgtaagtaagcccaaagaggtaccgtgggtgaccacacatcccatgttagacaagttaattcatactccggattacacgtccagtttcctggcccttattttactgagacgtctggtcacttacggagatggacaacagtttagggctccgaaattccctctcctgcccggaagttgcatttggcacttccgaattgggtcatggcggaagggtgttaatagcctggccgcccgtgccccagggaatgcttatttttgaccttagttgcaaagtgaggtgagtccgtggaccccaaccagtgggccggacccgggccggacggtccctgtgggacagagcgctgaaatggcgagcggggctcagggccgcttccgttggaaggcggtttttttccgggctggcctggcggcggcccgcccccgtgaggctccctgtggggtgaggccgctctacaggccgccctaacccagccagaggcagcccggccgggaggaccccagcggggaatgggcggggacctcggggcggagctcctaactccggcaaaacggagctcttgaccacgcctccgcaagttcctattaagtactttcactccttggcctttggagggaggagaattcgggaacttcagaaaatcattttccaccttcacctataaaaggaaaagatgagcccctaccaccagggcaggacctcaatctttttcccctgccacctgccttcccattctgatttttcccccctttccgcgtctctcctttgagtctttgtaagctttgactgcggttctggtggtgggattcctgcaggtctacagtttcttaaacaacgtgttgaagatttttgaaaatactgtattgcttttatatggccctttacaaagttatcatacattatcttgtagtttcttctgtatgcttgagtcaagaactctaagtcatcttggtaataccgggttggatgcttaaagctgcagcaaaaagaccagaactttcaggtaaaattgaaaatggttaatatccagccagtcaacaatacagatgcaaacctaccttctcgacttaatttctgcttccttagtacttacacgccagccaaaatgaac

SEQ ID NO: 5973 - DNA, 2300 bp, Homo sapien
tttttgtctatttttcaaatgtgtatttataattacataaaaagtttacaatatactttatgtccaaataaagacaaaaggcttatcatactcagtctaagttccatatgtggcgaatggtcatttgcatactttattcctaaaattcttttcactgtcacacagcaaaacatcaacacttgataaattcaaattataaatataaccttactgaatgttacaaattggatgcaatagctaagtctcttcaagtacacagtaacagttctacagtccacagcatggaggatgagggtaaagattagtaagtacactaataaattgaggtctttaaaattaaaactatttttcagtggtgttgctgcatttagttacaaaaacacttggttacacaaatgtaccttaggattctgaaaaccgtaacaaaaagcttttgatatagtagtccctcttgagtagaaactagacgcactcggtatctaagaaaagtatacgaaatggcacaggtgtaagcctagacactgctggtagttatcacgctggaggcaaatactatacagtccacatctgcaacctaattttgcttcagcatccccagagacttcgaaaatatttctttgggtaggttgcaaaacagtgcttcctcttttattctcatcacccccattacgatacaaagcaacagacaagaaaaatcaaactgccaactgtaagggcttaaacacacacacaaagcatcttctttctagctcccgaatcggtatttattccacctgtttgtaaatccataattccacaataacacaaactgcctgcttaaagaaaggaaggaagaaaagaaaaagaaagaaaagaaataaagagaaaggcaagttaatgctttggagtcattactcttccacctaggcatggggggagggggatggtacaaaaacaatggatattgaggtgctgggggaaaaatcgtcttgccccaaagcctcttgtgttatgagcctggggaagtcggggaagagtgagactacttttcctctctccctaaaagctgtgctatcacggggagaggttgccatcgggcatgttctacgaggcggtctcgaagggctacaactcgcttcgctaggcaacacacccagagccgatccagcactcttcactcaagggtttttagggagaggagaacgggagagcaaggtggactccagggagggggcgagaagagaccccaccctgtatgaccgccgctgcgcccgggccctcgccaacgatttacacgactcggggcgccctgcggactgggcccgggggcccagggagccgagaggagagagactgtccgccgggggcccccggcccgcgccctcgcgccggctcgccgtcgcccaggcgctgtccgggccgcccgccgccgccgccgcaggcccggccccggccgctgtcacacccgaccgccttcctctccgcgccgggctgcaggctcccacgcgagccggctccaagggccccgcactcccggagacagcaaccaggaaagcggcggcggcggcgcctcccagggccccggcccctcgggcctcgccccggcgctgccggctcgcgcctgtcagggcgcacggggcctccccctaccgacagccagcccgactgcccgacggacaggaaggcaggcaggaagaaccgaccaacagacaccctccgcctcatcggccccgagttaccgtcaggagccccgactccgccatcctcctcgctcgccctccttcctcctcttcctcctcctcctaagaagcgacgctgcccaaccgccgccccccgcccgcccctcccccactcgccccgccccgcccgccccgccactactctcgctccagcctccccgccccacccctctgccgtgggcccgtcactcgctaggcaagaaaaatgggcggaaccggggcaagagaagctgcccaatcagagacgggcagtgccgccagcttctctctctccgcccttgtcctttcctcagttcctctacgccgtctcccgcccactgggcgcctctggctagccgggctacagagtaagcctccagcagggtagagtgacaactccccgatcggaagttactgttgaagctaaggcggccataactgataatggcaaaaggagattcctggcttcctgtttccagggtgacgtagatttttttccttcgccagtctcaccgttacccggggcaacagctgagccgtctgggaagggatgcatctgtaagtaagcccaaagaggtaccgtgggtgaccacacatcccatg

SEQ ID NO: 5974 - DNA, 2300 bp, Homo sapien
tcacgtattttcttttttcgtttttatcattagaaaagtttactttttatttctttccaagttttcttaccttttaataggggtaatcttgttctatcctctgtacttaatatatgtgattttacaccttatatatttcatttgatccttatataggaggtgtccttctaaatttagggtatacatatcttgctaaatagaaatttgatttccagaaacttgatataatgacatttcttaaatacaaattgataagcaatgcctgtaaccctttagctatgcatatttcccattattcagttgtatggttttagtaaatgtactttcatattggcttatcagcattattttctgaatcagtatctctagagtttttcttagtctctctccatcgcagtgcaaaataatttttttctttttttttgaaagggttgaatagtaatagatagagctctcctggtgtgctagcaaataatgatgtatttgtttaattgtagaatcttatataccagtaaagttcatactgtgcagtttcaaatttacagattattcatcctctaccccagttcctgttatttctgcacatttgaccatttgcttcagcaaagtgacacattttcagtgtcccgtgcaaactaagctccactccctattctaggcaaaactttctttttcatgccacccacctgtaatgctttgccatctctcctttacttgcttgaacacaacccattaatccaggactagttagcctaagtcctgtatgcttttctcaaccattctcactgttacaaattttctcaaaagtgctatagcatatgccacttgcctgaggatttaataatatgctgtcttatcaattacttgttatatgtgagtgttttggctgtctaattaaactacaagcttgtatacagagaggttcacatcctataaaaataaattattagcagaatccttagcacttaacattatcacatccttttggtagtctgacaaaattctaataactgttttaacctcttaagctagtcaggtaagaagttattttatctttaatccctagtaccaaataattaccagttagttaaatagagttaacaatagagtcataaaataagaattactaattttaaatttcaaaatgtttagggaggactgattccttccataaatattttactaatctttttgtcctttgccaatcttttcggcctgtcattttaccagcagactttttctgcttttaagaaccctgtgccattgatctttctttttcagtccctagaatatacacatcattggacattgccctttgtcactggttttcaaaggtgatcctcaggtctacctccatcagaatcatgtagagtgcttattaaagtacagattattaatgcccctttccctgaactgtgctgtttttcatacatatttcactttgttctttttttttcttttgccagactgctctctcttctatcgtcaccaccactgaaatcctttctgttatctaaagctatccgccaattaattgtagctagaactgttttagtgtagtgggttaggaacataggctgtgagcacatactacctaatttggaatattggctccatcatgtttccaagatctcagagttagttacttaaaaatatttctgtgctttagtgtttctttgtataaaatggggataacaatgtatctcatagggctgttgtatgtgttatattaatacatgtgaattcctcagaataatgctagtacatagaaagcacttaataaatattaagcttattgttgtggtttcttccactttttaggtcttataaaattttctagtaaagtaacttacattcatacatcttcctattagattgcaagtttcttgaaggtagagccagccttattaagctgtgtagttttaaatggatttttacctataaaggatgttcataaatatttgagaatgaaatcataggaaaatggcaaactctaataagattgtttttcagagcctatttaatataaattatctaaagtaatttaatactgtctatattatatttcaggaactctaatgaatcattgattgaccagcactattttaccagttggaatgaatgatcagaaatgggcatagtgcttttagatccaacatgtaacagatggatgttactccatgctgattacttcttcaagccagtacttttttgattgtgtaggatctttgtctcttcatctttgaattcaattactggaaaataaaaggagttcatgtagtttttgtccaggcttgagt

SEQ ID NO: 5975 - DNA, 2300 bp, Homo sapien
ttgccatctctcctttacttgcttgaacacaacccattaatccaggactagttagcctaagtcctgtatgcttttctcaaccattctcactgttacaaattttctcaaaagtgctatagcatatgccacttgcctgaggatttaataatatgctgtcttatcaattacttgttatatgtgagtgttttggctgtctaattaaactacaagcttgtatacagagaggttcacatcctataaaaataaattattagcagaatccttagcacttaacattatcacatccttttggtagtctgacaaaattctaataactgttttaacctcttaagctagtcaggtaagaagttattttatctttaatccctagtaccaaataattaccagttagttaaatagagttaacaatagagtcataaaataagaattactaattttaaatttcaaaatgtttagggaggactgattccttccataaatattttactaatctttttgtcctttgccaatcttttcggcctgtcattttaccagcagactttttctgcttttaagaaccctgtgccattgatctttctttttcagtccctagaatatacacatcattggacattgccctttgtcactggttttcaaaggtgatcctcaggtctacctccatcagaatcatgtagagtgcttattaaagtacagattattaatgcccctttccctgaactgtgctgtttttcatacatatttcactttgttctttttttttcttttgccagactgctctctcttctatcgtcaccaccactgaaatcctttctgttatctaaagctatccgccaattaattgtagctagaactgttttagtgtagtgggttaggaacataggctgtgagcacatactacctaatttggaatattggctccatcatgtttccaagatctcagagttagttacttaaaaatatttctgtgctttagtgtttctttgtataaaatggggataacaatgtatctcatagggctgttgtatgtgttatattaatacatgtgaattcctcagaataatgctagtacatagaaagcacttaataaatattaagcttattgttgtggtttcttccactttttaggtcttataaaattttctagtaaagtaacttacattcatacatcttcctattagattgcaagtttcttgaaggtagagccagccttattaagctgtgtagttttaaatggatttttacctataaaggatgttcataaatatttgagaatgaaatcataggaaaatggcaaactctaataagattgtttttcagagcctatttaatataaattatctaaagtaatttaatactgtctatattatatttcaggaactctaatgaatcattgattgaccagcactattttaccagttggaatgaatgatcagaaatgggcatagtgcttttagatccaacatgtaacagatggatgttactccatgctgattacttcttcaagccagtacttttttgattgtgtaggatctttgtctcttcatctttgaattcaattactggaaaataaaaggagttcatgtagtttttgtccaggcttgagtcaccatgagtagtagtttaggaaaagaaaaagactctaaagaaaaagatcccaaagtaccatcagccaaggaaagagaaaaggaggcaaaagcctctggaggttttgggaaagagagcaaagaaaaagaacctaagaccaaagggaaagatgccaaagatggaaagaaggactccagtgctgcccaaccaggggtggcattttcagttgacaatacgatcaaacggccaaacccagcacctgggactagaaaaaaatccagcaatgcagaggtgattaaagagctcaacaaatgccgggaagagaattcaatgcgtttggacttatccaagagatctatacacatattgccatcatcaatcaaagagttgactcaattaacagaactttatttatacagtaacaaattgcagtccctcccagcagaggtgggatgtttagtaaatctcatgacactggctctaagtgaaaattcacttaccagtttgcctgactctcttgataacttgaagaagctgcggatgcttgatttacggcataataaactgagagaaattccttcagtggtgtataggctggattctctcaccactctttaccttcgctttaatcgtataactactgtggaaaaggacatcaaaaacttgtcaaaactcagcatgcttagcattcgagagaacaaaattaaacaactacc

SEQ ID NO: 5976 - DNA, 2300 bp, Homo sapien
caaaaatgactgtagccatgtttccaactgagcctactggcgatgtccaaagcccctgccaagagcctcagagcagagactttagtagaagatggaaaatgagtgactcaacagagcgaggaaattgtcttctcagcttcctttagattgtccagaaagggagattagaaaggctcctcagaactaacactggaaagggagtttataccattagggcaaagattgggagacaaaggtactgaagtcaaatgagacttctgtgaaatactttggaaagtacagattttgagactacatgaacagcagcagcaccaataactgtatcactggtgcgggctatagacatcagctgggaatgaaggtgattctcagggcccttaatttagccatcagcccccagccagacctaagcctgcagctggctgcacagagaggcagcctgttccatccttggaattccaacttaggtgactgcacaaggcattttggtttagtggttccttaaataagacgacattcctttaagtctaatctctctcctgctgaaatttcctaccctcttgggttttaccattaaactgcttgctctcatctgaaaagtgcagctagcagggtgcaagctagtgctctagtgaccgttaaaatctatcctaggacagctagcacgcacggaaaaacttgccattcgccgcacacccactcccccccgcccccaccgctattcttatcagagagaacatggaaaatattctactccctcttccccttattgaaggatgctgtgtgtacatctgaatgggggtgggatgcggggcgggagtggagtctagctttcggtcctcaacaaaaacataatgattcccagcaagccagagctgtgcaaccaaggaggcaggatcctggcctctctcggatctgcaggaagggtgggctgtgcgggtccagagtgggatgcccgttctggccggcggtgcctgctgagcccttcctgatgtgactttattagacaaacccccactcccgccaggggtagacacacgagtatctgctttaggaagatttctgcaacacggcagggtgcaattcaaactctgggttctcctttcctgagcttagaaaccaatttgttcggagataggagaaggctctgttggcagaagacctaagagacgggaggaggcgcctggcgtcagcgggtcgcttctcagccgtgaccacgagcggccagcaggtgtcagtgcgtcctcgctttgccctggcgctcggctcctggacccctccccacctcggtctaagggggcgcggtccagaccccgggtcttgcgtttcccgcagacagcatcgcggctgggaggacacgtagccgcttcttccctaagcggaggtctgaactccggcttgtaccacttccccgtgggtgctgtccattccgccccaggggttccatccgaagccgcgccttcctccctctccaggacccctttctccccagcctccaggagcacctgcggaccgcgtcggctctggcccggagctgggctgctccagacgtaactcacaccggaggttacttccctcgatttgggcggggattcccttccatttttttcttcccttttctcccaagatccagcttcttgggggcactcacgggtgcccgttgcgttctgctccgtcggcccggagctgcatggccaactcccagcaggggccgctcctcccctaccccccacccccgggctccctctttaagtctctagctcaaggtacccgcctctccaaagggctcgtcccgcctgagggcaacgctccccgaggtccagcgctaggcgcgggcgctagactggcggaggggtggtgcgaggggcgggggagggtcggcttcccacgtgggggctgacgccggctgctcagcaacgcttgcttgatcctggggctataaaacgagtccaccgtgagcgcagcggagcagcagcagctccagctcggtgcagaagcccagcagccggcgtgccgccgcccggccactccagcgccttcttccccgccttgcgctcctgccccaactcgcgctgtcgtcggaccccggcccatccagcagcgctcggcgcccaccaggcggacgcccaggagaacccctgcctccgtcgcggctcctggagagctgatcgttcacctgccccggcccgcctgaggacgggggtgccttcatgcggcccccacactcctcaccccgccgccgccgccgtcccggagctccgcacagtgtgccccagccccagcagggcgcacaactttgg

SEQ ID NO: 5977 - DNA, 2300 bp, Homo sapien
ttgaatactaaacgttttctgacaggccgcagttaatgattacctcctttccttcttcattcattgttcttcttcaagatgaacttacagtttccataaaacaagttattctgtggataatagaatgtttgtgtatgtgttggctttatttctcaccatgttattctcactattggaatttagggcaaacctaagaagaatgagagcctgtggagtgtagcaagaggtgttattagaatgttacgaaaaaactatggttgtgtccgagtggattttgcacagccattttccttaaaggtgagtgtctgttgaaatgaaaccatgttgaagcatctacctggagtcaggaggctccagtgctgactcttaacagcacctctctgtgtgacttggggctgcagtttgctctcctgtaaaatgaggactatgataaaggtggtgttgcctaaatttttccacaaaatttgcctattgacaaaggagagtgagtatctgtttttgggagatatcaggctcgacatttattgctattattatttttttttaattcatgaccatctaaggggaacaaaaaacaggtagaaggaataagttttagtatttgatagtacagtagggaaattatagttagcagtaatttattgtatatttcaaaataactaaaagagaagaattgtaatattcccaaccccccacaaaaagctaagtgtttgaggtgatggttatcccaattaccctgattttatcattacacattgtatatagatatcaaaatatcacatgtaccccaaaatatgtacaagtattatatatcaattaaccccaaaagtcaaaaaaattttgagatggatgaatgaataaatgaataaataattgtaaaaaaataaaaattcatgggaatcttgcatgtgcctttataatacgtatttatatcttatgtttcaaaattgcctttaggggaaatttttccaaacacctcccctaaaagctgggtaactttttttttgagacggagtttcatgttcttgtagcccaggctggagtgcagtggcgaaatctcagctcactgcaacctctgccccctaggttcaagcaattctcctgcgtcagcctcctaagtagctgggattacaggtgcccgctaccacacctggctaatttttgtatttttagtagagacggggtttcaccatgttggccaggctggcctcaaacttctgacctcaggtgatctgcccgcctcctcatctgcctcccaaagtgctgggattacaggtgtgagccacttcgggcagccaaagctgggtgaatttgacaggataatgctctctatgtcctattgtgtagaatccagtacccacacatcccaaaggatagtgccatcctcattgaaagtctgggactggcaggtccctgaggcccttgctggtttaaattcttaaggtattcaaattgtaaaggagaaggagaaaaatgggtacagaagtagggagcccagggataaggagcagaaggtcccgcctctccttttattctacttcctggcttaactttaagagattccagctgctgtggtagatgcttgctaaccttaaatgctttgatcttttagaaccttatcatttcttgccactttctttctctttattttttaaatggtcacatagcttctctgtcttgttatgatttgcttttagattgaggttcttttgaaaataatgtgacccttgggttgccagatttttttaagtatgattatgtctatcatcactattaatgatattaagaatgtcagttttatgatgatgtgtgagaaaagttaaaaatttcttttaattttaaaatgattttgtttaagcatcctattctttgtgtcttcagtgttcaagttcagtttcatgcttagcagcattctgtgaatcattctggacttctgaagacagtttaggatatagaaagtatttcccatgctctatagcatggcttatttcataaacaactcccttttaacctttggaagatgaaattacattttatatgttggtgcgaaagtgagggtaaatgatcatgttgtgtttttttctccaggaatatttagaaagccaaagtcagaaaccggtgtctgctctactttccctggagcaagcgttgttaccagctatacttccttcaaggtaaaatttgtagaattgtttaatgctaatcaagctaccaaacatctgttatttcttgtattgcatagattaaccttattaaaaatgcgcacattcttattttcacttcttaagtaacttttctct

SEQ ID NO: 5978 - DNA, 2300 bp, Homo sapien
ggtagcttcctcacacacatgctctaatcagcggaagactggagtgagatctgttgtagatctccacagctccttctttctctgtgtagctttctcctttctgatatacaactcacagttccagctgctttggcctccctgctctcccagttctatctcttcaactcagggagtctgcctagctctttttggctgctccctctagttagtaaatcaaggcaatcatagggctcacctcatttgttttccctcctcaaggaccactgtccagcacaacgtttaaaagccattgtcttataaatgcctgtttgtttttgtttttagttgttttaggcaggagagtaaattcagtcctgttgctccatcttagctggctagactggattgctataaattttaaactatctaaatagttgcatatatttagggggtacaaatcgatgttatgacttatgaatacaatgtggaataactgaatcaagctaattgacatatccacctcaaatacttctcagttttcatggtgagaacttttgaaatgtactcttagcgattttgaactgtataatacattattatttactatattcaccatgctgtgtaacatatagtccgaagggggaaaaaagcccttatttctcctaactgaggctttttatactacaagccttatttgcttcttttcatatctcattttcctccttaaaggaaaaggcactcagccactttggtagaaattacacaacatggccatttgcaatccctgcctctcccattcgtagtaaatcctacatagtcttacagatctcataaaaagtcagaccacacacataacctgatagcccacgcgcacattcccaacagagcctggaagagggacaagctcccggataagctgaatttacacaaagcagaatgaggtacccacacacactcacacacgcatggcctaggcagggtaaccatctgtccaggcgctcacacactatctttagccacacacaggcacgcacactcgagtacacacattacaccctcggatccgctcacgctccctgaggctcgcaggccgggccccgcccccggcgctggctagccggcggccccgcgtcaatgccacgcgccggttgcgtcatcagggtgcgccactgcagctggcattggccgggactggaagtgcgggcttctgcagcagccgaagctggagctgctagggtgcgaactgccagggcaggtgtgggctgcgggaggctactcgggccgggagcgccgggacaagtgcatggaggtggtgcgactcctgcaagttgctggggcagtcgtgtcccctattccctgacacccgagctccggtcttctccctgagaaatcggtcgggctcgtgcaggggtggggatcaggattcatctctcctggggagactgcgctggggcatgggttcccctgggttggaaggagtccttatggactcagtcccctaagtatctgcacgcgcggaggcgccgccagccagcccgcctgggtccctagggaacattgaggcagtaaggggtactctgagagcagccggtatgctggagataattaatgacagcgttaccattgattggactgagcgctcactgtgtgttacacactgtggtagaccctttgtttatattattccgtcctctcaacaatccaggaggttaagagctatcattctgcccattttccagatgggaaaactaaggcatagaagttaaccaacttatggtaataaaaaatcacacagatggtaagcagtggaagatttaaacctcacagctggtcttccagcctctgtccttttcagatcctctagtcagcttctctcagcgcatgctgctggctggtgcctctgggatattgcttctttattactccttgacctagagcgaactgtgcggagggaggaagtgcaaaacgtggacctcctgttggcacaaacgagcctctttgtcctctcctcatcctctcttcacttcattttctcaggcagcagcggctcccctgttgtatggacattctgcacccgaaactgatagctgagtcctgaagttttatgttatgaaacagaagaactttcatcccaggtgcattggtttattctctcccctagcctgttatgttagattgtacttatgttaaatttttaaggacataggtggttatgccgagaataacagtgactgtagccaacccatgtggggattgtaaagaaattggaatatgccttccaaaggaacactgttaatctagacatgacctttcaggatttt

SEQ ID NO: 5979 - DNA, 2300 bp, Homo sapien
tttcagtatttttcttcccttagtgtttcattttggatagtttctatcacaatgctttcaagtttttttttgtttgtttgtttttgtttttgagacagagtctcgctctgtcacccaagctggagtgcagtggcacaatcttggctcactgcaagctctgcctcctgggttcacgccattctcctgcctcagcctcccgtcaggttttttactgtttcttttttagtaatgtctaacctattaatcctgtgtgtgtgtgtgtgtgtgtgtgtgtgtgtgtgtgtgtgtgtgtctgtgtgtgtgtgttagggtgttaaaaatcttagatgtggttttattatctcctagatgtttggtttgtgtcttttttttttttaaagatttttcacatctctacttcccatgctcagtttattttttctacttgttgaaaacattgaatacagtcataattactttcttaatgtccttgttctcttattttatcatctctgtcatttctgggatgatttcaattggttgatttttttttctcatttcctgcttcttttcgcatgcctgataattctgtttggattccagatgttgcaaattttaccttgttaggtgttggttatttttaatttcctgtaaatattcttgtgctttgctctgggacactttgttctcaaaaacggtttaatcctttggtggctggcttttaagatttctaagatagaatcagagtagcttttacattagagctaattttgccccactactgaagcaaaaccatttgagttgtgaattatgaggttttccagtcggggtgccaggatcaggcactatttctggtcctgtataatcactgggtatctttctactctgccttgtgggagcagaattaatttcctaccctgtgcaaactttagtaattgctctctcttttcttcatacatgattatttcctgcccttaggtagcttcctcacacacatgctctaatcagcggaagactggagtgagatctgttgtagatctccacagctccttctttctctgtgtagctttctcctttctgatatacaactcacagttccagctgctttggcctccctgctctcccagttctatctcttcaactcagggagtctgcctagctctttttggctgctccctctagttagtaaatcaaggcaatcatagggctcacctcatttgttttccctcctcaaggaccactgtccagcacaacgtttaaaagccattgtcttataaatgcctgtttgtttttgtttttagttgttttaggcaggagagtaaattcagtcctgttgctccatcttagctggctagactggattgctataaattttaaactatctaaatagttgcatatatttagggggtacaaatcgatgttatgacttatgaatacaatgtggaataactgaatcaagctaattgacatatccacctcaaatacttctcagttttcatggtgagaacttttgaaatgtactcttagcgattttgaactgtataatacattattatttactatattcaccatgctgtgtaacatatagtccgaagggggaaaaaagcccttatttctcctaactgaggctttttatactacaagccttatttgcttcttttcatatctcattttcctccttaaaggaaaaggcactcagccactttggtagaaattacacaacatggccatttgcaatccctgcctctcccattcgtagtaaatcctacatagtcttacagatctcataaaaagtcagaccacacacataacctgatagcccacgcgcacattcccaacagagcctggaagagggacaagctcccggataagctgaatttacacaaagcagaatgaggtacccacacacactcacacacgcatggcctaggcagggtaaccatctgtccaggcgctcacacactatctttagccacacacaggcacgcacactcgagtacacacattacaccctcggatccgctcacgctccctgaggctcgcaggccgggccccgcccccggcgctggctagccggcggccccgcgtcaatgccacgcgccggttgcgtcatcagggtgcgccactgcagctggcattggccgggactggaagtgcgggcttctgcagcagccgaagctggagctgctagggtgcgaactgccagggcaggtgtgggctgcgggaggctactcgggccgggagcgccgggacaagtgcatggaggtggtgcgactcctgcaagttgctggggcagtcgtgtcccctattccctgacaccc

SEQ ID NO: 5980 - DNA, 2300 bp, Homo sapien
tgtcttttttctgctcaggaatgaactatggagaacagtagaaatatgccaatgtcactgttcacaatagcaaagacttggaaccaatccaaatgcccatcaatgatagagcagataaagaaaatgtgacacatatacaccatggaatactatgcagccataaaaaaggatgagttcatgtcctttgcagggacatggatgacgctggaaaccatcattctcagcaaactaacacaagaacagaaaaccaaacactgcatgttttcactcataagtgggagttgaacaatgagaacacatggacacagggaggggaacatcacacaccagggcctgttggggggtggggggctaggggagggatagcattaggagaaacacctaatgtagatgatgggttgatgggtgcagcaaaccaccatggcacgtgtatacctatgtaacaaacctgcacgttctgcacatgtaccccacaacttaaagtataataataataaaaaagaaatacggcaatgtttccaggccacaataaacttgatcctactgtttaaaaaatttttttaatatattctttctcttctccctctcagctcatttgttcatcatccataaaatattttgcatacgtgtcatacaatacagatatgcctcctgttacgtgaatcataaatctacaatgagtcactttgtgttgcatgtaaagaaaggaaaagcaactcatgggacacatacatgctactggaaattgtcagttgtcttttcatgtaatctacttatttatgtactacttacagtttacaagagcctttacatcattgctctcctactctgtaagttcagcccagaatcacagccaccattttacacagaaggaaactgagttacagaactttttaatggcttgccacatggctatttccttcattctttgataccatcattataaaacatcccatcaatttaacaataggttttgaggaaataaggaaactgtactgtattacttatgcatgttgcttataagatacctcccaatgttttgaaacattaaatgatgtgcattatcaataatatatctggaaccttcatgggagtagcatgttatctgttgttttcagtgggatcttgtcgggtgactaagaattgaattataagagagactttctaagtttcttcttccaatgtcattgctctgggagactaataaagctttagaaatctcaagggtgtacaattaaaagttgttcttcaggatgaagttcaagacactagagtttatttattgttttttaattagagggaaaatcctttaaaatgtttacgttcacacacacacacacacatatatttatagttatcaggtgcaacaatgttaaacctgagttttcttatcaaagtttagtttacctacatacaaaaataagaaagcaggaaataaagcaaagaaagcaagacaaaagaattaaaactgtcacctggaattgtacagaaatagtttgcctccattcagagttattttctgtacaaaaggggaaaaaatcaacttttcctcccaatcttggttgaagcagttaaaaaaaagtttttccaactctgtaaagcaaaagaaattagattcaagtaactgagcttcccatcggattactgtgctagcccccctttttattccccacacagtggataatgcatgctcattgtgacttatctggagctggtttcttttacatcctcgggctatataaagtcaaactaggactggggcagcagatttggggagcatccagcagccagcctctacagtccggagaggatgaaacagtcgggaacatgaacaactccatgtgtcattgacgcttccaacggtatgagccccactttttgcctctcagcgctaacaggaaacaattagaaacgacacaacatcgtttatctcccttgaaaatttccccaagactgtatgtgcggctttgttcttcccttgattttaacttttcattcatgtttctgacttagaatgatcgaggctcaggccctggaaggaccgtaaacatttggccagcttggtttggatacctggcagagaccaggttctgagaagcaatggtgacgaaggcctttgtcttgttggccatctttgcagaagcctctgcaaaatcgtgtgctccaaataaagcaggtatgtcctcgccaagtccattttcctgggacgaaaagtttcctgaagtttccttttacaatgctcagcacttctgtgcttaacttgttataaaaatgtaatgatgtagccaagcaggaaagta

SEQ ID NO: 5981 - DNA, 2300 bp, Homo sapien
tcaaggtttgtaaacacaccaatcagccccccgtgtctagctcagggtttgtgaatgcaccaattgacactctgtatctagctactctggtagggacttgggtaacctttatgtctagctaagggattgtaaatacaccaattggcactctgtgtctagctcaaggtttgtaaaccattcagcaccctggtctagctcagggtttgtgaatgcaccaatcgacactctggatctagctaatctagtggggacatggaaaacttttgtgtcaacactctgtatctagctaatctagtggggacatggcgaacttttgtgtctagctcagggattgtaaacacaccaatcagcaccctgtcaaaacggaccaatcagctctctgtaaaacagaccaatcggctctctgtaaaatggaccaatcagtaggatgtgggtggggccagataaaagaataaaagcaggctgtccgagcccggagtggcaaccacctggggttcttttcacactgtggaaggtttgttctttagctctttgcaataaatcttgctactgctcactctttgggtctacgctgcttttatgagctgtaatgctcactgcaaaggtctgtagctttactcctgagccagcaagaccacaaacccaccagaaggaagaaactctgaacacatctgaacatcagaaggaacaaactctagacacaccgcctttaagaactgtaacactcactgcgagggtccgcggcttcattctggtagctaaacatacacagatcaatggggcagcataggggccaaggcactgcaggggttctcatgactctgagtcaggtgctgtcttgaccgactggttgtgtgattccagaagccttctttcacctgaaaaggcctcactggcctcacctatacagtaagtttgcacatcatctccagggtttctttcatttctacccactgtttttgtttagtaatgatgccttgcagtcctaatgatcttggaatcaagaatggtgactagagaacttcaaagtggaaagagaggctgggcatggtggctcatgcctataatcccagcacttcgggaggccgaggcaggcagatcacttgaagtcaggagttcgagaccagcctggccaacatggtgaaaccctgtctctgctaaaaatacaaaaaaaaaaaaaaaaattagccaggcattgtggtgcatgcctgtaatcccagccactccagaggctgaggcaggagaattgcttgaactcaggaagtggaggttgcggtgagactccgtctcaaaaaaaaaaaaaaaaaaaaaaaaggagagagtaggatggctgagccatgacgcagtagcaatgcttctttttttttttttttttttgagacagagtctcgctgtgtcgcccaggctggagtgcagtggcgcgatcttggctcactgcaagctccacctcccgggttcacaccattctcctgcctcagcctcccaagtagctgggactacaggggcccaccaccacgcccggctaattttttgtgtattcagtagagacggggtttcaccgtgttagccaggaagcaatgcttcctattctagcgccttgctaaactatgtgtgctgcagactgtgttcgtgattccgaatcctaaaaacaaccgtcctaggcttgtctctcagcctagactctagactgatttggctcatttggttgtcttggagacgttctaattctgaagggggcagtggtcccttctagaagatagctggtctgcaaatgcacacctctgcttagtctgaatcctaaagttatagcttgagccaattaaagtggcttctcatttttctctcactctgatctcaaggagccctttttcttctagtaatctagaccttcctcttcctatcacagtctcaaggattgtgcccccaaagcagatgcaaagccctgtctaccccttctccttcccctgaggtagagctttatcgaaggtttctcttggtaaacgttagctttctgaactaagggccgtcttttttttttttcccgcttaagcccattgcataacaatctcttgttttaatcttttgcccaacactgcttttcttactgtcagaggttactacaagtgtttgaacaggtaacttctacctttgaacttctgttgtgacagattcaaaggttccaggggagtgtgttggccactctcaggacagtacacagtagcttcgggtgtgtcccagtcagtcctaggagctgtggaaagagtagaagtgcctgaatgtggtgctgaatcaatacagcc

SEQ ID NO: 5982 - DNA, 2300 bp, Homo sapien
tgcttgaactcaggaagtggaggttgcggtgagactccgtctcaaaaaaaaaaaaaaaaaaaaaaaaggagagagtaggatggctgagccatgacgcagtagcaatgcttctttttttttttttttttttgagacagagtctcgctgtgtcgcccaggctggagtgcagtggcgcgatcttggctcactgcaagctccacctcccgggttcacaccattctcctgcctcagcctcccaagtagctgggactacaggggcccaccaccacgcccggctaattttttgtgtattcagtagagacggggtttcaccgtgttagccaggaagcaatgcttcctattctagcgccttgctaaactatgtgtgctgcagactgtgttcgtgattccgaatcctaaaaacaaccgtcctaggcttgtctctcagcctagactctagactgatttggctcatttggttgtcttggagacgttctaattctgaagggggcagtggtcccttctagaagatagctggtctgcaaatgcacacctctgcttagtctgaatcctaaagttatagcttgagccaattaaagtggcttctcatttttctctcactctgatctcaaggagccctttttcttctagtaatctagaccttcctcttcctatcacagtctcaaggattgtgcccccaaagcagatgcaaagccctgtctaccccttctccttcccctgaggtagagctttatcgaaggtttctcttggtaaacgttagctttctgaactaagggccgtcttttttttttttcccgcttaagcccattgcataacaatctcttgttttaatcttttgcccaacactgcttttcttactgtcagaggttactacaagtgtttgaacaggtaacttctacctttgaacttctgttgtgacagattcaaaggttccaggggagtgtgttggccactctcaggacagtacacagtagcttcgggtgtgtcccagtcagtcctaggagctgtggaaagagtagaagtgcctgaatgtggtgctgaatcaatacagccagctgtgaggggagcacttcctggacccaggaagggagagtcttcttccaaggtaagctgcaatgatactacctgcactatattgaatatatctgtgagatagtagggaggggattggtgtggggaaagaaagtgggatttgttatgctcaacctaaggctctttaataacatgaaattacatttagttgaatagtaatctcagctgacttgtgtgggaggcaaagaaaaaaatcagttggaaaaggggtggagatatatgagctatccaaatgctagcaggggatggaattggaagggaacactgattttggtaagtgtactaaagcacaccaagccagaatgtgggtctccttcatcttccattaagaaatttctgtctcagtgtagttagaaggatcgtgcgtcagctgctgagggcagagagtcccatttggcagacagagaggaagggaatcagcagatattcgattaggtgctggggactgttctgggtagattatgtatgttacttcattggtgtatctcatcctataaagcaggtggtatccttcccatttcacagaggcatagtgcgtctccaggctgttaaacagcatggcctaagctacatagctccaaggtggtgtggctagaatttgagacttgattggtcagtttccacagcctgcccaataatgcagaattgttgtgggttgccaaagctttcagttaccccctgaaatcctgagggtgtcactcatgtgcacagaggattgataggaatacaactctgatgggcctttagaatgactcaaccttcctgaacttgagcatttttactggaggaggtcaataaaaaaaaaagaaataaaacctcatcttcccctggccctgagccctttggtgaaggaagacagcacccggtgaagggctcagaggtattagtgtggctgagattcgacacccactctgccatcctctgctctcctctagaggaagttgcctcttggggagctgagttcctgaaactaagcaaatgacaagtgctcctccagccgtgagatgagccagaggatggaatgccacaggccccacttcgtctcccagcccttcatctttcttccatgtccaaaggcggctccccagaggccaagggctcagctcttgtgttctctgagactgtggcacagctcaccctggcttccttagtaggaagcttttaagaactgctctgtagaaagaacaaaccctaatctagctccagca

SEQ ID NO: 5983 - DNA, 2300 bp, Homo sapien
tgacagattcaaaggttccaggggagtgtgttggccactctcaggacagtacacagtagcttcgggtgtgtcccagtcagtcctaggagctgtggaaagagtagaagtgcctgaatgtggtgctgaatcaatacagccagctgtgaggggagcacttcctggacccaggaagggagagtcttcttccaaggtaagctgcaatgatactacctgcactatattgaatatatctgtgagatagtagggaggggattggtgtggggaaagaaagtgggatttgttatgctcaacctaaggctctttaataacatgaaattacatttagttgaatagtaatctcagctgacttgtgtgggaggcaaagaaaaaaatcagttggaaaaggggtggagatatatgagctatccaaatgctagcaggggatggaattggaagggaacactgattttggtaagtgtactaaagcacaccaagccagaatgtgggtctccttcatcttccattaagaaatttctgtctcagtgtagttagaaggatcgtgcgtcagctgctgagggcagagagtcccatttggcagacagagaggaagggaatcagcagatattcgattaggtgctggggactgttctgggtagattatgtatgttacttcattggtgtatctcatcctataaagcaggtggtatccttcccatttcacagaggcatagtgcgtctccaggctgttaaacagcatggcctaagctacatagctccaaggtggtgtggctagaatttgagacttgattggtcagtttccacagcctgcccaataatgcagaattgttgtgggttgccaaagctttcagttaccccctgaaatcctgagggtgtcactcatgtgcacagaggattgataggaatacaactctgatgggcctttagaatgactcaaccttcctgaacttgagcatttttactggaggaggtcaataaaaaaaaaagaaataaaacctcatcttcccctggccctgagccctttggtgaaggaagacagcacccggtgaagggctcagaggtattagtgtggctgagattcgacacccactctgccatcctctgctctcctctagaggaagttgcctcttggggagctgagttcctgaaactaagcaaatgacaagtgctcctccagccgtgagatgagccagaggatggaatgccacaggccccacttcgtctcccagcccttcatctttcttccatgtccaaaggcggctccccagaggccaagggctcagctcttgtgttctctgagactgtggcacagctcaccctggcttccttagtaggaagcttttaagaactgctctgtagaaagaacaaaccctaatctagctccagcaaagagccaggatcatgctgaacttcctgtgagccttcgtgggggatcgaggctggagaaagtgctgcttcattctgaggtatctgtgaggtggggaaggggcaggaaaatttgtcatttcggcttcctaatctgagaatggtagctccagggcccccctgtagccacagccttaggcggatcaaaaatgagactaatacaggtcctggtaatactgggggtgaccaaggcgaaagaatcgatttttaagttaagttttgaggtgtgactgtatcagagggaaagaaaccatgccaattgaacgactcacagccctgtcgttcctgacttgcttattttcttggctttgccagaacttcttcagagaccaaggcaggcagctctggcgactggagagaggcggggtagaaggtgtttgtgtgggtctgagggctgaggtaccctctagccagactttcctgtcctccgaatccagcagggaacagcgtcacctctgcctctgtgaggcttctgatctgagggggcacctcaagtcattttagtttgtttgttttcatcttagttgaaagatgataggccacaggagggcagggtcaactgtgttgaggcaagctggcttttgtgtcggcccttaggggctgaggtgaaaggctttgacacggagccagggtagctttggcagcttctcccctcctggtcagaacacttccactttcagttgtgaaaaaaaaaattaaaaccaggaagtgaagtccccgagcacgttagaaagcctgacatggcctgactcgggacagctcagagcagggcagaactggggacactctgggccggccttctgcctgcatggacgctctgaagccaccctgtctctggaggaaccacgagcgagggaagaaggacagggactcgtgtg

SEQ ID NO: 5984 - DNA, 2300 bp, Homo sapien
gttgggactgattgcacaagaaagagacaaagcctgtatttaagtgtccagtatgaaatggaaattatttttgcttatttcatttaggtaactaatctcctttgtattcgtcagataattttgatttaattttgccagaatttctaggtattgatttagtttttaaaatgctaacttcaagttaggtaagttctggagcacttcagaattgagagagctcttctcacctgtacagtctctcttgctcttcacatccaccccaatagaggagtcttactgttttcccttcccaacacgtgattaattcattgattctcaaaaaggttaagtgacttacccaatgtcacccattcatgtacttggtaaacattttcccttcccgacagatgattaattcattgattctcaaaaaggttaagtgacttacccaatgtcacccattcatgtacttggtaaacactaatgttattttataatagtatatatttaataatagtaatcataatatagctaacatttattgagcacttattatgtgtaaggcactgttttaggcactttacatgtattagctcatttaatctccataacagccctatgataaagatgctatttaaagcctactctgatgaatcactttgctaatttctaaggctgcataaatgataatgaagaggtagctgcccttaggaactgacagttaatattaaacagttaactaatacagggccatatgtacatcatagatttatgtgcacagtgctatgagaacacagaggaggaggacctggctctgaagggaccaaaaaccattctttttcattctttttttttttttttttttttttttttttttttttttttttagacggagtctcactctgtcacccaggctagagaacaatggcgtgaactcagctcactgcaacctccgccttccgggtttaagcagttctctgcctcagcctgccaagtagctgggattacaggtacctgccaccacacccggttaatttttgtgtttttagtggagacggggtttcaccatcttggccaggctggtcttgaactcctgaccttgtgatccacccacctcagcctcccaaagtgctgggattacaggtgtgagccactgtgcccggcccaaaaaccattcttatgacttattgcattcacgtaattcattcattcattcattgaaggcctactgtgggccaggtattatgctaggcccttggaatatgatgaggactcctgggccaaggctgtttatttttttattgttgtttgtttgtttgtttgtttgtgacagagcctggctctgttggcccaggctggagtgcaatggcacgatctcggcttattgcagcctccaccaaggctgtttctaacatactacactgtctctctgaaggcacagccagactttaagggaactcttggttttaaaataatctggttttgtttatactttattatcgtctactagcctgggaccaaattctttgaaaaattttccccaatgcctctaatttagaatcatattagaaataaactaagatcctataatataaaagcctatatatgtggaatcagtcatatctaggaaaatcaaataatagaataaagactgaatacattcattatttttaaggcaagtgaaatattgaggttgactgaaatgagtcactgttacttctcataaatagattaatcgtaaatttaaagttagttaaaaatagtgataaaagattttaatagcaaattataagtaagcactgattaaatggattatatcaatgttttattaaaccttgctctgaaaatagtacttatgacataaagtttgattaacatactagattcagatttgattatggatgggtgtaatcattgttacggagaggtaccgtggtgcagtagttaagaacaaggactttggagtcagacggatgacatggtaattgtggtacttaacctctgttatccttggtatctttgtctatggaatggagtaataaaagctatctcagagaattatgaatatgataatcttaaaggaaccaaggtcgcattattaaattttactatcatttaatttccagatgaaaataattctcagaaacaaaacttctattgagtcatggattgaagagaaggtaaattttaataattgtttcttcaatattaaaaaagtatattaataaaggactggtaaagtcctgaatattaataaagtctgttattagaccggattaacgaaaagtgcctaaaagtgaaaacatggctgccaaatggct

SEQ ID NO: 5985 - DNA, 2300 bp, Homo sapien
aacctatcccacctccaccccacctccatcttttttttaatgcagagcaaatattcaataaaattgctttggaaaatgctattttggatcaatgtgttcaaacagatatgaaataaagtctccgagcctaaatgatcagtgattagagtaatatacttagtctctgtgaggacaaacagtaggctgtgtttggtattattggttagtagataaggcaaaaaccaaatatacgattatcattaaagttcattgtcttacagaatctttcttaccggtttccaccccagagggacaaagcccggaccgacaaacatggcattgaagtaattataaagaatcatgacagtccaatttatcaacatgatgaaattcacacttcctccagttgtatgtaagggccaataccacaacacagagtcaatcatggccatggtagaacatattgctataacaccaagggctatgatgggaccccagtgacacagtctctttaattcttgtagattttcaaacttgataaccgaacagaatgtacccattttggcaaggaagaatgccttcctactttaaaagaattatagatttcctttttctgtgcgcacatttccatgtgccacaagtccatgtgtgttctttaattgtcatgccttcaagctgtgaactgttaacgcagattacaccattttcactgtcaggcacccaaagctctttatcttaactaggagaatccagtgtcttggtctgaaacccaacctaaagaaaacaaaatgggaaagttcagttaaaacaaaacaaaacaaaacctttattgcataccatacttgttaactacaataaacacctacacaacagcatctcacaagtgcactacactttgggatgcatatcttgtcaaatgtcaaaaagaactacttttgacttatccaaaatatggtacaagtttgaatggcatgcaaactggatacacgattccaaaatagttttttttattccttctccgcttgtcaggggactgtcaccatccaacgcttagtgaatagtttgagaagacaaagaattttaggaccttagagttgatctaattcagtttccttcttcatagaacagaaattgtcttagagaggctgagtgattagaccaaggtcacaagtaacaggtgaaccagaatagaaggcaagtcaacgacctccctttatgaaattctaagctgcctcttatgaagtcttgaattaagccaagtatgagtcagacatggtctatgccatttgcctgcagtctcctccaccccgccacccaaacatcaagagaacagtcaatttggcccaaaagtaaaggagcgacagtgaaagcaaagagagcatgcaaggaaaggaagggaggagatagagcgagagtgtgtgtggtgtgtgtgaaattatgaccagaagagtatatgagaagaacctgaattagaagattcgagggaagaaagaagaggaagtgcctccaggagcgagggaaatggaaggcagggcggcgagctccggagagatttgtggaagggcatctctgcctggactggatctgaagatctggaagaggatctgagctacatggataatacagactaccacgcagcagacgctgttgacttgtgcctcagtttcccgcccgagtcatggagcagagggcttagaaataaatcctcacccaaggaagaaatatcctggtaagccaggttggtctcaacattcaggagagcctgctcccactctggtgggacaaagaccaccaaaatcgtgcttatattccctgccttgactcccacctcagtgtggtccctggtgtctgctcctcagccatcgcatatccggggcggcctgggctcacccggaacagattttttcctccttggatgactccgtcatggacacctcagcccaggacaagcagagagcaaaccctggcagcgagaggctggagtgcgggacctgctacaagccgagcacctctcggccagcgccctcgccaggactctcccgctcaggccccctgcgcagtctctgttactgtcacttccggaggttcgccgcctcaaacctccctccggaagcaagctgctgtgccttgtagcgtgtggatccggagccgattcccagaacacgaaggggggaaaaaacgcttctaatgatccctcagaacttgcatattttcatacgcttttctggggggaggcactaattggggcgcttttcctttgcgaacttacttatcttaaagtcggagcggaaaataaagcacgcacgcaacccaatttccgg

SEQ ID NO: 5986 - DNA, 2300 bp, Homo sapien
ttctctcctcttgttcccttacttggactcataaacctctttaagacatcatccatctcctccagaactaactggggacttcaggagatgagtggggtataagttcagagatcctggcttcaagcaaatatccctattaacagaaaataggtgaggggaagaaaaacaaagaaataagggaagaaaattacttataaacacataagttttgggggaagtagggaaagggaaagaggaatgacaacttaggtccgggagaaattattgctagtaccaggacaagtgggcaagtgaagtgcccaccaatccgcagattaatgagcacatccacctttctacactttatatcctggagctagggtagggacaagtctagcagccagatgatggttcaatttccctaacaaaactaaacaaaaatgtaaaacccttttctgtaactaactactctaatctgtagagaaagatagtccccgaatcaacattgtacaaaccatagttacaaaagatcatatttatattcacctgctcattcacttattttcctgagcccctaataagtaaacgccaaggaaatcagacacagctcccaccttcacatagttgacagtctagcatagaaaataagatgtgctaaaacacaaaaggaaacacaaaaacaaaaacatttccagatgggagatgtgaaatttttaagtgtgaaaaattatcttgtaccaagttttacatgaaactgggttatacaataaatccccaagaaggatgagaaacaagaaatgggggtggggggtatgaaaaatactaatgctaatacagcaactaacaacaccaaaagtgactttaaatatgttatataaatttaatctacctaacaaccccatgagagaagtacaattttcccccatttactaagaaggaaagttgaaagagactaagaagtctgtttaagaggcacaacttttattttatttatttatttgagacggagtttcactcttgttgcctaggctggagtgcaatggcgagatcttggctcactgcaacctccgcctcccgggttaagaggcacaacttctaagtgacagaggtaggatttgaatctaggcaccctgattcttacctctattttgccgcatataattataacaatattattactaacacaacaacgccgctgtagattgtagatccataggctacatactttcattcattttctttgaatactcacatgtctataatttacaaatgaaaacattaagactcttaagacgttaagaaacgtttccaggttatgcaagttacaagaaggtagagccgggattcgaactcagatggctcagattccgaaggctcttttcacggcaccccacacccgaacttgactccttaccctcaaccaagccaagccgtatccctcctgggaacagccggcaccacccactccagcctcgcgcctcatagacacacttactcgggcggcgttccaccgcccgcaccctcccagctctccccagcaccctcgtccagccgggcaaggctctcaccaggcgggagtcgtgggaccctcgcaatcttgctggtgatctctgcagtgagcaccgcgaagtcctgctcgtaaccttcgaagtcggacgacatggcggctccggaacgagtagcccaggccaaagcctaggtcagggaaagggcctcgaggggcagcgaggggccccgcggcttaggaaccccggaaggtgcccccgagagcagaacggagaaccggggacagctctcaacccagccgcttcctggttgttcgtcgcaatctcggttctccggaaattgggttgcgtgcgtgctttattttccgctccgactttaagataagtaagttcgcaaaggaaaagcgccccaattagtgcctccccccagaaaagcgtatgaaaatatgcaagttctgagggatcattagaagcgttttttccccccttcgtgttctgggaatcggctccggatccacacgctacaaggcacagcagcttgcttccggagggaggtttgaggcggcgaacctccggaagtgacagtaacagagactgcgcagggggcctgagcgggagagtcctggcgagggcgctggccgagaggtgctcggcttgtagcaggtcccgcactccagcctctcgctgccagggtttgctctctgcttgtcctgggctgaggtgtccatgacggagtcatccaaggaggaaaaaatctgttccgggtgagcccaggccgccccggatatgcgatggctgaggagcagacaccaggga

SEQ ID NO: 5987 - DNA, 2300 bp, Homo sapien
tctccagctcagtgccacttcgttaccgcaactttgctgtttttcacttattttgccagggtaagcacctaagttagagagaaatgttttttcgtgacgaggccccacagagttgagaatgaacacatcctcccgctccagtttctccccagaatgttctgccaaggacccaggccatagaggcatcctgggctgacacctgtgggggccctattatacccccagcgctgacaagcacttcggcatcctgtaccacattttcgcgttactctcccctgtctcatcccatcagaaaagaggagccaagaacatggctaggactcaccacctccttgagggatggggactgttgcaaaattcaacagacgtgcatcagccgcaggctgggagaccagcagagaccaaagcctgccagccccactccctgagcctctgaccagactgtccctccccgtgtttgcacctcttctggacacaggaagtggtcaaggccttgaccctttgagggatgccaggcccctgcgcagtgacaccctcgcggtggtggatgcctgaaaccccacccctagagaggccgtcctgtggtttctgccctggaacactggaaaaatgcagattcatttttccctagacagcttcagtcctaccagccacagatccctctaagtgagttgtctgaccctttcctgggggcagattttgggtttgggggaagacagacccactacatgagggagcctgagtggtctttgggagaaaggttagaaggaaagaggggcttggttccctaggaccagctccctggaggttgccccgtatcagctgccttcagccttgccttaaaacccactccctggccaggaccccgttcttctaaggattgcgttctggcttagggctgcatgcaggcaaacatgggagcctgagaatgggctctgcaaaggagcagtaatgggttgagggtctcctgacaggtcccacagccatgccctggctgagaaggatcgagaaagagcagggaggctgggttggagtttggacagctaaccctgggggcaggaaaattgtgtccctcctctggccctcctgaggctgaaggaagtccaaatccgctgtggtgtacaatttggcatttggggaaggacccaaaagggattcttttctgccctgagcagaccttccccacactgccacatccaggggtcttggcacagaggggacactgtggccgtcagagactctccgctcaatttccatcttctctcattcatccacacccacccttccagagctctacactgcatttctaaagaaagggagaaactcgagtgagaactagagggcttcactgagctcattattatccccgacaagacttctaaataatctagcctttccctgtttgaagcatgagaggtgtaagcagatttattcattcattcattcaatcaatatttattgagcatctactatgttccaggccccgaagacacatggtgaagaagatagataagaaaagaaagaaggtagtctcacagcactggaagtcagaaaactattttcctttccagaatcctgactcactccaatcccgggcaaggtcattctcagggtctcaaaatcacattgcgatgcctgtgcctctgccaccttctacactgccccctgagatgaatgcaccatcactgtgaattactaggcaaaatcttctccaagtggacaatgctgtatgttcattcctccttgcaatccccatgactgcattagcaaaggagccccgctgaggctgagtagggctgacacttgcctgcaggtgggcaggtccccatcagcactggccctacttccaggactggcctaggagaggccagggataggaatggggactgtttagatcggggccgacttggaggattttttcctcctgcttattaaatgttaaaggtttgacttggcaggcaatcaggagcccaaaatatcataaaagggaaaaaagttgccgagtggctaagaggtgcaccacgggagtgtcactgggcccgccggcgaggtgaattgctaagcagagagcagtgaacggggaggaaatggagcagcagacattttcaaaggcttctctccccttcttctcctctctctgtcccccatgcggaaaggggaaaatagaagtagaatccagattggggcgcgtggctgatttggtcctcctcccgcaccatcctcccccagacagcagagaaactttgatgtctgggtgcatggcattcagggacagaggagcctgggcatcccagcaaatg

SEQ ID NO: 5988 - DNA, 2300 bp, Homo sapien
ggtattcaggaaggcccccaggaggaggtgaccattgagatggattttgaagggcaaataggagttcactagccataaagggtagggggtcatctttcatggttggtagccatgatttgtgggtgggtctacctggtttaaaaacagaggagcaaagccaactttctacatgcagttcccaacatgcacacatattgatctgatggtggggtgaggccagcttctggacccatgaccaactttggaggtcatgacacccactgaggtcttggcaggaagcagccttagaaggcacaagtgctggtggaatcgaccagttacaaaagttatcaacactatgtgagtttttgtacatggtgtagcaagacagaaggaaccaaggaagaacaaatggaaaacaacacatgctaagctgttcatctgcaactgttaagactccaagtggtggcagtgccagctcagagccctccacctgctggagatgtttctaaattgtcttcacacatgggcattcatcccgcagtggggctctctctgcctgagccctgaggtaaggttacaagtcctgaaaccccatttgtggagacgacccctctagggagctggagcctggggcaacctcgctccttcctccacagtgaaatagactgaacctccagcacactgaccagcacaggtcttgaatggtgactcctggtctagggctggtcccttcttagaaaacccgcctttcgatgatggagggctctgcctgggtatccattggagggggcagccctgaggaaggaattacccctctgaaaagagctaatgtcattcttgtcactttaaattaactctagccaagagggactgacagaaacatggatctgggtgaactatatttgactgatattctgtcaaatattgcatggggttgtgatccgcaacttttcccatctgctgctccagtctgagtcgctgaatgcacaatggcatcattaccatattttgttcagatttccctccatcggatcagagcctgtgaatgtgaaatgtgcccacagaaaaaggcagccctggcgaggtgggtgcaagggcgagggtgtcccttagttcttcctaaggggagagctgggaaggggtagggctcccccggaaggcgtcccggccctcacccaggaaggtgcacatcctggaaacaaaagaggaaggtggtggatcaggagtaaggagtgggattaagatcacacaaacctgcagcctttagaaactagcttaatccattttataaagagttgggagggtttttctctccgtgaatataataccttgcacatctgatcagcgtttttcccagaacatttcaaagctctctgcaaatacagcaaagtctccttagattagagcacggcctattattacctggctttggagacaccccaggtcagcgggtcacctggggccttctgaaataagacaattccctacaacaaaaagcctggtgtgatgtggtttgtctaactagtggttttcgaactatgtgagtcatggcacctttaaaggaaaaaaaaaaaaagaaacagcctgaagctcaatttctaattcagaacaaagtgaaattaggttaaagtaaagggtaaagaagagggtgagggggagcaaagagaggtccacctgacaccccattcactaaacccccaagactcccaagaccacaatttgaagactactgtggaggtcactccttccccaaccagaagcagattttctgtgaagttaatgaaacttaagtttctgcagagcaccttctgttcctaggtacctcttccaagacttggaacttaattttatttctcttattttgtgttgtttttaaaatgagggccccccaaatcatataagtgtcacaaaagaccagctacataatttgggcagccaagtgcaaaataaaaacgtggggccctttgttcaaaaacaactaaaactttgaagatagcaacaccagcgccttcttggcacagggccctgtgcaactgtgcaggtggcatgtccatgaagccgaccctgatttcatgccctacgaaacctggatctgcccctttccccaactttccaaagaaatgccagttgattcaaataaacctcagcctctcctgagaattctcttatgccctagtgtgtcagattagtccaccttgcagcacctgagactgaagctcctcccaagacagaggcgcatgtttccttccgaactctgctttcacatggaagattggctttaagatgaaggcctgcatttgcaaacagaaactatagca

SEQ ID NO: 5989 - DNA, 2300 bp, Homo sapien
tccctcttagacactgcacctgccttatttatttatgaagtctgaaggttagtcctacctgctgagactaattagccctgtgctttgtatcctatgcaatcctgtctgattaaatgtacacatttgttttacttcttttcaggctccttctcactctacttctgatattctgattaatatcaaagttgggagttacagtgattctcctctgcctcccccccaacccatttttattttgcctgcatcttattctttagtgtgcaaatgtggttgtgatttttttccagtgcaggggaattcgttggccttgtcaatctcggtatcattatttttagtagtctttctgagactttagcctataaaacagttttgctgaaaccccaaactctctaaatattacatggcaaatttgctttcttttggaaacctcggtgctgatgggccagctgaagtgcaggtgagctttttcagggaagggtgggacaacagtacatcctggactctagactaatactactcctaagaggcaatttgctaaatcctactgatttatttttttcttttttctctttttcatgttgtagtgtccagtctacttcttactgggtatttgcaaaaatgaattttcttgctctatcacccaggaacattgtgttttgggagctgggtctttcctctttaacataattccattccccattttgtagcaaatcagtctgctcctcctctaatacctaaaagtcaacaaatacctgcctcaagccccaggtttcccatcttctcccgaaggtcttctagcatcggtttggttagcaatttcctgccagagccacctacatcttgattattttggtcagtctttcggggatttcatttcagacccccttcgagaaacactgtagcccaactgatcccaggggttggtgaactttcagttttattttccctgacggtgttaacgcccaaacttttcacctcctaagtcaaaaaggactttgactctagctcatttcctactacctccaacgtcagttaaaaaaaaaaaaaaaaaagcaaaacaccactctacatttaaaagaatcatatatttttccttaaggatacttttaatgtttctgacatttagcatttgttttttgcataaaaagtcgttttggcatatccatcctagtgggacttaacatttcatgaaatgattcactactaataaacaaaaaagggaggagggaggcctcatgggttaatagtttctttcattgtagatgaccaggaactttgaccagccccttcacttccccaagctctctgaaagtggagggttgatctttccttttgaccacttttgtcgcatcccgtctaagggtggctgatttcactgctgaattaaccaccaagcacccccccaccccctcccccagccaccactttctcaaatactacccttccttttccccctcccttaagacttatttctaatatttctaaagtgcactgttttgggcctctccccatccccgccccccaagtgggctttccttccgccttcctcggctcggattcctgacttggtcgccacccccttctcctcctctcccaccccgcattgtctttctgaaaccgccccctcccggagcaagtccctgcaccctcgcccagaatcccgggctcgcacacactccgcgcaggccgctccccctgcacactcctccctccgtctccccccggcttccccgcccctctcttcctccttctttccctcctccctctcccggcgcccgaaaggatcattgttagccgcccccgccccgcccaccccggctgtttatttatgcacacgtcactgggccggccccgccctccggcatctcattaaggcagtgtgttcctctcgccctgtcaataatctccgctcccagactactccgttcctccggatttcgatccccctttttctatctgtcaatcagcgccgcctttgaactgaaaagctctcagtctaacttcaactcactcaaatccgagcggcacgagcacctcctgtatcttcggcttccccccccctttgctctttatatctgacttcttgttgttgttggtgttttttttttttttaccccccttttttatttattatttttttgcacattgatcggatccttgggaacgagagaaaaaagaaacccaaactcacgcgtgcagaagatctccccccccttcccctcccctcctccctcttttcccctccccaggagaaaaagacccccaagcagaaaaaagttcaccttggactcgtctttttc

SEQ ID NO: 5990 - DNA, 2300 bp, Homo sapien
tgaaccctattctccttgtcagatggatatcaaaatagggctttcaaatggacttcaggatccttccatgggaattcatttgctacccattttcactcttattttagtgaccccctcccccaagacatataatatataaacacatacattgattttctttcttttttcttgtattactacaaggatcagtttcttctggcctaagtccagaaacaacatgcctgtcttttttcattgttgaggaaaaacagtctgaaggcaccataattccttaaattggatttcaattcttgatccccttatgttcggtaaacagagtgttatatgaaacatcattgtttaggagcaagaggctggcagccttgcttttttttgggtggaagggtcctcgattggagcctcctggggcgaggctgtgggtggggtcccctagaggtgaatgccccccccttcacttgggatggaggcattaatccctttccaaaaaatgctggtagaagttgggagggctgcctgttagtgagcagagtttagcttggaaagaagcctgtagtttgtgtgtgtgtgtgtgtgtgtgtgtgtgtgtgcattcttgttaactctattagtgccatgggcagccgctacttcacttgaaagctttggagtttctatattcaaatcaaagtcacccagaagcaaagatgaaggggacagtgtgatcttcaaagacgagggagtaaagaagtagtggggaatattttcctgggtaattctgcacccccgctcccacctttacagaaacactaagagccttagccacttcctctttcttggtggttatgtgggtactcaggctctggtcaagtcattggctgtttatggagcaggagacagatgacttgggaaagcaacatgaaaatgtcttgggttggttttgagcttgcatggggggagtgagtcagtagatgtttctcgggttctctctcttcctctcttgcctttcctcctttctttgagcttgtttcgctctgagagtacaggcttggcacccacttacccaagaactgattagttcctaaaagaagcagtgagttgattgcttacagagatgatgtaagctttgctctggggtacatcaacttggatttctcatgctttatcttataaagcctaaattaacagctggtttggtttgagttctctgggatctgactaagggattagagtccattctcaagtgagtcaatctagtttaatttatttcaggtctatcaaaaaagatcaatcaaagctcttttgaaagtaaagctataatcggtctgcacacttataagtcactgttgttgcacttggtgtttctctctggtggaaaaatgctcaggctgtggttaagaggatgtattagagcattttctgtgtacctccctttcttgcagcctccacacctccctgggaagattttgaggaagtgtcatgtttgagaaccccacttaagtgggagctgcactcacctccgtctcctttttctctgggcatactggatccctgttttggaagtttctagttcagtataattttaatacctggacctgaacaagtccagcctgttttatgtcactgtttttgctcctgggctttttcttgcagatattggtgggtgaagacatgcattgaattctttccagaatgtctgctgtgaagaattactcatgtcatttgcaaggcttaagctgaagcattcgctgctatggtcgatctaggcttttgtgggcactggaaacgacaacccgagttgttcatttcttttgtttctattttaaaaatacttaccgagcatcttctggtagctaagaactattcgagatacacttgatgtgccaagagaaacatcaagataaaggaggtagttaagagcttgactgtagagttagacctgtctttgaatcctagctttgctactttgtgactttatatgacctgcagcaaataaatctcagtttccttgtctgtaaaataggcatagtaaaactgtctccctccaaggattgttgtgataatgaaatgaaatgatactgtatcttttgctttttaaataagccacttctggggagcttccaggaagcagaagttttttttttttttttttcccccaaatgcattcaaaataaacaaatctccttttactaccataacggtgtatgtgaatgtcctggcggatgctctcaagagcgtcaacaatgtgggaaagagaagcaaacaccaggttcttctcaggtggagctccagagtcgtccagtttctaagtgtgatgatgaagc

SEQ ID NO: 5991 - DNA, 2300 bp, Homo sapien
gttgtttttacctgttgtaaatattaagaagcctaggcatgatgatgctctgaagacaggaaaatttgttttgtcccgatttgccacacggactcctgcctgcatctgcgttgatgtggccacacggagagctgctctgctcaggagatccagcccgggccagcagctttataatcagttctgatcgccaccctgcagggctgtttttggcattttaatgtcccttaagtactttcagaagaaagttttcaaggaaaacctgaattttttctttattggctgcacatgttagacatatgaagatgtgtttcactttacaaagtggggggaaccctcaacaatctttaagagatccctaaaaactgagggttgtttcagaaccatctaaatccaagaacgttggacctgttatacttattctggcagatggacccatccctttttttttctgagacagagtctcgctccatcgcccaggctggagtgcaatggtgtaatctcggctcactgcaacctctgcctctcgggtacaagcgattttcgtgcctcagttacccaagtagctgggattacaggtgtgtgccaccatgcccggctaatttttgtatttttagtagagatggagtttcaccatgttggccaggctggtcttgaaatcctgacctcaggtgaaccacccccctccgcctcccaaagtgctgggattacaagtgtgagcactgtgcctgatcgccatccttttattggtgagaagaaaagggagcaagatgaggttgacccctgcatcttatgtgtgtactgtctctgcctctgtacacacacacatgcaccacagacacaccacacacacacagcccacatacacagcccacatacatgcacacacaatttagggttttcccccttctcacaaaaatcctctttaacgtgatttttactaataaagttataaatgtctggggttagaagacagccaaagttttgggtggcgcaagagataattcatcccagactccacaccccttatgccatgaaaacttcacctctccgtttcaagctgagaaaccccacatacactgcagatacattacaaggcagctaccacatcaccaaaggccaagcagaaggcattgtggatgccctgggtatatactctctgacacagaggtgactgcctaagcagtcagatttgcgacagtgtgatcctttttggaattcatatactggggcaagtattggaaccaaggttgccagcgaatggggctggcaagtcttttttcaagtttccttgtgtgttcccattctgaacaaggtggtgtcaagttgatcctgcctgtgggaatgcattgttcttgaatatttatatctttgtatgctcccattgggatttctcctttcataatatctgaaaagaacttgttttcattaaagccatttcaatttcgtacatttttatgcaataatttagtgtttatggtgtctcttaaccaacatggcttgttttcataagcacccgagaaggtttaaataacattttctcataaattagccctcgtttgcacacttattcagttattgcatcatgaagaccctctggagtttgatgttgtcaggaaacatattagcagaaaatagtgtgttattatctaatgctgataattggttagtggaaatgagaaaagaggatatgtaattggggttcctgtggctaacaagatgtgaattatgaaagcatttccaggagaaattccaggggtgttccaggaacctgttatttacattttaaaacatttgattcccattgaaaggggaggagggcgctgtttaccaacactgctttctttttcagagcaaatccatctaaatttcctgagtggtagctagatctcctaatacacctagcccctatgttgttttgactttgcagtcccattttaggctgctaacgttctttttgtaagagatatgttggcttttaaagagaggattacctagtacacatcacaagtcctgatcagaccctcttctccctcttggccccgtgattctgcccagtaatgtttacagcacacaacacgcaccaatactacttcccaaaggctgcttgggagaaggagcgtacctttagcaagaatctcagtataagcacagtataatgctttcttcattagctagattcacaaagctttctgcagcctgtgctgcttgaacccgagcttctgcttaatgttcttccatagccagtcattgctgagtaaggtggatgggcttctgtgttatgcttaaacaagtgaaatcaa

SEQ ID NO: 5992 - DNA, 2300 bp, Homo sapien
ttgaacctcatccctgttgcggaaaacaaatgggagtgatagctggtgccagttagtgtatggatgtcctcgaaattagatgtgccttcaaaaagacttgatttaatgttagccaggtctgtttgaacttcattattactattattattttgagatggagtgtcgctctgttgcccaggctgcgcccaggctggagtgcagtggcatgatctcggctcactgcaacctctgcctcccaggttcaagcaattctcctgcctcagcctcctgagtatgtgggattacaggtgcctgccaccacgtctggctaatttttgtatttttagtagacacagggtttcaccatgttggccaggctggtctcgaactcttgacctcaagtggtctgcctgccttgacctcccaaagtgctgggattataggtgtgagccactaccattttttttttttttttgcgtgccttggttaatatctcaagttcagataatgttaaggttaaccacttcatcttattacctttcatcccagtaaagccttgaccttcacatataaaactaatttagtgtcaatacagttaaaaagtgtctcctttattcagaattacccatataatgtctttttttaataactttattccaaacttgaaaaaaattatctttacccatttttccctgtactgtttatgatacaacaattaaaaaaatcttatttccaatttctcaatatttgataggtacactttcccccccacaggaaaaaagaaacagttgacaaaactttgttttaaccagcaaacaccttttgaaatggtgctgcaaattcctattcatgatgccatatttctaaaacactttttcttggtcatgttgaacttttattcagtaaaagaaatcttcattctgcttgtgtgtgtgtgtgtgtgtgtgcacgtgcacacgcacatgcatgtggccttttctccttgaatgtgacttattttaataaatttaccctcttattatataatggccatgtccagaaatcggggtgcatcgcttctgtacgtagagagtcaaggtcctaacaaacccgcccctctgtgttctgctagccatacagaagtggagtgtgttggaggtggacacaacccttagaagtcatccagcagccagcatcctcatatgctgtgtcaagctgagccccagaaattcagagagtacagctagtcagtgggagggtggcagtggcagtgacactgaggccccatgctctgtctgtgcgaggttaaggaggggtgagcagtgctttgtaaaggtatgtgaaaaagtggtctctttctatgctcattctgttttgccttctgtttggagccttgtctttttctcaggtgaggtctttgagggctgaggtagacttcatttctgcatgccttgagtgcagagatggtgattacattccaactcgtgccaactttgagcagagtggctgtgtgctatggaggtagtaagggaagagggaggtgccatgtgtgacctggacacttgccattcgtgactctaggacactgccctccacatatactgatagacacacacacacacacacacacacacacacacacgtgcaagtgtgggcccatactcacaccttgccactcacaccttgccactcacacatgctcacattaaaaaaaaataataatgagaaaaaaggattgcatacatctgccatgtgagtgatgatatcccggtctggggaggaactgggcttgtctttacgataaaaatggtagcttatctggagccctgatggcagtttctttgcctttgcagtaagttgacagtgtatttcagatgtaattagttcccatcaaagttacctcatcttcagaggtgagaattatcgatggtgcataaagctggatcagtgtgacctgtaaagaccttacctgtctccaaggttacgcgtgtgtacgtggggttggctggtttggatggttgctctttgttttttggcatccttgtgtgtgaatacatgataagaaatatgaggatgttaccttctcaccaatttttaaaaattgtcagttcagtactttgcttttttagtggaatggcccttagcaatatccttcttttaaatggatttcttattgttccaaagatgtggcatttccaaaagaaaattcttccatttatgcatagaaccttgaactctagtctttaaaaatctaggctttagtttcagctcttttttagctgtgtggtcctggacaggcccttttacatctagacttggagatttaaagaaaatcataaaga

SEQ ID NO: 5993 - DNA, 2300 bp, Homo sapien
tcattaggccctctagttcccaccagaattggctttgtaaagagcagattgttattccttggatggtacattggactgctttggtttggacttattaagaaagcaacagttgccatgatcttcatctgaacagcttcccatctgctcacttgaatcaccttgccaggttggagcaggaggctgccatattgtttacttttgggattctgccctttctgtccctcactattttttctatagtaggatatgttgcttgaagaggggtgagtcttccaacccagtacaaatcatggtgacaccacgcaaaattgaaaatgagaaaggtgtttgatccagttgtcagtctgcagatgggccaagagtaggttgagattagctctttctgtcctggctaatgtacttggttgggaaatgccaattcaggtcctaaaatgtgccttagagaactgtccaaaaaatgagcagcatgagaggagaaaacacaaactgtatctttcatttataattttgataatcatttagaagacttcttaatgatgcctagacaacatatgaagtaaaagtgatataggaatcctaaattttagaggagaaagggcatacaaatcagaatcaaaggtttattgtgtgtgtgtgcacctttcctttcctttttttttttgcatctttccataaagggatagaaacttatttaaaatgtccatgacttatgatatgaaccaaataggaactatttgaattttccctgtcttcctgcctcactctctcccattcctgtcaaatgatgggacacagcacaaaagaaaaataaaaattgtattgcacttcatcaacaggatgaggcctaatgaggcttgcacagcattgtcaaaaatgtatgtatatttcaaccacgttaatattttatttagctgtcaatatacaacaaaagatttcacctttcattttagagctgattaggacttaggaaattgtcttcttagatgccactaataatgcctcaaaaaacaagtggacgtgcgatttctggcaggtagtccaagcccacttttccgcccaagtacgtcagttgaatttgtcttttgctaaagatgttaaaaatcataatgtcttatgtcagtagcaataatgaattggctttaatgacattatgagaatcattatgtttaatttatcgctaattaatgctgacaggtttcatatgccttgggttgctttcatgtgagtgttacgtgctgtttttttttttctttttaattgtgtgtacacatccctcctcattcattcattttgattctgacgatttacacagctttctgtcttctaggttccctccccatatggtcccaccacatcatacgctacacacgacgggcattccgcatccggccatagtcacaccaacagtcaaacaggaatcgtcccagagtgatgtcggctcactccatagttcgtaagtgttgctgtttttctcaccttcttcgtagccgcagtgttctgcaagcctgttgcagctgctgggtggtggctttctgcctaaggttggcctcgtttggtttgactgcagccaatacccagcctgtgtgggctcttcactcccttacaaagagagagagagtgcacagtggcagaatctcactgtaccaccgtgggttagaacagaactgttttttgtgtgtgtacttggatacactgggatttgcaaccacttccctgccccctaaccgcatcattgaacatttagagctttgttctgcaagcaggagaaaaccctgccgaggtgaagacagcaaccatgtgctttcccctctggcttgggaaaattgtatatttgtgaaacttgaggaagtgattgcaaaatccctctcttcccccaacccctccccaagctatttttgttccattttccggggtgcagaagaactaaaagcatgctttttaatccaaaactgctaggcttgggggttatgagacaaggagatacgttccctgccatggaggaagttggaccacgaccttgtttattgggttgcgtctgttttgtctatctccagaaagcatcaggactccaaaaaggaagaagaaaagaagaagccccacataaagaaacctcttaatgcattcatgttgtatatgaaggaaatgagagcaaaggtcgtagctgagtgcacgttgaaagaaagcgcggccatcaaccagatccttgggcggagggtaggtgacgcccttctcagggagaagcggggggcgggtggtgagggaccagagtgcagcaggtcaggtggcagaatgtctctgtc

SEQ ID NO: 5994 - DNA, 2300 bp, Homo sapien
ccacatcaccaatgcctggctcacagcagagcttctgtaagtatttgatgaatattaatggagtgttcatgaataagttgaagtgtgcttaaaatttcacaaatacttttagttttccacatccagtttttcctttcacattgagttggctatgctatctaaggcatcctggtgataacatgtccaactgtcacatggataaagtggtcattcatttgttcatttcatccaacataaacttattgagcgtctatccagtgctgggcatctatgccaaggattcaatggtgattgaaacagagtgcctgctctcctgagttttcagtctaatggggacaatgggaaacaaatattaatgaaatagcaatacggctgtgacattacaacctcataaatgctgtaaagaagaaatgcatgcagggcttctgaggaagtaatgtttgggctaagagatgaaagatgcattaactaggagagttaactaaattaacttgctcaggagtgagcagggttccagttaacaaatttatggttgtcataaggattaggggaaggacagagtagggctagagaagaactttctaggaaaagggactacagccaggcgcagtggcttatgcctataatcctagcactttgggagcctgaggcgggtggatcacctgaggtcaggagtttgagaccagcctggccaagatggcgaaatgccgtctctactaaaaatacaaaaattagccagccatggtggcatacacctgtattcccagctattcaggaggctgaggcaggagaatcacttgaatccaggaggcagaggttgcagtgagccaagatcacgccactgcacttcagcctggatgacagagtgagactctgtctcaaaataataataataataataataaaaagaaaaagggactactaacatgggcttgtattatggtgatcaggtggatgttgatggtataggaggcggggtggggggagttgatggctgcctaaaataggatggagacaaaaatatgtggataaaagaaaataatgtggaagtcatttaggaggtaaaatggcaggaccaggacttggctagtccttcaaggctcatctggtgactggggcattcttttgggctgggatctgtggggccctccccggctagcaacttggctttcagaagtagatgcagccactgatgcagtccacgtgccaaacagggatggcaggtaggggcagggctgggcaggggggcacaggtgagcacatgcctccgctggcagcagcatttcaaaacctggatttatgactcaagtcaggaggattcctggaacccaggcatagatttctgtgggcagtcagttgtttacaggagattaagatcatgcctattaaagagatcaattgtgtccacaagaacccacacttaataggtaattgctgcttgacagaactctacctgcaaccagcatagctaaataaggaacataggaaacaattgtcctgaaatatgaacaccatgttttttttcctccgcttgatcaaagaaagactccagcaaaaggggaaaaaataattaaaaagtaaaagtcttacctaatgaggtttaaaacaaaacttttgaagccaacaagcaactgtgggcaacacttcaaagggcccagaatcaatgtttgtcaatagcagttttgcatcctttaatttatgtctcatgaatataaagtgtgatgttattaggagcccatccatgccttaattctgtttgagatttgatgaaccagaagtctattaacattctgtacaaatcagcactggcagaggcctgtggcacaggcttcacctgatcttttatcctgaggctgggatgctagtcacgctgtcaggcttcctgctcggaacacccagcagctgtcatgtgcaccgtggagccagggggctatgtcagctactttctttggagagtttctccccagaagagaaaccacttcatgactcagcccagccccaaagttgccatttgtttaatcaagatagttagtttgcaaaacattaaacattaaacagtatttgatgcctagttaataatttgcatcctcttcatttgttcctgaatccttggagactgacatttttcccccctaaaggcatagacaacaaaagaaattttattgagaggaaaacacaagtccttaaactgcaaagatgtttgccaggatgtctgatctccatgttctgctgttaatggctctggtgggaaagacagcctgtggggtaagtgttcttttctaatatttgtagttgagaga

SEQ ID NO: 5995 - DNA, 2300 bp, Homo sapien
ggtctcgaactcctgaccttagatgatccatccacctcagcctcctacagtgctgggattacaggcatgaaccaccacgcctggccctaagttttgtatttttagtagagacgaggtttcaccatgttggccaggctggtctcgaactcctgacctggtgatccactggcctcatccactcaaagtgctgagattataggcatcagccaccacgcctggctcatagacccatttctaatcataagaatggatgtttttgtacaagatgaggccatccagggcagcattggtgtgattcacctgtggaaaggatcctggggctttagtaaagggtacaggcctgggtttggagatgtcccttccacctcccttctcctaaatttcccaggtctttgtatgatctttatgctctgtcctcaaggacaaagtctacgatataaggaacctcaggagtattcttaaatttatttttctttccctggcctattattcagcaaagcacattgccattccttacatattccttttacatcactcgatttgactcctgaatgattgtctttattgaaataaacatcttccccaagactggagatgtatccatgacacaatgaacggttttttgctattgtgtttcctcaactatcgttgagggacttccagcactgcagaaatgcacagcacttatctcttgcattattattattatatttttttggcctagcgcctctataaagcagctggagaggatgcaagacacgagtatacaatgaccctgggtctgcccgagttcatccgagcaaaaacgaatgcagccaacctgagtgacgtaagcccttttgttacttaagttcaagcatgctccaaagccatgtatgtctacatctgtgaagtaacccaacactgacctttctggccttcacagaagctttttaaaatgtgtagcttagatgctcatgttaaatacaccttctcacaaatatgagtccatgagtgtacccagggtgtgtactaatgagatttgctgcacaaaacagaaattgattctggaacactgtgctataaatgaaaggggtggcctttgctcgttgattcatgtaattttttaaaaaagatttacatgtgttcccactttaggcaagatacaaagagtcctggcgtaatcttcgtgctcaaggctacaagctgacaatagaagcgctccccttccaggctgcccgggcctctggagatatagccagtgatgtgagttgaatgatatgaccttccatcttgcctaatttctgttaacttcatgtaaaacaatgtctacggctgattttcctgaattaaagcaaatctataaccatgtgagacaggatgtcacctgcagaatatattagttatgaatgagattctttgaggggggaaaagaaaggctctattaatcagaagctaaattcaggcaaaggtctctagcaggaaggagatgatgatttatttctaattgcaacgtctaggcgacggtccccttgtaatgcatgactgcctgtcttctaactccacccagatttagaacgagaactctcaatagaaattgcaatacagccggaacacatctccctcttggctctctgtagtttcacgcattggtgttaggatttgatggctgtgtttcagccactctgttgataacgtccatagctttgggacatgaaggtgactttctctttcccacaaacaaatcacagaaaaatgtggacttcaaataaatggatcctgtcttttgggtttaatgttttgccaagtgcgaacggataaagcacaagtttctctttcaccctttttgataaattccttttggccataggacatgtaaggggagtgaagcccttcctttagttctgaggatctgattttaattagataggaagaatggagcgatgttttaattgttcatcccccagggaggaaggcacactctcaggccagccccactgtggtttttcttataatcatcacctcctagtgtaagaacaagtgatttttctagagtctgcaatgaaaacgcacagatagaatttgaccggccagccctttcttgcagtttctctacagacatgactttgtgaaggagcgagggaaactcatagggccccagagtgtaagagacgacccccggatccagcactgccggcgcatgggccagctgcagagcgagcttcagtacaggaggggggcgaccagcagccaagcccagttccatctgcccatggacatggtgcacctggtccatgccaagaatgcccaggctctggcca

SEQ ID NO: 5996 - DNA, 2300 bp, Homo sapien
tagaagacccaaactaagatatgtaaacaactgcgacaaagtatttgaagcctataaaaagaatccttttctaagtgtgtatcctacagtattttactagtataacctaattttgagatgttttctttgcaccaggtagaaatactttaatgttaattgacatgaggttattcttaaattgaaacaaatattaacctgaaggcacctaggatataaagatggaggaagcagaataataattgtgttcacaaattcactctaatctcaagcaacctatgattttctctttcaaatggcatgaaagagcagcacaaaattcacagctttgatctttttctgctcaacagaagaagtaccgtcagcatccagatgctttgaagtttaccagtattaaagacactccggagatggtccaggccagaattagttatacccaagcagtggatgtaagtgataatgtatatacattatgactctaagagtgggctcttctttcaacactgcgattgaagcggaggggttcttgggtttgctccttctgttgtcctaaggatgaaggcgctccctgtcctttgcagaggctcccttagcggggggtgcttcctcattaggatgcaaatgggggtgttactgcacttagaatgccaagtggggctccaccaccccactgccccaagatgctctccctccttcccatttgcatgtctcaccgattcattcgtggtgaggctgttttctcctctccttttgcctgaaagtgttgttttcagaactgggtgaaattcttggtaattggaatcctgacgctgtgcttagagctctttaggacccaagggcagcaattgttgctctatgaatttcccagagactttgaacatgatttgggtctgatttatatacatcagactaactttcaagccatttcccatactcctttatgatgcaaaaccaagatttgacccttttccctctgtgggaaaggttggctggggtgcagggttgcagggtcggctggagactaaagtgaacgatgaggtgctgaaaaaaaacactttgtgatgtagattaaccctgtttggctgattctgctaagagatacccatggatctttgtgcagggcaaacctggcttttaaataccttcaaaccattcaactttccatggggaaaatttacaaaccttgggggcatagctttcaaaattctcttccttgtttcccaattgagcaaatgattctggttgcgctttatttgacaggcattctgaaacagcctgagtgcctgtcagaatctgggatgggatgatttacaagcttatggatttaggaatttataacttcttcataatcagcccatcagaatcaaactgaattctgagaaacacagatggtcaaacaagaacttttgtatgaagaaaaacaatacctgtttcttccttatcctagccaactctagggggcactgctgtgatacgtagaaacttggatacatctgataagatttgggatggaaaaaccctgtttggaaactttctctggtggctgatgccaactgcatgtgtcattattaactatcagggtatccgaagcttgggtcagagttctgggtaaatagagtcccagatccacccaggagacatgtcttaggggaagaatatttgagacgggggaacggaggaggattgagatagggaggagaaaacctcacctgtacaagagccatcttctttctcgccttctgtatcttgatgccatctcatagctgatagttaatcaccaaattattactaggtgttaagtaaacctcgttttctcatttgacacccatctcagcagtttactatgagtggggcgttcactgaggggaatgcttcagcttgtcatgttctgagctaggaagcagagcttggaaatgacatgcgtgtcaccgtgctagctgtaaaatctgggtggaggcagggtgcccgaaatcatgtctctatgaggaggtggcagctgcagcagcttggactcttgaagcgtaacctggctgatggctgcatggaatggggtctaggtttcatgcaaaacctccttccatccacagagattatacagggaacaaggagaaaacataaagcatcattacacaccgactgctgacctccctgaagtcctgctggccaagctgaatgccatgaatatcagtgaggtgaggctgacccaaggggcacgagttttaatgacgggagagcggggctggtcatgggcaggcacacaatgccctgtgctcagaagcccctgagctggtttcatgttctgc

SEQ ID NO: 5997 - DNA, 2300 bp, Homo sapien
aaattacttaatttctctctttcttggcttctcgtttgtaaagtgaggaaaacattagtcctgccaaatatgattgttatggagattaagcaagttaatatttgttggagtgtggcagtccctggcacactcctggacttagcacattggcatagatgctttttgaggaggagcccatgaaacaagccacagaagacttgccacaggtttgcattgagtgtagcctgatggtgcagctttaggagagccacagggagaggtcactgaggaggctgtgaggtgggtgcacccttgactctactgtcttctcatcaggtggagtataagagagggcatgatgaacgcatctccaggttctccacggtggtggatactcctgagctgctacggagcaaggctggggcacagcttcaaagtgatgtaagaaaggagggaggccagtccatcactgatgggcatttgggttgattcctcatctttgctcttgtgaatagtgctgcaatgaacatacacgtgcatgtatctttataatagaatgataaaaaggaacaagatcatgtcctttgcagggacacagatggagctggaggccattatcctcagcagactaatacaggaacagaaaaccaaacaccccatgttctcacttataagtgggagctgagcaatgagaacacatggacacagggaggggaacaacacacactggggcccacagaggggagttgaggggagggacagcatcaggataaatagctaatgcatgccgggcttaatacctaggtgatgggctgatacgtacagcaaaccaccatggcacacatttacctacgtaacaaacctgcacgtcctgcacatgtattctagaacttaaattaaattaaattaataaaaaagagagagaaatgaggaaggccaagatgtagtggtttgcacttaagatccctcattctttccttgcttggaggtggagggagggagaatgtatgagacattttagtcctgcatgggtaacaagaagaaattcctgaggtcaaggatggttgggcttgataagtcagttagcagagaccttgcaaaaacacttctttaaagagaaaactttagattggattagtaccaaattggatgtatctcagttatctgagagaaatctctcttgccactacaaattagagaacataatttctaaacaacttttaccacttgcctttacataatccaaatgttgcacagcataataagatcaagaacttagtgttgttctgaatgggacattgaagcacaaatccagcttctgcgtcatacatggtttcctcttgctttagccttaatctggggttgagaagactcttgtgtctcccaaaaatggctgacaactccttgagggctgaggacttattactctgcccaggcccagtgcctggcccacaccaggtgcttagcaagcatgtgttgaactccacattgggtgtctccatgtgccaggcactgtgctgggtattgggaataagaagatgaataagatgcacatggcccatcaaactgtaagccaattatgtgccttatgagctatgacaggagatgggcaggatgtcatggaacccttagcagagcatctcactaagatcatctgataaacatggggcatgtgattcacatgttttttcatttcaggtgagatacacagaggactatgaacaacaaagagggaaaggcagtttccctgcgatgatcacacccgcctatcagatagccaaaagagccaatgagctggcaagtgatgtaagtgtccttgacaatgtggtcatgttagggagaaagaggaatgtgaacctgggtctgaggagtccaacttcctgttgacttttgcatttaccctgaagccagggagtagttttcctttatagttttaagtcaattttaccaatgacaatgacctggcacttttatgtctgagacatacctactccctagatccaagcagaaaaagaacattccattaagacattcacttttactcttttggctcctgtgcatgggagtcaaattcaccgagtttgtcctttgccttaaaacaggtgaggtaccatcaacaatatcaaaaagaaatgaggggaatggctggtccagccattggagctgagggcatcttgacaagggaatgtgcagaccaatatggccaggtatgtgataaaatgatctcctgacctgctcttttccatgtttggcccattctaggctgtgacacagctatgacaatttaatcaggggtggggctttggtttatctttaccttt

SEQ ID NO: 5998 - DNA, 2300 bp, Homo sapien
tggagaacccaggctaagactgatgttatctgaaccaactcctaaggccaaaggaatgtggtatgctcactgacttggcttggacggcctgctgtaatccctgcgtcaagtgggaggggcttaggccaaggagcaggaggggctgtatataacatgagaagggtggtgtgaaccaaccaagactcgactacacagtgaagtctgtgtttgtcttgccccagaaatgagtgtttacttctagttccttaaactatcccatttctagttctatggggttgtttctcctagcaatttctgatgtctaataaatcagaagtgatggtacaaatccagtttagcatcttgcattttgtaattcttgtgttcacaaatgtgaccaacccgttttaacggctacagattgcaatcacaagcttaggcagagaaggaacgttgcaagcttcttttttaagtgaaatcctcctgattcctcagccctccggactggggtacagttcatttcagtgattattggagcttccaccccacccactaagtaaggcttgagaagcctggtgcagagcaaaacaaccggggaaccctgcaggtctttgtgctgtgcccattgctgttctcatttgcaggctggtggcagccctcctgcccaatcacgtttcagtgtgggagtctttgctgagcctggagtccctgctttgagtcccctccccatgctgagagagccctagccccatgtgggaaaacctgagactccgccttccccttatactcatgtggacttgaatgctactcttcttcattggctttagagcttcttcctaccccctggctatctcagcacaaccccaaaatactactcatcttactccaccctacctggggacaccaacctaacctcagaacatttagggccaaggtcacaaattggtaacctgctggccaaatactgcccacgactctgttatattgttttatatacaaaaaggggaatttcatttgtaaatgcagacttctggtgtgctcagaatatttggaaaatattccggaaaaatcaggatatttggcaacctggaatgttgattgtttcatgatgacagttggctgggactgaggagcagttgcctgcttcagatgggatgagtgctcatctatttggaaaagttcctaccattatctagacttcatacctggcctctataggcattttggtgtgagtattaaatttatttcattaatccaataaatctttattaagcaccttttattggcagaccttgttctaggcatgggggatatagaagtggcaaaaaggaccaaagatcctgtttagacagaactcatattttgatgggagagacacaatttttaaaaatagaaacattaacatgtaatatgtccagctgtgattaccactatgaagaccatcaagcaggctaagagtaatggaagataatgagataggagtggggacaggtgaggtgccattttgtatcaggtatttctataaggtgataaggtgacatttcagcagagactgaaggcaatgagaggcttcccaaagccaggaagagagattctgtcttcatatcacctcttttaaggcctgtgaggcaagggaacaagcacaaaggccttcttggaacattctagaataaaatacagaggccaaaacaccaagagttctcattagtttttagttttgcgttccagtagaagctaaacacaaactaacaccttattaagtttttagtttaactgttgtaaacgctttgggtaggtaaagttaaaattcaagtgtgatatttatccatttaaaggagtgaatcaatcctattttattttctatatttttgggagctggcctttctgctttagtcataggacgcatagagcaagcttttctaatttgattgttggatgacggtgtggcatcttcctttaggttcttttcttgggtcatgatcacagctagtgctaaaccactccatgctgcctgatcatacaccagggtttggttatccacataaacatgatgctgttgtgagttcatttttctatttagagaagcatgtcagctagaaatacttccaccttatttcccagacacatgcgtgctgagtgagtggccaaaatagccccttgagtaagtggcagctttaaaaaccatccaactgctgacttcaaactagaaggtcagcaaaggaaagtggaagttggattctgaaagatcgaggtgcccacaggaattttatggtcgtcggattttgaagacttgaactagactgggggttctccttgcattt

SEQ ID NO: 5999 - DNA, 2300 bp, Homo sapien
gtttattgcggcactattcacaatagcaaagacttggaaccaagccaaatgtccaacaatgatagactggattaagaaaatgtggcacatatacaccatggaatactatgcagccataaaaaatgatgagttcgtgtcctttgtagggacatggatgaagctggaaaccatcattgtcagcaaactatcgcaagggcaaaaaaccaaacaccgcatgttctcactcataggtgggaattgaacaatgagaacacatggacacaggaaggggaacatcacacaccggggcctgttgcgggtggggggaggggagagggatagcattaggagatatatctaatgttaaataacgagttaatgggtgcagcacaccaacatggcacatgtatacatttgtaactaacctgcacgttgtgctcatgtaccctaaaacttaaagtataataaaaattaaaataaaataaaggcaatttgattctacttctgccactagcaaatctgtgacgggggcaacttcgctgagcctcagattctttataaaatgaacagagattagttgtaaaagcctcttttagttctaacactgattcactatatttcaggaataacctgcaagatcctagatttacaaattagataaatcaaagagtaatttaattgctttactaatagtattctttgtttctcagatgactcacaatcgaatttattttattttattttattttgtttttgagacagagtctcgctctgtcgcccaggctggagtgcagtggcgcgatctcggctcactgcaagctcctcctcctgggttcccgccattctcctgcctcagcctcccgagtagctgggactgcaggcgcccgccaccatgcctggctaatttttttgtattttcagtagggacagggtttcaccgtgttagccaggatggtcttgattttctgacctcgtgatacgcccgcctcggccttccaaagtgctgagattacagacgtaagccaccgcgcctggccttgaatttctttacaaagcaaattatcttagcgtctaaatggcttactttacctccaacattttgggaacatgggtattaaaaaaagactagggcagccacattagaaattgtgtcactgctggttaaaaatattcagggattcaggattttcccgtaagttaatcaattataattattcccttacacttgccaggggtcagtctttttttttcaaaccaaggaagcatcctcacctggagagatttgagcgacaaatactgaagtctcaggcccacgggaaagcaagcaaacagaaagagaagatggcgttcttgcctggtatccgaccactaagcatgtactccattcacgcaaggatttggtggttcctaaaagtaaatactgtgtctctgatatgaataaaactacaatttcttctcagatattttacacctcagtgtgattgagtttagttgcttccctgagccagggtgaagaaagacgtgtgtgtgtgtgtgtgtgtgtgtgtgtgtgtgtgtgtgttgtggggtcagggtgaactaggtgcgtgtgtgtgtatgaatccgtgtgtgtggtgggtttcatgaactagaatctgtgtgtttgtgtgtgggtgtgttgggtcggggtgaacttgaatccgtgtgtgtgtgtgttgtggggtcagggtaaactggaatgcgtgtgtgtgtgtgttgtggggtcagggtgaactggaatgcctgtgtatgtcttttgtggggtcagggtgaactggaatgcctgtgtatgtcttttgtggggtcagggtgaacgggaatccgtgtgtgtgtgtgtttggtcagggtgaactggataactggaatccgtgtgtgtgtgtgtgtgttttgtggggtcagggtgaactggaatccgtgtgtccgtgtgtgtgtgtgtgtgtgtgtgtgtgtgtgcgtatgctgtggggttggggtgaactagaatccgtggaagtgctcagtctctcccgtgtttgactgactcccggccgcatacccagtccctgacacacgggggcgcacaacaaatatttcccgaaagatccaggagcagcatctccaccagcaagctgggctgctgggtgggtacttccttcaaagctgagggagcgtcctacgcccacgcgcgcaggagggcgccccccgcaaagcaacgtctaggagaccacagtggatgccacagcgggcccgaagcggatcagccttgtggggtacgcatgctaatgtaggcgtggagtcccccagggggacgccagcagttccag

SEQ ID NO: 6000 - DNA, 2300 bp, Homo sapien
ggcaatttgattctacttctgccactagcaaatctgtgacgggggcaacttcgctgagcctcagattctttataaaatgaacagagattagttgtaaaagcctcttttagttctaacactgattcactatatttcaggaataacctgcaagatcctagatttacaaattagataaatcaaagagtaatttaattgctttactaatagtattctttgtttctcagatgactcacaatcgaatttattttattttattttattttgtttttgagacagagtctcgctctgtcgcccaggctggagtgcagtggcgcgatctcggctcactgcaagctcctcctcctgggttcccgccattctcctgcctcagcctcccgagtagctgggactgcaggcgcccgccaccatgcctggctaatttttttgtattttcagtagggacagggtttcaccgtgttagccaggatggtcttgattttctgacctcgtgatacgcccgcctcggccttccaaagtgctgagattacagacgtaagccaccgcgcctggccttgaatttctttacaaagcaaattatcttagcgtctaaatggcttactttacctccaacattttgggaacatgggtattaaaaaaagactagggcagccacattagaaattgtgtcactgctggttaaaaatattcagggattcaggattttcccgtaagttaatcaattataattattcccttacacttgccaggggtcagtctttttttttcaaaccaaggaagcatcctcacctggagagatttgagcgacaaatactgaagtctcaggcccacgggaaagcaagcaaacagaaagagaagatggcgttcttgcctggtatccgaccactaagcatgtactccattcacgcaaggatttggtggttcctaaaagtaaatactgtgtctctgatatgaataaaactacaatttcttctcagatattttacacctcagtgtgattgagtttagttgcttccctgagccagggtgaagaaagacgtgtgtgtgtgtgtgtgtgtgtgtgtgtgtgtgtgtgtgttgtggggtcagggtgaactaggtgcgtgtgtgtgtatgaatccgtgtgtgtggtgggtttcatgaactagaatctgtgtgtttgtgtgtgggtgtgttgggtcggggtgaacttgaatccgtgtgtgtgtgtgttgtggggtcagggtaaactggaatgcgtgtgtgtgtgtgttgtggggtcagggtgaactggaatgcctgtgtatgtcttttgtggggtcagggtgaactggaatgcctgtgtatgtcttttgtggggtcagggtgaacgggaatccgtgtgtgtgtgtgtttggtcagggtgaactggataactggaatccgtgtgtgtgtgtgtgtgttttgtggggtcagggtgaactggaatccgtgtgtccgtgtgtgtgtgtgtgtgtgtgtgtgtgtgtgcgtatgctgtggggttggggtgaactagaatccgtggaagtgctcagtctctcccgtgtttgactgactcccggccgcatacccagtccctgacacacgggggcgcacaacaaatatttcccgaaagatccaggagcagcatctccaccagcaagctgggctgctgggtgggtacttccttcaaagctgagggagcgtcctacgcccacgcgcgcaggagggcgccccccgcaaagcaacgtctaggagaccacagtggatgccacagcgggcccgaagcggatcagccttgtggggtacgcatgctaatgtaggcgtggagtcccccagggggacgccagcagttccagctgggatccaggtttcgctaggggagagcctctggctatgggaaaggggtctccgagttgatgtgaaggcccaggtcgaggtgtacactgggggcggggaagtggaggtgaccacacgagcgccccatcactgagcgccgccgcgaaatctgcgctctttgggtcacttggagcgcggccagtttggcagatttgtttttttcccggaacaacccgcggcggctcggctgtcccgggaaactgcaaactttgctgtgcgcgttctcccgcgcgcgggctcaactttgtagagcgaggggccaacttggcagagcgcgcggccagctttgcagagagcgccctccagggactatgcgtgcggggacacgggtcgctttgggctcttccacccctgcggagcgcactaccccgagccaggggcggtgcaagccccgcccggccctacccagggcggctcctccctcc

SEQ ID NO: 6001 - DNA, 2300 bp, Homo sapien
acttttaaaaacctatgcttggccgggcgcggtggctcacgcctgtaatcccagcactttgggaggccgaggcgggcggatcacgaggtcaggagatcgagaccatcctggctaacacggtgaaaccccgtctctgctaaaaatacaaaaaattagccgggcgtggtagcgggcgcctgtagtcccagctactcgggaggctgaggcaggagaatggcgtgaacccgggaggcggagcttgcagtgagccgagatcgcgccactgcactccagcctgggcgacagagctagactccgtctcaaaaaaaaaaaaaaaaaaaaaaaacctatgcttgtgtttcataggtatgtttgttttgcaagtttagtatttggtgtctgtgccagtttttgtttgcttttcagtttatatttcatgggtttatctacagtacaaatagctttgttaggcttcttcctccaaagagttttgtaatactattggaaaaataatacaaaaaagcctagaatagggtgggttggatgggtgggtaggtggagggacagacagatgaacaggttgctgatggaaagcacatctaactgtttcatcggtatcctttccaaaggaacacaagtcttacagtaattttccctcttcccctttttggttaggtctctatattataacaataggctgtctggactttatagttcccaagtaagtggaaatcagcacaagctttttatgaactacttagagctacaactggtatctgattaaaattctaatgtaaagacattaagactatctccagaattatcaaaagttagcccaaaagaacatccaggaaattctgttaggtctatctctgtcttgttataaagaaatacctgagatttgataatttataaagaaaagaggtttaattggcccatggttctgcaagctgtacaggaagcatagtcctggcatctctcagcttctgagaagacctcagggggctttcttttacgcatggtggaaggtgaggcgggagtagccatgtcacctggtgggagtgggagcagtagagttgggggagatgccacacacttttaaataaagacctcagtacaactcactatctcagacacagaaccaagccatgagggatccacccccaggacccaacacctccagccagactccacctccatcactggggattacatctcaacatgagatttggaggggacatccaaactatatcaaaattaagaaattgtttttcctaaatcaagcaaaactggtcctgtgcaggaagcaaacaatatatcaataatttctgtatgcctgaagtccagctaggtttgctaaatgaagaaaccaataacatctaccctccataggatgcaaaagagaaaaacaaagaaataccctctgttgaatgctaactgtggataaagcactgtgctagatgctttttatatgtgaaattttacttaactttaaaaaaaaatcctgtgaagtcagtattatctgttccattttgcagatgaggaaacagactcagagaactccagttaacttgccaagaccacacaatggatccatggcagagctgattccagaccagctaccctcgtgaggatgaggattcaaatgatgtacttttacttctaaaggcagtagaacaggataaaattcatcatcacttcttcctctcccctagaaatctgtaatacacatgaaaatatacctaagaccctttggtggctggataccactcaccaggtctaagaatgatggtttgctcaattgctgttggtggctgtgcaggggaacatgcctagcgccaccctgttgatggtaacactctgtcatggctgaatgagcaactcttcctggaaaccattggcatgtacaagtgtttagagaagccaggcttttgtttcctcatctggtacaaaggaaccctttctacccttcccaggaagacattggttaagatatggctgagggaggcatagggattttttttcaatggtagtcaccacagacggttgagggtaaattggcgttgttctcaataagggttattgtgaccatggtccaaagtctggcaggaatttttttttattattaatgtgtttgctttcatttttggtgctaggcagctgggacaccaaggagagttctgtggcaagccacaagtatgaaggcccagaacttcccctgagggcatagcttccatttcagtttggggcaagaataaaatctgctcaaggatattagtttgggaacttcctggtggttcagatttcaagcagagtttgtg

SEQ ID NO: 6002 - DNA, 2300 bp, Homo sapien
tttccctcttcccctttttggttaggtctctatattataacaataggctgtctggactttatagttcccaagtaagtggaaatcagcacaagctttttatgaactacttagagctacaactggtatctgattaaaattctaatgtaaagacattaagactatctccagaattatcaaaagttagcccaaaagaacatccaggaaattctgttaggtctatctctgtcttgttataaagaaatacctgagatttgataatttataaagaaaagaggtttaattggcccatggttctgcaagctgtacaggaagcatagtcctggcatctctcagcttctgagaagacctcagggggctttcttttacgcatggtggaaggtgaggcgggagtagccatgtcacctggtgggagtgggagcagtagagttgggggagatgccacacacttttaaataaagacctcagtacaactcactatctcagacacagaaccaagccatgagggatccacccccaggacccaacacctccagccagactccacctccatcactggggattacatctcaacatgagatttggaggggacatccaaactatatcaaaattaagaaattgtttttcctaaatcaagcaaaactggtcctgtgcaggaagcaaacaatatatcaataatttctgtatgcctgaagtccagctaggtttgctaaatgaagaaaccaataacatctaccctccataggatgcaaaagagaaaaacaaagaaataccctctgttgaatgctaactgtggataaagcactgtgctagatgctttttatatgtgaaattttacttaactttaaaaaaaaatcctgtgaagtcagtattatctgttccattttgcagatgaggaaacagactcagagaactccagttaacttgccaagaccacacaatggatccatggcagagctgattccagaccagctaccctcgtgaggatgaggattcaaatgatgtacttttacttctaaaggcagtagaacaggataaaattcatcatcacttcttcctctcccctagaaatctgtaatacacatgaaaatatacctaagaccctttggtggctggataccactcaccaggtctaagaatgatggtttgctcaattgctgttggtggctgtgcaggggaacatgcctagcgccaccctgttgatggtaacactctgtcatggctgaatgagcaactcttcctggaaaccattggcatgtacaagtgtttagagaagccaggcttttgtttcctcatctggtacaaaggaaccctttctacccttcccaggaagacattggttaagatatggctgagggaggcatagggattttttttcaatggtagtcaccacagacggttgagggtaaattggcgttgttctcaataagggttattgtgaccatggtccaaagtctggcaggaatttttttttattattaatgtgtttgctttcatttttggtgctaggcagctgggacaccaaggagagttctgtggcaagccacaagtatgaaggcccagaacttcccctgagggcatagcttccatttcagtttggggcaagaataaaatctgctcaaggatattagtttgggaacttcctggtggttcagatttcaagcagagtttgtgcttaatcctcacccaggcaccaaggctcagagtcagcaggagtgagttcaggaatcctcgggacaaggcactttcctgagcactggaccagcgacctcttggcttccagtaagtactgcttggtgtatctggtttggacttccaaggctgggatgatctagaagcttttttgcaattgaacaattgcaaaattggaaatggaaaattttgcagatatgctgtatttctgttatgggcactttcttcataagcttcctaggctatactatagtcagagggaaataggactgacctcttggtatactgtattcaccaaatccaaaataatgttataataaatgggtcaggcagtgactgtggggagattctcctgaatgagatcaaacagctaaatcagaaaggctttcttttttgtttgggggcaatgacaagaaaaacaagcagaactatgaaaagacttaattctactttcttagataggaggaaaagcaaagtagttaaggccagctctcaagctagaattctggttctgcttctttttaattacatgatcaaagtaaagttgtttaatctctccgataaccatttcctcgtctgtaaatgggcattgtatcattgtgaaaacagtg

SEQ ID NO: 6003 - DNA, 2300 bp, Homo sapien
tatggcccagaatacatctatattaataaatgttgcatgtgcccttgagaagaatgtatactctattgtcattgagtggaatgttctataaatatcaatcagttaaagttggttggtagtgttgttcaagcctactgtattcttgctgattttctacaaaattgaagagaagggaatatttctctactcattctatgaggccagcattactcttcttgaatgaaaactcttagcaaacttattatttaaaacattaaaaatgcatccaaaatttaaaaaatcaattttagcactatttgttctatcagttcttgagagagggatattgaaatctctataattgcggatgtgtccatttattcatgcagttctatcagtttttgcttcatgtattttgaagctatgttataagggcatatatgtttaaatttttatgtcctcttaggattaattcatccctttattatgaaatgatattctttgtccttggtaatattatttgctttaaaatctacattgatgttaatataggcactccagctttctttgactagcgttggcatagcatatctttttttccagttatttccttgtaacccacttgtatcttcatctttaaagtgtgtttcttacaggcagcatagagttgagtcttgcttttttatccaatctggtcatctctgttttttaattgaggtgtttagaccatttacgtttaacataattactgatatagtcaggtttaaatgtatcatattgttatttattttctgtttgtcctatttgttgtttgttctccctttcccccttttctgccttcttttggaataatcgaattttttatgaatccattttatctcctttgttggcttattagtcattactttctgttttgttattttagtgattgctttagggtttatacacatcacagtctaacttcaagtgatagtataccaattcacatataataaaagaactttacaaaagcgtatttccatttttccctattggcctttatgctactgttggaatgcattttacttgtacatatgttataatctgcacaatacattgtctttatttttgttcagttaatgttttaatgttttcaataataagaaaataatttcatacatttaccccagtagttaccatttcagtgctttcaatttgtttaaattcagatttttatgttatcatttcccttcttcctggacttcccttcacattttttatactgcaagcctcctaatgatgaattatttcagcctttatatatctaaaaagtctttaaattgccttcatttttaaaagacatttttgctgaatatagaattttgaatgagagtattttttcagtactttaaatatagtttgcttgtttgtttgtttgttttgagatggagtctcactctatcgcccaggctggagtgcagtggcgctatctcggctcactgcaacctctgcctcccaggttcaagccattctcctgcctcagcctcccaagtagctgggactacaggcttgcaccaccatgcccggctaatttttgtatttttgtagagacagggtttcaccatgttgggcaagctggtctcaaacccctgatctcaggaaatccaccacctcagcctcccaaagtgctgggattacagttgtgagccaccacacccaacccttaaatatattgttttactttttcttgcttgcattttttttctgatgagaaatcaatatctctgtttcttgtcttttttctgtatgcaataggtcttttcttcctctggctacttttaagatttgttttctttattgctggttttgaacaattgagttatgacatgccttggtgtacttttctttgtgtatcttgtgccgagattcattgaactgcttggatctctgggattatagttttaggtttataaaattgttagcattattacttcagatattttttatttctccctctctcacttcagggactcctattacttatatactaggctacttgaaattgtccacagtgtactggtgctctttctgagttttaaattatgttctaactctttgtttatgttgttagttacagttgccatgcctttaagtgcactaatcttttcttgtacaatatttaatctgctcttactcccatccagtgttgttgctgtttttttgagacattgtagttttcatctttaaaatttcactttaggtcttctttatatcttttatatctctccctaactttttgaaaatatagtgataataactgctttaattactttctctgccaa

SEQ ID NO: 6004 - DNA, 2300 bp, Homo sapien
agtagctagaatatagtattttccatcattgttattcaaggtgcatgacaagctcccttttgaatgactaagtctagggcagtttctataaaaatgttttacatgtatcttgcatttttaatataatgtatctttcatgtacatgcttagcagttttaagttttaaacttatttcaaaagggcctctgctaatgttcctttctcagggcagacctttatagatggaactttggtccctaggtatctttttttgacatgttttctaggttgttccatgcttacagcaaaagccaaagagaaggagaaatcaaggcatgtcttcaagtagactgaagtgattagagcaaagggaactggggtggagggtgtcagaaagagacacagttgaggagacaagttgagggaaacgctggtcatctctgagggtcaggctaaatgtcctcaagggtttggaaacaggagagagacaagttcggctcttgtcttggtgaaataatgctggcaggccagcggcatgaatgttagattgctatgggaaaagacaggaggcaaggagcccggtagagaggctgccgtttcattccagacagagatcaactgtgccctgactgattcctttttttgtgagcaggaggaactctcattgggtaataaaagaaccctcttctactccagccctctccttggcccttccagcacatcagaggctgttggctccagctcaccaagaaatggtctccaagacaaggtaatggggctcacttctttctcaggacaccacacctgggaggcagctaatgcctaaaaatcttaccaattagcaattgaatttaaccatgcccaccttcctcaaagcccgatgcactataagaaagattcttagccctgatgtttatcccataccacagatgagcctcactgagggcttgccctgaatacctctcagtgtattcattcattttagatgctcttgatatgctttgggtatgctagggtaagacccctttgctaaaccaaaacctagctggcaacttgcttcctttctttcacacagagggcacagatccctctgccaaaagatttcccagacactacctgatttctgcccattctgtctgtactcctcaggcaaaggctgagtttcttgttaatctcttccctttaccctgatcaatctcgcttctcattcattatagctgtctatcacttcttcctcatttctaatgaaatccatttgaagacataaaatataatgtacctgcctcttgaaagcgacttgtaattggaccttcagctttcttggatttgcaatgttcccaacttgggatattagtcataaacatgctgagtggttttgttctctggcacggatactattttgtctcttagagacttatccattgactttaccctgtccatgtataccaagcacatctaatgagtcctagtcccttgttttatctagttggtagctctccaactattttgaaagctttttgtagcatatcaaattcaccatgccaaacacctcacctcagttcttcatttagcgagtagaaacggtggtatgcagcagttaggaagcttcacccttgtctgtaagtgcctcttgcttttcactcatgatatctccctccccctagagataacattattggtcactttgccttttcacactatagatccagtgatttttaaaccagctcgagttaacagtactgtttgccttgctgggtggtgttgttgttggttaaattaagtgggctgcctttacccccaactcagcatgatccggctccatgagcttggaacttaaaacatggacagaacttaaacacacctgtattttaaaacttgactttttttctagagaacattcagggtcttttccaaaccccctgctctgaggcattgttcttggaatttttctgccatgcaaagaagctactttagtagaatattctgtatctatggggaaggggaggcaatagtggttgaatctagatcacctggaaacccataattcatactatcatatgatcaacacaaccaaattccattgctgtggaaacaatagaagtgtgtgaacagaacacaaaagaaaaatatggagcaggaacaggaaaggtgcaacgccttgattctgggttaattacattcttagatggcactggatgattacaggaaaaagatgagggtagcaactccagagcttagtgacttagaatgctacccacagggctggtcatggtggctcatgcttgtaatctcagcactttgggaggctgaggcgggtggat

SEQ ID NO: 6005 - DNA, 2300 bp, Homo sapien
caccacacctgggaggcagctaatgcctaaaaatcttaccaattagcaattgaatttaaccatgcccaccttcctcaaagcccgatgcactataagaaagattcttagccctgatgtttatcccataccacagatgagcctcactgagggcttgccctgaatacctctcagtgtattcattcattttagatgctcttgatatgctttgggtatgctagggtaagacccctttgctaaaccaaaacctagctggcaacttgcttcctttctttcacacagagggcacagatccctctgccaaaagatttcccagacactacctgatttctgcccattctgtctgtactcctcaggcaaaggctgagtttcttgttaatctcttccctttaccctgatcaatctcgcttctcattcattatagctgtctatcacttcttcctcatttctaatgaaatccatttgaagacataaaatataatgtacctgcctcttgaaagcgacttgtaattggaccttcagctttcttggatttgcaatgttcccaacttgggatattagtcataaacatgctgagtggttttgttctctggcacggatactattttgtctcttagagacttatccattgactttaccctgtccatgtataccaagcacatctaatgagtcctagtcccttgttttatctagttggtagctctccaactattttgaaagctttttgtagcatatcaaattcaccatgccaaacacctcacctcagttcttcatttagcgagtagaaacggtggtatgcagcagttaggaagcttcacccttgtctgtaagtgcctcttgcttttcactcatgatatctccctccccctagagataacattattggtcactttgccttttcacactatagatccagtgatttttaaaccagctcgagttaacagtactgtttgccttgctgggtggtgttgttgttggttaaattaagtgggctgcctttacccccaactcagcatgatccggctccatgagcttggaacttaaaacatggacagaacttaaacacacctgtattttaaaacttgactttttttctagagaacattcagggtcttttccaaaccccctgctctgaggcattgttcttggaatttttctgccatgcaaagaagctactttagtagaatattctgtatctatggggaaggggaggcaatagtggttgaatctagatcacctggaaacccataattcatactatcatatgatcaacacaaccaaattccattgctgtggaaacaatagaagtgtgtgaacagaacacaaaagaaaaatatggagcaggaacaggaaaggtgcaacgccttgattctgggttaattacattcttagatggcactggatgattacaggaaaaagatgagggtagcaactccagagcttagtgacttagaatgctacccacagggctggtcatggtggctcatgcttgtaatctcagcactttgggaggctgaggcgggtggatcacgaggtcaggagtttgagaccagcctggccaatatggtgaaaccccatctctactaaaaaatatacaaaaattagctatgcatggtgatgcgcgcctgtattcccagctactcaggaggctgaggcaggagaatcacttgaacccaggaggtggaggttgctgtgagccgagatcgcgccactgcactccagcctgggggacagagtgagactctgtctcaaaaaaaaaaaaaaaaaaaaagaataccacccacaggagaaaaccacttgttctgagtgactgttccaaacggtagagaaaaaaagcctgagtgatgtgcttatatgttttcatcctcagtggtgacccagactcaagaggcaagttcaagttgtgtgagcttctggatgtaatcttggaagaccctctggtcttttttaacccaactaatttattacggcttttctagaatgcatgtgatttaattctatctcttgcaaagaaaaagcaaagcatttttatctcttttcttcagcatttaatggaacaaagttctccaggatttaggcaaactcacctacaagatttatcagaagccactcaagatgtgaaggaagagaatcattatcttactcctcgaagtgttcttttagaggtaaccccttcttgtccattcatcatttgtttctttaacaaatatttactgaaaccctgccatgcacttttcgtgcaatattaggctatggtcagtgggaacacagaagtaaatcaaatacagatgacgtgctcatgg

SEQ ID NO: 6006 - DNA, 2300 bp, Homo sapien
ataagacagacttcattaaaaactttggctctccaaaagacattgtacactgtaggccaggcacggtggctcacgcctgtaatcctagcactttgggaggctgaggcgggtggatcacctgaggtcaggaggtcgagacaagcctggccgacatggcgaaaccccatctctactaaaaatacaaaaattagccaggcgtggtggtgggcacctatagatccagctactcgggaggctgaggcagaagaatcacttgaacccaggaggcagaggttgcagtgagccaatgttgtgccactttactccagcctgggtgaaagacggaaactccgtctcaaaaaaaaaaaaaaaaaaaaaaaaaaaaaaaaaaaaagacattgtacactgctaagagaatgaacagacaagccacaaactgggagaaaatatttgcaaaagatatatctgataaaggactgttacccaaaataaacaaataactcttaaaactcaacaataaccaggtgcagtggcatgctccagtagtcctagctactccagaggctgaggcaagaggacagcttgaggccaggagtttgaggctgtactgtgctataatcgcacctgtgaatagccactgcactcctgcatgggcaacctagtgagaccccatctcttaaaaataaaataaaatagcaactcaaagtactgtatttttttaaaaaaataagaaaaattaaaatacaaatttaaaaaccctcaacaataagaaaatggacagcccaattaaaaagtgagccaaagatctgaacagacacttcatcagagatatatagacggcaaataagcagatgaaaagatgttccgtatcatatgtcattagggaaatgcaaataaaaacaaaaatgagatatcgctatgcacctaagaggatgaccaaaatccaggaaactgacaccaagtgctagtgaagatgtggagcaacagtaatgctcattagttgctggtgggaatataaaattgtatagccactttggaagacagtttggcattttcttataagagcaaacatactcttatcaaggactgaggttgctgggtagtatatttacccaaaggtgttgaaaacttagcccacagaaaagcctggatcaggatgtttatagcagctttattcctcattgccaaaacttggaagcaatcaagatgtccttcagtagatgatggataaacaaactgcgatacatccatacaaaggaatagtactcagtgctaaaaataaatgagctatcaagccacaaaaagatatggaagacccttaaatattacaaagtgaaaaaaaccaatctgaaaaggatacctattgtatgattccaactacatgacattttagaaaaagcaaatatggagatagcaaaaagatcactgtttgccaggggtttggggggatggaaaaatgaataagcagagaaaaaaggattttggggacagcaaaaattttgtaggatattacaatgatggatatgtcattatacattatacaaaccaaggaatgtaggacaccaagagtgaccttaatgtaaattgtggactttgggtgattatgatgtgtcaacgtaggttcatctcttgtcacaaatgtaccattcaggtgagcaatgttgatcacgggggagctaagcatgtgggggtggcaggaagtatatgggaaatctccataccttctactcaactttgctgtgaacctaaaactgctctaaaaaataaagtcttgggccgggtgcggtggctcacacctgtaatcccagcactttgggaggccaaggcaggcggatcatgaagttgggagttcgagaccagcctggccaacatagtgaaaccccgtctctactaaaaatacaaaaaattagctgggcatggtggtgggcacctgtaatcccagctactcgggaggctgaggcaggagaatcacttgaacccgggaggtctcccgggaggttgcagcgagccatcgcactacagcccaggtgacagtgcgagactccatctcaaaaataaataaataaataaataaaataaaatctattaaaaacaaacaaaaaaaacaaaagacaccagagcaaattttatattaattttatttaagtatacacgtcatataaaagtttcatctcataattttaaagacacataattacttatatatataatgcttcaaactactttattaattatcattaatccttttggtccctgaatctgcctttgcttcctcttctaaggcttgatgcagaatataactgcccatggagggcagggga

SEQ ID NO: 6007 - DNA, 2300 bp, Homo sapien
catttgctttacaattataccgttgactggtatggtgtttcccagtgtctcatctctcttttaggttactgcttgccttccttgtttcactgaattggtatgtctgacctaatgaagactttttagattatttagaaactactacgttttctgcagtcttacctgtttcagagcgtggtggagaatccaaacattcaaaaacatgccatcgaggtgtctgccctatcaatgaggaaaaaggcatctggcaatttggacagtatccatcataaactggacgtatctttggggacacgtgttggcttttttgagttctacagagttttcctggagtagtttccttgtcttgggtctgctgaataccatctccacaacttgaattctgactagaagcaacagaagtctgacaacctgcatttccaaggggcacttcatggtccttcacctctttagcttctgcggctctttttctgtttctactccgttttgactggtattttccatctgttgctttttcaacagattttagaatatttttagagccattatttggatcaactcgttttggttttcttttagatttgtattcccaaatgtcttcttcggaaatgtcttctaacatggcaaaatgattttatcattcaagaagtattaatcttaagtaaactgaaagtccatttcttgtcacaaacaaaaagttatagaattattttgctgagaaaaaaaacaaaggtaacaaaacccccaccaactcaatgggaatctgcagtgttggtaatgaacatattggcaagctacaaaccttgtacctgacaacacctgctattccatttataccacaatgaaactaagataaacctatcacaggagtagcaactgtgaagttctccattatgggtgctatttcattcaaatatcttgtccttttccagggcttgattcataaaaataatacttcaaaaattaagcgctaatggcaaatataggttcaacagcttaatcttagaacgagatttgtaacattgttatgaagctactgtcagttctttcaagtggacaaccgtccaaataattcataaatccaaccacagtccctggacaaagggcttaacaggtatcccaaacactaaatgactatctaacaaaactagtcacaacataatcaaagagatgtgtaattcgcaaaaaactgcgaagtcactgccctcatccacgactagtggatactcaaccacttcagtttcccgcgacagtccatgatcttcctccagcagcaatgaacaatccctgcacagtgaacaaaaaaagttgatatgtgaaaaaagttcaaatatgtgaaagagtgggcttgtattgaggtctgactccgtattgcacccatggttccgaaggtggccagccctctgtccacctgactcaaaacggggtcacacgccagcctctcccttatcttttggcattagaggctgggaggccaggaagcggggccttaatcatctccaggttaagcatagcgagctccaaaaagccctcagagtcctgcccttctgaagactctaaggcccgccctcaaggaccctcaccgccccccacctgccactcggcaccccaagggagccgctccagctgcatccgctcctcccggcacccccatctaaaaatgtgttcgcgcccgcactttcagcactcccagatgacaaaacgctgtgtttgtgtataagtgaaagccactcgcgccagtcacttccagtttacaaagccttctctctggaggttatccctacccgctttacctttagggtcttggcgggaacaagttcccgctgccagtgccgtgtcgaatcggcggatgctgttcaaagagagagactttaaaaataatttttaaaaatacattgcccttttaagtcctacggatttattgtattttatttgtgttcgaaagtccgctaattcccaatgtggagggttggggatgtttcccttagcgcctctgggacgctgtccctaaggccttattccatgttgaatctgacgctctcaatgtccaggctcggctgcggcgtggggaccgaaaaggggcggggtgggtcggacggcagtttaattacgtccccgggaactgcgccgatttggacttttggcacttggacctatgctttaaaaagaaaaaagtgtcattggcgtggagtggggctagtggagggtgaggtgaatgcgccgtttggaaaccacaggacagtgaacgtttcgtctctcccagcgagactctcccgcgggcccggcggccgcatcgggag

SEQ ID NO: 6008 - DNA, 2300 bp, Homo sapien
ggtaaaatacgttttcatttatcatggcaagatatgcttcacaaacatccctgccgggaatatctgttccttcatgctccaaaagctcacatggccaggatttaaaccctggaaataggctataattgattccgatttttaaaagtattagtttcacgactttgaacggagaagcacagtacagctaagaaaccagcaaatccagggcctgtataatccaactggggcagttatcagctgtgaggccctgggcatgtgacttaacctctctgtgcttccatttcctcaactgtgaaaggggaatgataggagcacctcactgggatatagaggtaattgaataaggtaatatctcctcaagtgtttaggtatcccctcaagtgtttaggactgtgtgtggcaggccgggcgcggtggctcacgcctgtaatcccagcactttgggaaacggaggcgggaggatcacttgaaatcaggaggtcgagaccagcctggccaacatagtgaaacgccgtctctactaaaaatacaaacaaaacaaaacaaaacaaaacaaaacaaaacaactagccaggcgtggtggcgcgggcctgtagtcccagctactccggaggctgaggcaggtgaatcgcctgaacctgggaggcggaggttgcagtgagccaagatcacgccactgtactccagcctgggagacagagcgagactccgtatcaaaaaaaaacaaaaaaaaaccctgtgtgtgatacatgaaaaagtgatcaataaatgtcaagatgatgcagaaagatgaccagaagacactggggaaccagattgaatggacagaatggtgtggacgttgcaatcattgccaccggggacactaaatattcacggagtgtccacttggctaatatcaggcgcgggcggaactcaggatacacagacgagtatgtggatccccgtgccagggaaacccccgtcggtggccgcttggggacccctgggaattgcagaacacgcgaacagcggcccaagttaggcgaagggccactccccggggcgccagcggcacaaacccgcctagcccaccgcttcgcgggagggcgccgtccccgaggaaggggaggtgccgggaggggcccccaccccgacgccagcccctcaccttccggaaactcgggtactgacaagtcctgctcccagccgtccaccttctgcagatactggtagaccaggctgtccttctcctgctgggtaacggcgtcgagcagggcgtactctagcgaggtctgcgcggggagcaggccggagaggctgcggccccggcctccgggcgccgccatgtttccgccgggctcccgatgcggccgccgggcccgcgggagagtctcgctgggagagacgaaacgttcactgtcctgtggtttccaaacggcgcattcacctcaccctccactagccccactccacgccaatgacacttttttctttttaaagcataggtccaagtgccaaaagtccaaatcggcgcagttcccggggacgtaattaaactgccgtccgacccaccccgccccttttcggtccccacgccgcagccgagcctggacattgagagcgtcagattcaacatggaataaggccttagggacagcgtcccagaggcgctaagggaaacatccccaaccctccacattgggaattagcggactttcgaacacaaataaaatacaataaatccgtaggacttaaaagggcaatgtatttttaaaaattatttttaaagtctctctctttgaacagcatccgccgattcgacacggcactggcagcgggaacttgttcccgccaagaccctaaaggtaaagcgggtagggataacctccagagagaaggctttgtaaactggaagtgactggcgcgagtggctttcacttatacacaaacacagcgttttgtcatctgggagtgctgaaagtgcgggcgcgaacacatttttagatgggggtgccgggaggagcggatgcagctggagcggctcccttggggtgccgagtggcaggtggggggcggtgagggtccttgagggcgggccttagagtcttcagaagggcaggactctgagggctttttggagctcgctatgcttaacctggagatgattaaggccccgcttcctggcctcccagcctctaatgccaaaagataagggagaggctggcgtgtgaccccgttttgagtcaggtggacagagggctggccaccttcggaaccatgggtgcaatacggagtcagacctcaatacaagcccactc

SEQ ID NO: 6009 - DNA, 2300 bp, Homo sapien
ttttttttcaatcttctttctctctttatgttctttagattggattaatttctgttgagctgtcttcaggttcattaaccttttctttgtcatgtcctttttgccaatgagatcatccagtgaacttgtggtatttttcagttctaacatttttagttactttttataatttccatttctctgtttttatttcctgtctttttacttcatttgtgtttttctttacctcatggagcatagttatctagttgcttgaaagtctttggtaagtcgaacatctgctttatcttggcatcggtatctgttgcttgttttttttgccccctaccttgataactgaccatatttccttgttcttttctttgaatatcaggtaattttttattgtatcctggacgttggaatgtgacgatatgtgaactctgggttctgttatagtcctgtagggaacattggtagccttattttagtaggcatcaaccctcttaattcaaattataacttctgtctcatcttccatcagctctcgctccttctgtaaacccagttattcagttatcagctccccaagcatttgctacactttttaaaatctgttccctgtactgtagtttaggggttaaacaaagacttctgagtgttcatactcagaaataaggagccaccttccccagctgttctcctcagggtttctcccacactgtccaggttatgtggtttcttgggctagagttgcagtgggatttctgttggagttttggctctccatacagctccaaaactggaacccactctcaggacaaagctaggaaaaggattggaaaagaaaataaaattggcagctcactcttctgtcatttgatcttctgtcatttgcttttctgagttttggccctgctgtacaatctatctggtcgggtttacttttctccatcttcaagcagggtgtgtcttcaagcatgcatgtctgtgttttgattcggaattgatagttataatagaagcatgagctgctgggaaattatacctcctgatttgtgtggttttatttgttcatcttgcaggtttgagtagtttttggtggatgtgttgggagatttgaatgttacttagctgttattatctctactactttggtagtcaatattgaattttttcactgaatccagccaaacactttttttttttttttggtactaatttcttgaaataatgtattgattagataagagaagtatgttttcagcagttctgtctacagaaaggcttgttctaagaaccatacaataggaattttaaataaatcaaaagccttatattatggaaacatcttgcttatatttattctgttaatctgtaatgtaaagttagattaaaaaaaaaaagacagtgatacaacaataaatacctcccaaaagcaggcatagtcaactctgaatttcaaaggggcttattataggtggaaaaaatttcaacatttattaaaaaaataaagataatttttatagcattatctaaataaaagaaaaaaagttttaatcctgcaatagccatatgaatttgatcatgtgtgtttttatgtagtaatcaagattgttatgagatttaaatttgttagttttttatgtgtgttaaaatgcagttgaagatcccagcgtagttctacttttcgtttttttttaatctatggacttttaatatttgtgatccaaaacctaatgtgtagatgatgatattcaaacttaaatatttaataatgtttaacatataattttttcctttcagatggtcttcttattattggtgttcactcggctaagtttccaaatgaaaaagtcctggataacattaagagtgctgttcttcgatacaacatcacccaccctatggttaatgatgcagatgccagcctttggcaagaactagaagtttcctgctggccaactctagtcatacttggacctcgtggaaacatgttgttttctttgattggagagggacacaaagataaattatttttatatacttcaattgctttaaagtattacaaagacagggggcagatcagagataataaaattggaataaaactctataaagattctttgccaccttcaccattgctatttcctggcaaagtaacagtagaccaagttactgatagattggtaatagcagacactggacatcatagaattttggtcgtttggaagaatggacaaattcaatatagcattggaggtaaaacttgcttctgattacgatagataacgtgttttacagtaaaaaaatagttcaag

SEQ ID NO: 6010 - DNA, 2300 bp, Homo sapien
tttatgtttaattttttgagagctgctgaattattttccatagcaattgcaccatcttaccttcccactcgaaatatatgtgggttccaattttctacatgttcaccgtcacttgttatttttcattttttaaaaattctagccatcctactggatatgaagtggcatctcattgtggttttgatatgcatttcccttatgactaatgatgtcaaccaccttttcctgtgcttatgggccatttttatatctttgagaagtgtcagtattctttgccaaatttttaattgggttgtcttttctataatacagttgtaagaatcctttgtatattctaggtacaagttctttatcagatatatgatttacaaatgatttttcacatttttctgcttgcctttatacttagttaatcatgttctttgatacattgaagttttaaattttgatgatgactgatttgtccattttttccttttgttgcttatgtttttgttgttgtaagaatccattgctaaatccaaggtcataattatttacccctgtgttttattctaaaagtcttttagttatggctcttataattaggtctttgatccattttgagttgatttttgtatatggtgtgaagtaggggttcaacttcattcttttacatgtggatatacagttaccccagaaacatttgtccaaaagactgttctttctcccttgaatagctgtagcagccttgttaaaaattagttgatcatagatgtatggacccattgatctctctgtctgtctttatgccagtaccttactgttttgattgctgtagcttttaataatgtttgaaattgggaagtataagtcctcccactttcttctttttcaagattattttggctatcctaggtcccttgcaatttgataagaattttaggaccagcttgtccatttctgccaaaatcttttgattgtttcttatgtaaacatattgtctccaaaaacaaattcccttttgatttttaaacttcctgtttccttttattatattgctggctagtacctctcttgcttttaagcattagcaatgatggtgggtatcttgtcatgcttataatcttaaagggaatacatgtacattttctccagaagtttaatatttgctgtagctttgaggaataagatatctatgaagtaaggaaaatttctgtctattgatagctggataaaatgtgcaataaagcaattaagtgaaatattgaatatcatctcagtggtaggtatatggatgtttgttacaaaaattttttaactttcctgtgtgtttgaaaattttcccaatacattgttggggagagggtctcaggagatgaaagcagaacatattttcccagtagaatacattagtttttcagtttataaagtaaagtccgtaaagtgtcatggaactgcctgggttcaggtcccagattcttgacttactaactgtgggacattgaaaaagttacttaatgatctgtgttttagttttctctaaaatattaaaatcgtcacacagttatgagcatggctggatggctggttggcttgctcactattggattagtgcttggcacatgtaagttttaatgtgtgtcaattactagctgagcacaactgaaatatgtgcatttaatttttagaaacatgtattttgctacattgtgttttaaaatttcattttaaaatttttgtttagttaagatgaggtcaatgccagatctgctggaggcatgatgggagatggggataagaggggaaaagtagaggaatggacaggtgggatatgaaagggactgattatgtgcatttgaataagaagttcattctataattgattggccttttttcataataaaactttgtactgcacatacactctaaatgttctattgactattgaaaatctttacacagcaaaagacaaaagcaaaagtaacattcattgcataaaaccatcctttgaatttctatagattgacctagaagctgagaaggtgagcactgtagctggtattggaattcaaggtacagataaagaaggtggagcaaaaggagaacaacaacccattagttccccttgggatgtagtttttggaacatcaggtatgtgaacttttgatattaaatgtaaaggtaaattttacttcatgtaagatttaaaaatattcttgaggtggtcatttggattccattactagttattttattttatacttttatacctatgcctcagagtttgttaattgtgtaaaaacaaagctagcagtaat

SEQ ID NO: 6011 - DNA, 2300 bp, Homo sapien
aatttaggaagttattaaaaatacatatctctataatgtaatagttttctgcctgcacaaagtttactattaatttatgtctaccagttaaaaatacgatagttagatttggcatcacgtttaaccacaatcatcaaaatctacttaaattctatagttaacagttacataagaatatatgcagagggaaaatgtcaatagttcttgtgaatgaaggaattatggatgtttttattttaattctactttgctgttttttttttcttttcagtgagcaatctgttatttttaaaatcacggtggggggaaacccataaagtttaaagagttaaagttaactgaatcgtaagcacttatataataactttttaaaagtcatttttattaccagagctcagaacattgtttggagtcctttgatctaccggttctcttaagtacgtgatttcgtgaagatagcaatggttatggcttttttgttctgttatttttattgtgtaacgtagtgtagtggttaagagcttggattttgcagtaacttggattctaatcctttaaaatggggctgatatacctgcctcatattcaatgaaatattgtgtgtacagcacttagtaattaatgaaactggtaattattagcttagttactgtaatgataatttgggaccataaacacatatcaccctacattttctttgcaactacaatttgtgaaggaaaatctcccactaactattggttatgttaatattcttcatagagttgggttcaagaagagaaatgttttataatgaagcatataactattttataaacaacattgtagttataaagaagcatgcctatagtgttattaaaaattttttgtacgactttctggagctacaagtaatgaacttgctttgagagggtccagacatactcatcctgaaccacattcctacaacatatgcccaacaacctgcaccagagtacttatatcttaaccaaaaagtttcacttcaatggtggtgcttcacaaaatcttcaaagtgctttcatgtgtattgcctcatttgagcttcaaataaccttataaatcgggcaggtagatgttagtttacagaggaggagacagctttggaatagtggtgacgtatctgaagaatagaaaaccggaatagtgctcgatgcctgaagtggtgcctggcgccagcagatgttcacttctgtcaaacaaggggaagtagtggtggagcctttattcaggcacgggtctcctcattcctaactccaagatgcagagggaaaacgaactgctcaattaagagttcttccatggacactttcttaagccttcacataaaataacaagaataatagatatttattgagtagatatttattgagttctttctattttccagcactcatctattaagtgcttttatgtattaactcatttaatccacacaacaaccttatgtgagaaataccatttttccttatttgattggtgaagaagcacacagagagggtaagcataatcaaatacaccagcataaccaaaatcacacatttagcgagtggcagggcctggatgggagtctgttcaactctctgctgtattgcctcttaaagtaggttttcttaaaacataaatctttcataactttatatatttatagtaacttaatccaaagaaccccaaaagtactagcaatgattgtttctgcaatttaaataaatccatttaattatacaactttgcattatatactgttattcagaccttggaacagtctataattgtttgtcaaaagattttatgtactactttttcttaatttcagatattatccagagtttttcttggcagatggatgtattaaaaaaatagctttccagtgttagttctcaacagtgctgtttcaaaagttgttttaaaagttctaacggttggtcttcaaaacgtaattaagaccttatcataaagagccttttgcacaggactatctcaaaccctaagaagctattcatatttaagaaaattttgttgtattaaatattagtccaagtgagctctggaaatacagtcttctgctttcttgtttcataaataacactggtatgcagacccctccccatgactcaaatattaatatatgcaattctgttacagtaaagttttcaccatggtcaacctattccagcattaggtactttttgttgttgttgttttgttttttttttttttttttgagatggagtctcactctgtcacccaggctggagtgcaagggtacaatctcagctcac

SEQ ID NO: 6012 - DNA, 2300 bp, Homo sapien
ggggtgaataaacaaatcactccccagttttaacatactgatgctgaggtttgggcctaaagcaaattcatatgtttgcatttatgtaagagaaagtggttaaaactgcttgattttatataaacttgaaaaacattactttttgcttttgacctggacagctgtggaagtcggtctctccttgcaaggtaaggatatgagcttggtcatattgatgaccatcaacgaacatgatgttcgttacgggcgctgttcttattccaatgctagaaggacctgtgagcattatataacattttcatgcacccttacataaacaattagaagctgtttactcctcaaggactcaattagagatttttttaatttttttatttttttttttatttcaggcctgagctgaggacactacaggagccaaattagagaaggggcttgcagtcctgccatattgcatattcatggctttcttgtcccctcacccccagtataatcctttttgccaggttaacaactcactaatttcaaagcaattcatttgccaactcaaaaaaaaaaaaaaaaaaaaccacagatacaactttaaatgcttttggattttaatcctctggagtatttatatgttttcttgtctcatcccttcaaaactaatctcagagttttgagaatctgggaacttgggcaaaggagaaaacaagcacgcagaccaaggaatctgaaatcgcagttcattacgtcagcataaactgacagtacctttttgtttgtattgacccagctcaaattataaaatcacatgagtaataaaacacaaaatacaggtgttatcattgaaaagtctaaaatgtaattaaacgcgttttttccccctcgcggtggtatcgtttactctgtatctcaacgtttctgtctccctaagcctctcctttcatatcatgagcatacatttttgcatcatgctcacacgttcattagctaggactgaggagtgtgtacgattccaaagggccctcagcgttagctgttagatgcacaaaccttcgcttcctttccacatctactgcactcgaggttcaacagaggatccttgcaagaacagcgcccagagagcattcttgacagatgcgcgcttggctccagcaacccgctctgctgggaagtttcttctaaccactaacacccacctccaatcccccaagctgtcacgacgcatgctggctgggtcccgtcttgacgggggaagggttttacacacaccctgctaggctgccccacatcacaaccaagctcgcagggcaaactcctccaagcctggcggacaagctgtcccaggcgctctggcgcttcctgaacaccaaggtcccctccccgctcaagggagctagcgctctgttccgcagagaaccccggaactgcaggtcgaggggatgcggggggagcgggggcgcaggagggagccgagtgctggaggcaaacggggcgcaggagcgggtgcgggaggcaaacggggcgcaggagcgggtgcgggaggcaaacggggcgcaggagtgggtgcgggagcgagtgggggctgagggaggggacggggccccggggggagccaggcgcggaagggggcgcgggggaacagggaccaggaaccagcgggcgcaggaaggggtgcgtccgcaggaacccgcgggcgcacgggaggcactagctacgcgatcagctcgggactctcaggagccgctcaattgccaacgggaggggggtgcggggagttggaggtgggggtgcagaccagacgggggcgtgcctttgcccggattggctgcaggagcctgacgcgaggccccgggggttggcttggggagtgggagcggggtggggtgggtgctgggtgccggagctgcgggcccggcgcgctcagaaacatgctgaagtcccggcggctcttccagcagcggcagcggctccagcagcagcggcggcggcggcggcggcggcagcggcagcgacagcgctcggctcctgcgggaaaggcgcccggcgcccatgcctccggccccgcgccgcggctgccctgacccggccgcgacctccctctgcgcaccacgccgcccgggcttctggggtgttccccaaccacggcccagccctgccacaccccccgcccccggcctccgcagctcggcatgggcgcgggggtgctcgtcctgggcgcctccgagcccggtaacctgtcgtcggccgcaccgctccccgacggcgcggccaccgcggcgcggctgctggtgcccgcgtcgccgcccgcctcg

SEQ ID NO: 6013 - DNA, 2300 bp, Homo sapien
tttctatttactcttggcaagtgtttacttcttcacagaaaaaatgggagctgtcaggtgacagttgtctcaacgttttgccatcagtcccatgaactgcctgcatctgcagccatattttctgctgttatcatggaagaaacaatcttgttatcatggaagaaactcctctgaatcaaattagtctttctacttccgctatggatttcatctcttctgactttttgggttctgtcttgattattcttctttatcctttatgtcttacctttctccactttctttttctttctacatttaaacataattgtcttttaaaaatatcaaaactcctgtggctttgccctgccagcttttctcctttcctttgcagccaaactttatataatcttctgtattcattctccgtttcctcacttcctatgttctgtacctctccacttcattctagcttttaccccaacattttattaaaaattactgatgtatccctgcatatggtagacacatttcagacccacccttgcttgaattcttatcatcttttaacactgtcgaattcagttgtctttcttgataggcttgttcctttggcttcatttccatcacatgctgatgttcctctcacctttttggcaactctctctcaatctccttggcaggcttctctttctctcataatgccctcttgttctaattttattgtaactttgggtgatcccaactatttttatagtatgctgcaggacttttgagtcattatctttagcccttttcactaagctccaggcacaagtattaaagatacctcaaactttagcatttccaaaatcggtttctctgtcccatgcttctcctcacatgttcctaggatgaatgatgagtgcagcatccatgtgactgtccagcttagcaggctgggggccatcctcagctcttctttccttcccctcacacatctaaccagtcacaaagtattagtgatgctaagtctgtaacatctgtcaagtccattcactttttacttccctgctgctactaccatagtccaagctattagcagctctcacctggaaaactgccacagtttgtattttttctgcttatatcctctctaatctgttttccacactatggttagtataatcctttttaaaaggaaatttcaaaactcttcattgatttcccactgcctcagagattgtctagtgagttccattgccttagcatggcttgtaagattagtgacctgtcccttgctgcttccatgccttcccttttttcacccttgtatttcagctgtagttgattaacagatgtttatggattgtttcctatttcccaaaccctgtgttaagtgctagggatatagtacagtctttctcttcatcaatattgaacatctgttaggaccaacaagaagcctcttattcccttcccagtttttagcacatactgtttgttccctttacctggagcatattttgttctccagtaactcctgctttgcctttaggtcagggatcaaccatggcttacaaaacaaatccagcccactacctcttttagtaagtgaagtttttttggaacacatccacactcattcatgtaatatctgtggcagttttcatagtacaatggcagagtggaacaattgcagcaaaaccatatgacccagaagcctaacttatttactatctgatcttttacaggaaaaggttgctgactcctgcttcaagtattagtttgagcatcacttacactagtttaggcaaacccactctgtgcttttatcataaaaaatgtttttttacacatataatttccacacttgactaaaagctctttgaaagcagaggccatgttggtcttgctcacttttctttccagctcttatttcctggcatatattaggcatttataaatatttggatgaatgaatagaagtacctttattaagcatttgactagatgaaaattcccaaaccattaatttaatgtcttttaatggtttattttttcttaaatataaattttgtgttttagaggtaagcaagaaattgaaaatttgaaagaagaagtggaaagtcttaattctttgattaatgacctacaaaaagacatcgaaggcagtaggaaaagagaatctgagctgctgctgtttacagaaaggctcactagtaagaatgcacagcttcagtctgaatccaattctttgcagtcacaatttgataaagtttcctgtagtgaaagtcagttacaaagccagtgtgaacaaatgaaacagacaaatattaatt

SEQ ID NO: 6014 - DNA, 2300 bp, Homo sapien
tgcttcaccatatttgcaaaccatgagttacttcaaagaaggactatttgtagaagttttcattctgtgaaatttcagaatatggagtaccagttcatactaatagaaaatttttaaatgagtatatagttttcatacttaatccagttaggtatttcttattaagtgtaaaatgcttcagaaagctttacataaataggaaattaaatggtcatttgttagcatatggctacttaattttcgaaagggagttaagattttagaaattgtcggctatacagtcagggtcctggcagaaaacagatggcacacttaaaccggtgatgaagataatttaataaaaagattctttgtcaaggtgtggacaagatgtagggatcccaaaaagggaagatgcagaatttcagggctgctggacaaggagcaggtattacaccccagagggtagttgtatagagagggcacctgacaaggggagtggccatcagccaacctgtgggaactctggaggagccagatctcactctgcctacgttcccaagcttctgcctactgccttctgttgggtgaacccaactggaagtttgagggcaagagagcttattgatagggttcatgatgtcatcatgttcctgggacaccagttgggatttaaaaaaagtgggaaaggggatctggaggagtacgtggaaaatagcaaccatattagccgaagtaaaaggaacaggaaagggtaaaggcaaatgctagggatattgtaccatttttctataattttaaattttttctttcattttaaaatttcatggcacaagtcctgggaatgttgtgcaaaaaccaaacaatgcattggtaatataagagacaaataccatgtatttcaatacatttccatttgaaacattatttttcattaatgctaagtaatattttttttgaaggccaacaagaaatgtgaagaggcacgccaagaaaaagaagcaatggtaatgaaatatgtaagaggtgagaaggaatctttagatcttcgaaaggaaaaagagacacttgagaaaaaacttagagatgcaaataaggaacttgagaaaaacactaacaaaattaagcagctttctcaggagaaaggacggttgcaccagctgtatgaaactaaggtataacttgtgccatttgaaatatgttgaccttatttgaaatttgttctctttgcttttccatatttaatcaaataatcataatttaacatggttaacactcaaacgtaaagttgtttttattagtttaccttctaaaaccatgaattttttagtaattcaagtgttctattacttgtctgcagagaaaaggtttgctagggaaaaaataagtgttggcacatgttgtttattagataactttttcttgagctttctaaaaactttcttttaaaatctgtatgttggagaaatttgcatctcaagggaagattatattttggtaaaatatgtatatagtagtgtaaaatgaatagttttagaaccagaagtataatttgatataatcttaatataacacatcaccatagaagaaaatttatgtttttcttacagaaaaacatgtctttcttagatactatctaaagagatttagttactgagccagctattcagaacccttcctgttaactagcagcctctcaatggtcatatttccagggcattatcatttttcaatgataaatttttttttaattcattagcttttagttcaggaatattgtcattgttctcaggaattctgacaaaaccaatttagttcatatttcaccttaatgccagccagttaagaatcataaagatatgttgtgttgacaatacatccaattggttaaaatgtaaatgtaaatcatctttgtgtctattaattggatttaggattttactaccctcttctcatttggactttaaataagttttatagtctgtgggctatagtgtgccagcccttgattatagtgttactggactgattactttgtggggaatataaaagatataattaattgattctataaatgaaaatatatgacctagtgatattattttaggaaggcgaaacgactagactcatcagagaaatagacaaattaaaggaagacattaactctcacgtcatcaaagtaaagtgggcacaaaacaaattaaaagctgaaatggattcacacaaggtacgtactgtaatacaatggaataatgattagaatgagtttttttgtttttgtttttgtttttgttttttttttgagacggagtctcgctctt

SEQ ID NO: 6015 - DNA, 2300 bp, Homo sapien
aactgctggactcaagccatcaccctgcctcagtagctgggattacaagtgtgagccatagtgcctggccataatttcttaatatcataaaattaatactaaacatttccagatacctcaaatgttattttttaattttctttttagagatgggatcccactgtgttgtccaggctggtctcaaactcctgagctcaagcagcccaccttggcctcccaaagggctgggattacaggtgtgagccaccacacccagccattcagatgttatcttaaatcgttgatatgttcaaatcagtatcaaaacatcctgtatttgcactcagtgatatattttaaaaaggggtttctctttaaatcctgtacttctcttgcaatttatttattacagtaactgcagggtttttttttttttccattcaattttgttgattgcatcccccggcaggaatacttcacaggtggtgttgtgcttctctattgtagcatttcagaaaatacatagtatgtagttgtttcactttggaggatattaagattgatctagtaggttcaagtggtgccagccccatccatccattacaatacgaagcttcctatcagtttttcatctaatggttctagattcacagatgaccattacctagatccattatttcatcagggtttgcaaaatggtgatcatctatctttctttctgcaattattacatggagttctacagagaagagcttccccacattgactatttgattgacattcagtttgcaacaggaaaggtaggatgaatgcttgattctttatcagttctcagattgtaatgacttgttggcatctttccaagagggtcaatgacattaaaaaaaataaatgcactcactgatttttttacatagtgcgtctcaaccagttgctgttattatttttgaatgctaaatttgtcctgtttgagaagttggggcatctttgaactgccttctgagtcttttgggtacagttcatgttatctttgcttttcttccttgctttctgctacaagcaatatgtcctaggctatcttgcatatttcttgcccctactgggaatcagcacttaacctccaagagaagccaaggtaactttttttgggcaatgctctttagagatcacaatctggggaataggagtgtgcaatgggttggtcactgttctaagagttttcagtggacacaccttttttttcacgaaaaaaatgtaccatgagttaattctgatatttgtaaattcaaatataggattgcagaattttaatataatgtctttggtttatatttgtatttcttttctcttatggtgaaaaacttggttcacaaagatatatttatatactttatactaattataaattcagaaatattcagaaatagtaatacctatgttattactgacgagtaccgaaaacagcttaaggtttcttcagttttttccccttggattaatgtctccctaggaaggcttggtcgatttattgttttaaagtcaaatcatttattttctatgacaagacactttaactgcaaaatgtgcttcagtgtagtaccttcatttaaggaggagtgaggtgccattacacctccgtgtgtgtgttttgccaacagtatcgaagacgcttaacagaacagtagtaagttttgctttacaaattcttacattgcagaatcgtctgcatcagctattttcattcatgagatatgtgtaagacctaaaccaaagaacatcgtttccccggactgaggaggtttgcgaaacctccagagactgaactgctgaccttccttctctgggccgggcgaggcaactgtacccaatacactttttgttgccatgctgcgtgccaggttactcagccgggagaggacacttcctaccatcaatgcgctcagcttgaagccagagacgaaggcaccgacagtttattattaaacaatggcagcagcgccacgctgaagacacgaacgcgctgttatggaacccccagaggtctcccccatcgtagcctgctccagccgactccgcccacgtaaggtgcaaggtttccgcatgagagccgggaagccacaatttcaaattctcttttattgctttatgtccctgactcatgcaggccaaagggtgaggaggagtaatagccaacaagagcgtcctgcagaaagaaacaggctgcgtgggtccggaggagcttgaaaggaagaacccgaccaaagggcaggagacccggctctccaggtcgcggaggcgtgggtgcccagccaggcggagtg

SEQ ID NO: 6016 - DNA, 2300 bp, Homo sapien
atgcagaagaatttcaaataatttctgcagatactgcatcctcaaagagggacaacataactccctactccttaaatgtgggcttcaaataatagcttccttccaaagtgtatagtatgaaaagggaagggaaaaaaaagaatatagtagaaagacccaacaaacactaccacagccagatgaccaaatcctacatcaattgtcataatcatattcataggatgtatgcttgatatgatgcaataaaaatggcatttttacctctgtggtcttccttccaataacccgtaactcctttcctaccagcagaaaaacatcagacaaattccaaaagtagggcatcctacaaaaggcctgagagtactcctggaaacttgacatcaaggtcatcaaaacaaagtctaaggaagtcccatggccaagaagagcctaaggatccatgaaaactaaatgtaatatgatatcctgatgagatcttgcatcagaaaagggacagtaggtaaaaacgaaggaaatcaaaaagatgggctttagttaatactgtatcaatgttggttccttggttccttaattataacaaatgtatcatgctaacagaccatgctaataataggggaaacgatgtggcttctgtcagaactctgtacagcaccttcttttctttctttctttttctttttttttttttttttgagacagtcttgctctgttgcccaggctggagtgcagtggcagtgatcttggctcggtgaaacctccgcctcctgggtgcaggcgattctcctgccttagtttcccaagtagctgggattacaggcgcctgccaccacacccagctaatttttttttatttttttattttaagtagagacggggtttcaccatgttggccaggctggtctcgaactccagacctcaagtgatctgcctgcctcggcctcccaaagtgctgggattacaggcatgagcccccacgcccagtcagcactttcatttcactattctgtaaatctgaaactgctctaaaaaataaatttaaaagacacatcaactaaagaaaaaaaatcaggcttttaaagaattgaagttagtgaagttagttttattcagagtcttactgaggactgcaaccagggagagcccagagaatttctgttaaactactccaaagcagtgggtcagcacactttaaatattaggtggtagaggttctgcccaggggttacattaaaagtgcccagaagctatataagatcaaaatattttcaaagtttgggtgcgagagtaagtctaggcatcatcattaatcttgtccgttaggtacagaaaaaggcaaggcctagatctctgaaagtatcttttctaaaaatgcagtgactctgagaggtgggaacctgagttctctccgcagtcttcaaggcattcttctggagggctgagatgttactaagtcaaggggtctgaaatgctgacaaacacagtgaacaaacgtggctttttcacagtgagggaggactatgctgggggccagaagcagacgttcgctactttgtctcacatttacaattctcggatttgcttcaaaacattgcccgaagagtgcctgggctgcagatgtagacaagattaaccatgaattgataaggtagaaactagatgataggcacacaagggttcccttatgaaattgttagaaaagttccatagcaaaaaaaaaaaaaaacaaaacttaaaaagcttgtctttaagtaacaccaacaggtataatcacatgccctcagtcaggaagcaaagaaaaaaagtatgagcacgtgtgtgtttactttccaagaccaggcagaggctgttgattatttggaaaaccttggaagacctttaagtggccacggtgacccaagtgaccttcgaggagacaaagtctgcatctttgcgcccaaatttgccaaaggcgttgccagagacatctttctagaagaagctagaacaaaataaaagtttctgcaaaggaactttttgagcctgtaactagagcacaagctgcttccggggaaggcggagggaacacgtgggcacattgagttgcacgtggacgcggagtgcgcaggcgtgcgctgaggccaggagggcgcactggggattggaggcgagggaagtgcagggcgcatcccaggcggcagggctcccagcatcggcagtcgccatcaccgccagaccgcagagacaggttcggatccgcggtcctcttgcctctttccaggtcagggttcccaggcgtataggggagggagagggcctgcatg

SEQ ID NO: 6017 - DNA, 2300 bp, Homo sapien
aagtagggcatcctacaaaaggcctgagagtactcctggaaacttgacatcaaggtcatcaaaacaaagtctaaggaagtcccatggccaagaagagcctaaggatccatgaaaactaaatgtaatatgatatcctgatgagatcttgcatcagaaaagggacagtaggtaaaaacgaaggaaatcaaaaagatgggctttagttaatactgtatcaatgttggttccttggttccttaattataacaaatgtatcatgctaacagaccatgctaataataggggaaacgatgtggcttctgtcagaactctgtacagcaccttcttttctttctttctttttctttttttttttttttttgagacagtcttgctctgttgcccaggctggagtgcagtggcagtgatcttggctcggtgaaacctccgcctcctgggtgcaggcgattctcctgccttagtttcccaagtagctgggattacaggcgcctgccaccacacccagctaatttttttttatttttttattttaagtagagacggggtttcaccatgttggccaggctggtctcgaactccagacctcaagtgatctgcctgcctcggcctcccaaagtgctgggattacaggcatgagcccccacgcccagtcagcactttcatttcactattctgtaaatctgaaactgctctaaaaaataaatttaaaagacacatcaactaaagaaaaaaaatcaggcttttaaagaattgaagttagtgaagttagttttattcagagtcttactgaggactgcaaccagggagagcccagagaatttctgttaaactactccaaagcagtgggtcagcacactttaaatattaggtggtagaggttctgcccaggggttacattaaaagtgcccagaagctatataagatcaaaatattttcaaagtttgggtgcgagagtaagtctaggcatcatcattaatcttgtccgttaggtacagaaaaaggcaaggcctagatctctgaaagtatcttttctaaaaatgcagtgactctgagaggtgggaacctgagttctctccgcagtcttcaaggcattcttctggagggctgagatgttactaagtcaaggggtctgaaatgctgacaaacacagtgaacaaacgtggctttttcacagtgagggaggactatgctgggggccagaagcagacgttcgctactttgtctcacatttacaattctcggatttgcttcaaaacattgcccgaagagtgcctgggctgcagatgtagacaagattaaccatgaattgataaggtagaaactagatgataggcacacaagggttcccttatgaaattgttagaaaagttccatagcaaaaaaaaaaaaaaacaaaacttaaaaagcttgtctttaagtaacaccaacaggtataatcacatgccctcagtcaggaagcaaagaaaaaaagtatgagcacgtgtgtgtttactttccaagaccaggcagaggctgttgattatttggaaaaccttggaagacctttaagtggccacggtgacccaagtgaccttcgaggagacaaagtctgcatctttgcgcccaaatttgccaaaggcgttgccagagacatctttctagaagaagctagaacaaaataaaagtttctgcaaaggaactttttgagcctgtaactagagcacaagctgcttccggggaaggcggagggaacacgtgggcacattgagttgcacgtggacgcggagtgcgcaggcgtgcgctgaggccaggagggcgcactggggattggaggcgagggaagtgcagggcgcatcccaggcggcagggctcccagcatcggcagtcgccatcaccgccagaccgcagagacaggttcggatccgcggtcctcttgcctctttccaggtcagggttcccaggcgtataggggagggagagggcctgcatgaaggggaagggagggggcttcggtcgttgggggccagacgttgggcgctggacgttgaggttgggcgttgagcgggtacaaggggcctggaagtggagagaggagacttggaaccttgctgcgagggtttggtgtgggaggattctctgagtttggaaatagcgcttccaggcatcactccttcaaatgcaaacgttcaccttctctctaagagaaacttgcatgtggattcagtgccttcgtttgactaaaaattacgatacaaacaatattaacatttactagacttttttttccctactttcctcctataggaaaggaagatgtgcta

SEQ ID NO: 6018 - DNA, 2300 bp, Homo sapien
aatttaccacctcaacaggaacattgacttgtttcctccttgtgtgagtctcttttactttctagatttttaatagtgtcccaaaggagctgttgtcaatgttttgatgggcacagtgtttgcttgttctattctgctgtgttactgtacctgtactatgtaaataaacactcatgggctatcttgaccttatttagttaactactgcccagggtgagaaactaacatttttaggcacatgttttcaatttgctcttcaaaataatcatttctatattatagtatctaaaattggtcttaatttatgtataattgaaggataattattctttcataaatttctccagcttcaagtaccaaaagtaagcgttatgaatacagtactaacagaggctaataataattatacagaaaattgtctatctgattagtacttgaagatttgtgataagttttcagcatgaaatacattcttttatatacaaataattagaaaaaatcatttttaaatggtaatttttgtaagtaacctgcgtaaaatttttcaggccataaagtgctttgtagccaatgttatcccagcagaagggaattggagcagtgattgtatcaaagctactaaaccactgttaatggagcagtactgctccataaagattgtcgacatcttggaagaggaagtggttacctttgctgtagaagttgagctgccaaattcaggtaagatctgtctttttaaattgagtacttaataggatatgtagtttccacctgttactcagaagaaacggaaacatcaagtgaggccaggtaaactgccctctggagtcattcagattgtgactgaacccattcttgaaattggcagtttgtcaaagacatgacacaaattcatagaattaggtggctggctagatttagacttcatgtgggtgtaactacgatccctttaatagagccattataatatctactcctgaatattggcccctttattgagaaaattcttgaagttctctgaattagtttgtccttatatcagtgctttttcttggagtaaccttcacggaactgcatttggctagtacatagtagctaagctgtggaaatggaaatgctttagaattctcttcttcccttctggcctttcacctgtttgataaatgacttctcacagtgtgatgggtgcctcccagtttccagggtatcacccctctgctttcagagatctggcatcatggctgatttggtagaaaatcggctaatctcttgtgaagttaagtaaaaatctgttgtttgctatgtttcatgttacaatctcagcttttgcatattatttcagggaacttgaagtttgggtccatgctgaccattctttcagccatacttatgtcttaaattaatttcccacaaacagtagtcattctaagcatatttgtgaggtggtaaacaaatctttcgtgttcttcaggatttcaaagtgagatctttttgttaaaatttctgtcaaatagagggtagaatggttaccagaggccgggaagggtagtcaggggctgggagtaggtggggatggttaatgggtacaaaacaaaaaatagttaaaaagactgaataagacctactattcgatagcacaatagggtgactgtagtcaataataattgtacattttaaagtaacttagactgtaattggatgatttgtaactcaaaggatgcttgaggggatggttacctcctctgtggtgtgtttatttcacatggcatgcctgtttcaaaacatctcatgtaacctataaatatgtacacctactatgtactcacaaaaattttaaaaattgtatttcagagaaaaaattctgtcaagtgactacagtaattttgcctcagtgttttaagctgggcactaccatagcttacccataggaactgaattggcaaaacatataccaacctattaatagctatgaacgtgtgttgtatgattgacttgtttcttctttacgcttttcccataattctttgtatagtttctcaatggaggcatattttcttaatcactttttaggaaaacttttagaccatgtgcttatagaaatgggatatggcttgaaacccagtggacaagattctaagaaggaaaatgcagatcaaagtgagtatagattgatattgaacggtatagcgacttcagttattgaagaccatctacctactaaacaaaggcacaactttagcactgttaagacttgttaacgataaacatcctatgagcaatttaaatacgctgttttatat

SEQ ID NO: 6019 - DNA, 2300 bp, Homo sapien
aagcctccacccctgctggtcacccactcagcactcagcactcaccagggcctgcaccacctgccttccctcctgcccaagtgcacaccccggacagactgattatacattgatgtgaagaagtctgaagcaacaggtatcttcactgtatttatgctttcagttcttcataatcacagaatgaaaatgtgaaatacctcccccccccccgcccccaattaaagacatgccaaatacttcaggaacaaccaggattgaaatttggcttctccaaggtaagcctgataaggtcaaagtatgctggtacctgttaaacagcataaggggtacagggagagggttgtcaaaggtagaatttccactttcttgaggacctggggtctgcccttgttggacatctctggagcagcacaggccactcaccccatttgactatacagcacttaaaaatgtggcgagtccaaattgagatgtgcttgtgagtatagaatacaacaggattggccaggcgtggtggctcacgcctatgatcccagcattttgggaggctgaggcgggtggattacctgaggtcaggagtttgagaccagcctggccaacatggcaaaaccctgtctttactaaaaatacaaaaattagccgggcatggtggtgtgcacctgtgatcccagctactcgggaggctgaggcaggagaaccatttgaacctgggaggcagaggttgcagtgagccaagatcatgccattgcactccagcctgggcaacagagtgagactctgtctcaaacaaaaaaaaaaaaaaaaaaaacaaaaaaacaggactttgaagacagcataaaacatctttattgattacatgttgagataatgttccggatgtttaggttaatactgaaatccagcttgctgtttcttttcactttttattaaatgtgaccactagaacatttaaaattacacacgtggcttggtcagtatttctctggggcaatgctgatctagaggcagagaccatccctccccagcagttagacctcaagactaactgctgtcccctgtggggatgatgtggtggtacattatgtctgctgctctggtgtggccctgtttttatttttgggtgctcagtaaatgttactgggagaaatgaattacaggaaaaatgagtcctttcctagcctccttcaatgaggtttgcaacattaaagtcaccacgggccactttcactggaagctgtcagtgtcggaggtttggaaattaactgagaactacagacaggaaaggtgtaaagcaaattattttcctatcagattgacatttacaagaataatgggaaggagcatggaaaagaggaagcaggtcaaccttccttgaggacaattagataataggcatcaaaagtcttaagttgtataaaacctgtatcctagaaatttaccttttcgtagtttattctaaggaattaattggacaaaagcacaaagacatctaattgtattattaaaatggaaagtttaatattcaacaatagcagataggttaagtacattaggacattatgaagtggcttaaaacggacattcaaaaaaaggaaatggaaaacctgagtaatgtacagcttgtatggaatgaactaaaaatatataaatttttgcataggtagaatgacattggaagaacatacaccacaatgttaactgattatctctgggtgttggaaaatgattgatttatcaacttttttactgttatttcttttcttttttttttttttgcaatgaacaggcatgctctggcagtttttaaatgaagtatggaaattatggattgtgcagtcatagtcaacgttcattgagagcttactttatataaagcatcatgctcagcattgtgctttgtggcatttgattttttaaaaatcaaacgccctccaatcttaagcaaggatgatggccaaaaggtcggcttattacccaactgcaacaataggagggacaggtaattaaaaggcaattgccatgacaaatagaaaagatgccaaagtcaacattttttcaaggagctataaagcccgtggaggagtcagctgacggcacagtgttcgcggctgcaccgctcggaggctgggtgacccgcgtagaagtgaagtacttttttatttgcagacctgggccgatgccgctttaaaaaacgcgaggggctctatgcacctccctggcggtagttcctccgacctcagccgggtcgggtcgtgccgccctctcccaggagagacaaacaggtgtcccacgtggcagcc

SEQ ID NO: 6020 - DNA, 2300 bp, Homo sapien
tgagatgtgcttgtgagtatagaatacaacaggattggccaggcgtggtggctcacgcctatgatcccagcattttgggaggctgaggcgggtggattacctgaggtcaggagtttgagaccagcctggccaacatggcaaaaccctgtctttactaaaaatacaaaaattagccgggcatggtggtgtgcacctgtgatcccagctactcgggaggctgaggcaggagaaccatttgaacctgggaggcagaggttgcagtgagccaagatcatgccattgcactccagcctgggcaacagagtgagactctgtctcaaacaaaaaaaaaaaaaaaaaaaacaaaaaaacaggactttgaagacagcataaaacatctttattgattacatgttgagataatgttccggatgtttaggttaatactgaaatccagcttgctgtttcttttcactttttattaaatgtgaccactagaacatttaaaattacacacgtggcttggtcagtatttctctggggcaatgctgatctagaggcagagaccatccctccccagcagttagacctcaagactaactgctgtcccctgtggggatgatgtggtggtacattatgtctgctgctctggtgtggccctgtttttatttttgggtgctcagtaaatgttactgggagaaatgaattacaggaaaaatgagtcctttcctagcctccttcaatgaggtttgcaacattaaagtcaccacgggccactttcactggaagctgtcagtgtcggaggtttggaaattaactgagaactacagacaggaaaggtgtaaagcaaattattttcctatcagattgacatttacaagaataatgggaaggagcatggaaaagaggaagcaggtcaaccttccttgaggacaattagataataggcatcaaaagtcttaagttgtataaaacctgtatcctagaaatttaccttttcgtagtttattctaaggaattaattggacaaaagcacaaagacatctaattgtattattaaaatggaaagtttaatattcaacaatagcagataggttaagtacattaggacattatgaagtggcttaaaacggacattcaaaaaaaggaaatggaaaacctgagtaatgtacagcttgtatggaatgaactaaaaatatataaatttttgcataggtagaatgacattggaagaacatacaccacaatgttaactgattatctctgggtgttggaaaatgattgatttatcaacttttttactgttatttcttttcttttttttttttttgcaatgaacaggcatgctctggcagtttttaaatgaagtatggaaattatggattgtgcagtcatagtcaacgttcattgagagcttactttatataaagcatcatgctcagcattgtgctttgtggcatttgattttttaaaaatcaaacgccctccaatcttaagcaaggatgatggccaaaaggtcggcttattacccaactgcaacaataggagggacaggtaattaaaaggcaattgccatgacaaatagaaaagatgccaaagtcaacattttttcaaggagctataaagcccgtggaggagtcagctgacggcacagtgttcgcggctgcaccgctcggaggctgggtgacccgcgtagaagtgaagtacttttttatttgcagacctgggccgatgccgctttaaaaaacgcgaggggctctatgcacctccctggcggtagttcctccgacctcagccgggtcgggtcgtgccgccctctcccaggagagacaaacaggtgtcccacgtggcagccgcgccccgggcgcccctcctgtgatcccgtagcgccccctggcccgagccgcgcccgggtctgtgagtagagccgcccgggcaccgagcgctggtcgccgctctccttccggtgagtcccagccccgagttggctctggcgcccgggtacccgccagtgccggctgccgatgaccgattcacgctcccggtactggggccccctctgcccagccacccctacccagagcacccgggctgcgcggccccgccgagggtgcgggctttgttcgcattgtctgcgcgcacctgagcgcggccttcctggcacggcggcgtcgggggaagagcgcacctggcgcgcgcctccctcgtggccactcgcggtccgtcccgggcgagctggcggggttttgggaggggtgcggtcagcaggtaagtgggtaggggctccgggtacaggggtggaggagggcatgtattaaacc

SEQ ID NO: 6021 - DNA, 2300 bp, Homo sapien
agctgggtgtggtggtgggcgcctgtagtcccagctacttgggaggctgacacaggagaattgcttgaagccgggaggcagaggctacagtgagccaagatcccaccgctgcactccagcctgggcgacagaacaagattctgtctttaaaataaaaaaaaactgggaaaaggaaaccaactaaatgtcaaattctgctcatcacggcctctttgatgaagagaatgtagcagcaaacgtgatggagctatgggttataccaaagggggctgattttcctcatcaaaataaacctatagctttgattaaatgggcagttttttctcattataaaggtaagaaacagtgtggacattttaattgaggtacccaatggatgcatttgattagaatgcattgtcccctggaaaaaaaaataccaaattcactgggattttgatgatgatttagcagctgagctagtgtaaggtatttaaaagatgtcccgactttactgaagccatgaacaaaataaatttgaatgttgttatttcttggggatccaggaagtcttgttgtatatgggattgggggaatgacatgcattgttcataaaatacaagtgtcaacttaaaagacatacaattttttaatcattttaaaaactattaattaacaggtggtcactaacagtttttaatagtgaccacctggtgataagttttcacctcctagaaacacaatgtatatacatctcatatggcccttgggacaaaagtccacagcattattgaggtggcatcaagatgtcactgacgacaggaaatattatctggggccactggggggtgggataggctggtgaacaggagaagcacagccccgggctgttacagaggctttcgtgggcaggctcaggggtaggggtacggtcatggcctggtggggaggggctggcaccaggcagcactgcctggccctgcttatgtctctcttggcctcgttccaggccaagtcttccgaggaaatgggccactggctgggtctcctgctctctgagtcaggctccaagacagacccagaagagttcacctacgactatgtggatgccgatagggtctcctgtattgtgagtgcggccaaaaactctctcttgtgagtaatttggacccttcctccgtacactctcttattcctggccatgctgtaggccctgggtcagccagagtcaggggcagcagggagcacagggtcccaccccactctgcccagcagcaggaaaatgtgaagccaaggagtagccctcagggaggcccggccaagagccaggagctgagctaagagcaaggagccgagccaggcttcgggccccgggggcagctttggcatcctcagaggcagttagactctccagctcctccaggcagagctgtcacctttcctgacctcctacttgtccttctggtgaatccctcactgggtctccagcacaccctggagaaaagcaggtcagggggtggtgcttctgtttccagatgagcaaactagggctgagggagagggcgttctctggtcagggtggtagagccagtctcgtggaagccggctgagccactgaaacagaatcagttttctcatggaccaaacggggatagtgtctggcctgcgccaccccaagtgtattgtgaagatgaaatgagaaggggttttttgttgtggttgctggaaggagatcctagaagggaggaatgggggagaagatggcaaagggatcctaggacgaggcgtatgggcaagggaagcttgtctttctgggaggaaaatctcgaaccaagaatttcaggaagaaggcactgggaaaagagggaggaggtgccctcagatccatggaggtgagtgtcagcccccagatctcttgtgtggccaccactttcacggcaaccactcctcactgggaatccttggagtctggtgctttcaccaccctgccccggctgcttcatgtgtgccacctcgccctgtttccagactgatgcagagaaagttctcagagcccaacacttacatcgatggcctgcctagccaggaccgccaggaggagctgtatgacgacgtggacctgtcagagctcacagctgcggtaaggacccggccaggcagtggcctgggcctctccaggccctcctcctaccaacctcaacacctggatgccagagatcattagagtatccctgagatgagatgagtgggttctgagtcacctaccaggccagtagtgcagacacctaagtgcaacaaggctgtctcctatatgtgaggct

SEQ ID NO: 6022 - DNA, 2300 bp, Homo sapien
acagataagaccactgaggcccagagggaatggggggcttgtcctgggctgcagagctgattaggacccagagctctgggctgttggtttcttaccccagtctcctgcctcacccactacacacacatactcatttgcacacatatatgcacacatgcacattcatgtatacatttgtacacacacggacaaatgcacatgtatgcacatttgcatacacatttttgctcatgcatgcattgcgcatgtatatgtacacacacacacacacacacacacacacacacacacacacacacacactctgctcttgcccccagttccccgctctgttcctctgactgctcaaatccaccgatcttctccctggcccctagcctccctccccaaactctcacgccctcttcctgaggcccctggccccatagcctctgctggtggtttcaaagacaagaacgctttcagcaggcacagactttctgtgtccagcctccacagagagacccttccccccagctcagacaagtgcagaggtggacttggctggaaatgcctgctctcagaagccgcccactcttgcgctttggcagtgggggctggtccacctgtctgatgggctctccacctacctgcattggctttgtgaagcccatctaccttccttggacctctgtgtcccaattctgcatatccgcacccatgcccagggtgagacaggtatatgacagtaaacgggagatgctgactatgggacgacggtcccagtaaaggaaggcacaaggcagggcttttcccaggaagcatgaccctgcccccgccccactcctgaactcctggcttagtggcactttccctgggcagggccatccgtgtatttggcccaagctaatagggatggtaatccatgtgcctgccctgtgctgggtgcttgacatacaagcgctcacagctggctcgtggcaaaggtattgacccagcttacagatgcagtggctgaggctcaggctcaatgtcacacaggtgccaaccctagtgcctgtgctcttcctatgacactgggttgcatattcagtgtggaccacagtcccgaactggagttcttgggctcttctgatttgaaacccatttccacaaactgctctaggcatagactgaaagagggggatctatgaaatcactctaactaattctgcgtttccaaagggcttccaggtgggtagtgtgtttctggtcgccctgggagttcccccggcaagaagggagtgcccctggctcagactgaggcaatgctttcatagtcagagccactgctgactttctgcatctgcccccagcccaggctctgttcctctgactgcccaaacccacctatccttttccggacccagcctcccttcccagagtctcacgccctcttcctgagaccccctgccccatagcctctgcttggggtttcaaagacaagaacgctttcagaaggcacagcctttctgtgtccagcctttacagagagaccctcttcctccactggtcaatgaagccagtgaagaggccccttcccagaggcgggcgggcgggtgggtggcggcaggcgagtcgggagagccagagggtggttggaacaagggagtttgcaggcctgctcctcaggcagcgtggagactccacagagagttgcatgacctctgaaaagccagaggactgtctagcaaggcagttgttgatcacgcctgcaacagaacagtagccctgcctggaatggtggcaggaaaggggctcgcggagccctgggctggtggctctggtcatctttggcctttgctgccaaggccccccctcgcatgcccatgaacgtgtgggacctgcggaaaggagctaaacaacgagccctccccactgcagcctgcccagctgggtctgaggccacatgcaggccttggggctggggtcgggtgggtcctcttccttggaaattcatcttctctctcacctccacccactctcccctgacctgcaggggccctggcttcagcctggctgtgagtgctggccagaggacctcagcctctgctgacggcttccctcttgcctcaggtcatccaggaagtgagcggcctgccttccgaaggagcatctgaaggaaaccagtacaccccggatgcccagcgctttaactgccagaaagtaagcctctgccctgcctggagggagagtccccttccatgttttctctgtaaaaattaaaagtgcaaaattgggagcttcgtttttatatttcagtccaattaataagaaacata

SEQ ID NO: 6023 - DNA, 2300 bp, Homo sapien
cctactctcctctcaccctccaccctcaagtaggctgtggtgtctgttgttcccttttgtgtgtccatgtgtactcagtatttagatcccacttaaaagtgagaacatgtggtatttggttatccgttcttgcattagtttgcttatgaaaatgacccccagctccattcttccttgctgcaaaggacatggtcttgttcttttttatggctgcatagtattccatggtatatatgcaccatattttgtttatccagtctactgttgatgaccatttaggttgattccatatctctgctattatgagtagtgctgcaataaacatacatgtgcatatgtctttatggtagaaccatttatattcctttgggtatatatccaataatgggatttctgggttgaatggtagttctgttttaagttctttaagaaatcaccaaactacttttcacaatagttgaactaatttacatttccaccagcagtgtataagcattccattttctctgcaacctcaccagcatctgttattttttgactttttaataatagccattctgacggtatggtatctcattgcagttttgatttgcatttctgtaatgatcagtgtgaagcccacgagtttgaggctgcagtgaaccaagattgtgccactgcactccaacctaggcaacaaaccaagaccttgtctctaaaaaaataaaaattaaaatacacatttggaagcagacagatccgagtttaacgcctgctccgctcttttctagctgtgtgactttgagcaaattgcttaacctcttttcttttttttgagacgtagtctcacactgtcacccaggctggagtgcagtgcgcaatctcagctcactgcaacctccatctcccaagttcaaacgattctcctgcctcagcctcccaagtagctgagtttacaggcccctgccaccaagcccagctatttttttttttttttagtagagatggagtttcaccatgttggccaggctcgtctcgaactcctgacttcgtgatccgcccgcctcagcctcccaaagtgctgagattacaggcgtgagccaccgcgcccagccgtagcttcttcacctctatgaaagagatcataataatacccatgtcacagggatatcggggaaactaaaggcagtgatgtacagcccttagcgccgtgcctggcttgtggggagggctccatccacattaggtgctagtataactaagaaaaatatttctacatgctgttgggaggggttgggggaggtctccaaacatcacaactaaatctgcgattccaaggaagaattaagaagtcttttagaaaaccaccactgccaaatcttccttaattgttccttcaaggaagctggggaacttaggtaaccaaccaggcacccagcacaaaccgtgactgagattttaaagtgaaaactgaaaaagtttaaaagaacacatagatctctggggggagcacggagaagactaggtcgcattaagggcctggaaggaccggtggcaaaaggcaaaggatggaagtgtggcacttctggatggaggcagtgcagggtggagattcagagccatggccgagcttccttatggaaccggcgccacccctccaaggcggtcaggtttactgggcgccccggaaacggcactccctgacttgtggcgttggccctggaaattcaggtagaaagcagcaagcagatgttttcacacaccctgaagtgtgcgcgattggcagcggctgcccagagaggttccaagagagtgggagcaatccccaaagaacccggagcaggtttggttgcccgccccgctgccctcctcgcccctccaggaaggcctagggcaaaagcgcgctggctcgggagccaagcgcgaggagctctaagccagtctcaacctcctagcttggacctcggtctcctcctccaggcattgggtttgcagcgggcaggggtgtgggaacaatcttggaggcccacccaagcccggcctcccggagcctcccccagagtttgggaacgtcccagtctcgttccctctcgacgcccccggagtcaagacgtgaagggagtgccaaggcggccgggggcggcgagcggggccgcgggcgcgcaccgactcaagagccgactgtcagcctcggcgggccggagttctccggcgctgggacaggggcgctgggacaggggcgctgggggcgagccctggcgggggccaggtccgaggaccctgggcgcggcggccccgccaggaggtccggccgcgagcgt

SEQ ID NO: 6024 - DNA, 2300 bp, Homo sapien
gcgctgtgttctgtgagtgatgacaggtgagagacgaggtaggaggggaaggcagggatagaatcctgaggccctggttgttgtgattttattctgaatggatgcttctgttaggtctgttctcatgccgctagtagacatatacccaagactgggtaatttataaaggaaagtggcttaatggactccagttccacatggctggggaggcctcacaatcatggcagaaggcaaataagaaacaaagtcatgtcttacgtggtggcaggcaagagagcttgtgcagggaaactcccatttataaaatcatcagtctcgtgagacttattcactatcacaagaatagtatgggggaaactgccccatgattcaattatctccacctggacctatccttgacacgtggggattattacaattcaaggtgaaacgtgggtggagacacagccaaactatatcaatgctggagacaaaagcagagtagtgaccatccaaattatgttcttgaaaggtctctcggctgagtgcggtggctcacgcctgtaatcccagcacttggggaggtggaggcgggcagatcacgaggtcaggagatcaagaccatcctggctaacacggtgaaaccctgtctctactaaaaatacaaaaaattagccgggcatggtggcaggtgcctgtagttctagctactcgggaggctgaggcaggagaaaagtgtgaacctgggaggcggagcttgcagtgagccaagatcgcaccactgcactccagcctgggcgacagagtgagactccgtctcaaaaaaaaaaaaaaggtctctctatccattgcctgccaggtggatttgatttgaagaagggaggggagaaggcagaaaactcacagggaggccattgcaataatctggatgaatggaggtggtgactggggctgggactacggcagtagagagggagagaaatgggaagctttgaggtgtgctcaaaggtaaaccagaaattctcgtaggggacaaggagcaggaagggccagagaaaggcctccccatgccttttcaaaactggatcgtacaactagtttgcatttacctttccttctaggttgtattttaccttattcaaaaaggtgataagtgtttctttttttcactagctgagtttttagtaaagcttaagggcccaggacagtctagattctgaagccagggtccgaagtcttacaagtcactgtttattttacagcctaccaggacatcctcggaaagtatttattctaggccaggctccagtattcctggctcaccaggtcatactatctatgtaagtatctacttctggaagtgacatttctgggacaggtaaattagtggattgtaatagcagaatgggtaatccaaaacaaaaactgattcaaagtgatttctatttttgttatgagacctgattttcatttttgtagaacagtctcctcaatcacttttacctttaggtaattacatttatgtgaccatcaacagagtgatcagacgacctgtaaaatgtagtaatatgttgcgggacttaaaaaattcttgcacctaagactccgtctcaaaaaaaaaaattcttgcacctaaattgcatatagatatttggggattaaatatatattttatgaagctgatactgagtgttcctaaattctaccacaaagatatttaaatatttagtttattaattatgcagttcttgtttttagccatctgagaggattattggaccatctgtttgagctttttcctttactatcataaattcaggaaattatccttaaggtttgcacatttatctatttcatgaattctacacagattttttcctaagcgttcagtgacttttttaaaaaaacatgattaatatatggtataaagggcaacttctgaagagtataactgtgttaggcaagatgttttggtttttgtttattttaaggccttcactttttaaacaacaggaaatgcgccaactacagtttcctaaagcagtcagactacaaggtaattgttctttctggttaactttgccaggcaaaagtagacaatgagatcctggattacaaggatttagcagccattccgaaggtcaaggcaatttatgacattgaacgtccagatcttattacctatgagcctttctacacttcgggctatgatgacaaacaggagagacagagccttggagaggtaatacattcctactggttgtgagttgtacaacaatttaccttcccttttgtcacatttgtaataactaccatttgga

SEQ ID NO: 6025 - DNA, 2300 bp, Homo sapien
ttgtaaagggggacaccttcactcctctgacagacattgcatgctaatatcttaaacatgaggtgaggtgcaggggttacagaggtaaaaggtaccatccttaaccccaaatggtcttaccatctaaggctgaggttctaaaaccactatgcctaacaatcacctgcatatcttgtttgaagtgtggattcccagcacaacatggtgcctatcattaacaatactgtattgtgcacttaaaaattgaagacagtacatctcatgttgtgttcttaccacaataaaaatgaagttattcatgcttttaaaaaataatgaagtatggattctcaggcctcaccccagacattctgattcaggaggcctgggaatctgcatgtgaacatgcagccctgccctgggtgattctggtacagggaagtccacagatgccactttgaggatctggccctataagggtgtggtgaggacacattgatggaggtttctgactcctcagaagaaaaatgcactagaaatttagtgagacccctgtcattattatgatgtataagccaatagtctcctcttcattttagaagcacggctttgttgctaaaaccttacattttctcagcactgcttgggacttcttccaaaccagcttagagagattccacatgtctatataaaagggtcttttcatttcctgatctttgtgggcaaataatctccctaaaaaatttcgtaaatcatcctagtcttcttaaaaatgacaaacgtggcagggcagggtggctcacacctataattgcagcactttgggaggctgaggcaggaggatcacttgaggtgaggaattcaagaccagcctgggcaacatagtgagatcctgtctccacaaaaaatttaaaaattgccgggcgcagtggctcacgcctgtaatcccagcactttgggaggctgaggcgggcggatcacaaggtcaagagatcgagaccatcctggccaatgtggtgaaaccccatctctactaaaaatacaaaaattagctgggtgtggtggtgcatacctgtagtcccagctactcaggaggctgaggcaggagaattgcttgaaactgggaggcggaggttacagtgagccaagatcacgccactgcactctagcgtgggcaacagagcgagactccgtctcaaaaaaaaaaaaaaactttaaaaattagccaggcatggtggctcacacctgtaatcccagctactcaggaggctgaggtgggacaatcgcttggacccaggagttggaggttgcagtgagctgattgcgctatgatcgtgccactgcactctagcatgggtgacagagatcccatctcaaaaaaaaaaaaaaaaaagacaagagttgttacagaaatctttccatcatcctaagaaagagtacattaaaagggctgtgccatcactggagaaacttccagttcctcctctctgttcacatgcatagagagcctgcagcttcccctcagtcactggctcacctgagatttctgcagggatggtttcgttgaaaatgaggctgtgtgtataaaatgcctgcaacatagccagtagctagccagtaattttctgctacaattaaaaacacacaatacaaaatgtaccaaaaatatgaatcaagaaagcttgataagaggttttccaatcatatttgtctcagacagtactgcagaataatatggaaattctgaagtaacaaaagggaataaaaagttgaactcagttttgttatacttttgcataaggggttccttacatgtacctcaaaagcagggacttgcgaggaggctgcaggctgtgtgatggctgtgctcagctaggcacctttccatcatctcaaatccgagaaagaaactcaaaaagcctaagaatctcgtttcagtacaagcttatgcctcagggacaatcactgtcggtttcacatgcagacaatagtgagtgaatgcaaagaaatggtactttcctacctgcatttaaaaaaagaaagaaagtaaatctactccccctccttttttgggaacatggactggcccattgtggttgctggtgtgttgaactagtaagtaaagcgaggagaggaggcgtgagagagcgtgcctgcccgccgcacacggggctggtttccggagtgcgtctctagagggatgcacgttgccttagccgagcttcggagagaagcctgatatgtaacccaggcaggtgggagcctcagtctgtcgggctgaggtctggcatctacaaagcctcttggccgtgttctgaact

SEQ ID NO: 6026 - DNA, 2300 bp, Homo sapien
gagacttaaatgagtcttttattttttgtcatcggttgagtggtattgacatcattcaaattacctaactgatagtagacactgttggtgaacccaaggtatttttctgactttcagtttcacccaaagactgttgctctggaaaagagacagaaagccaggctggtattcaaaacatgaacatattgaacatgcatttatagagtgctggctttgtgcatacaatggtgccagaccctggtaatacaatggcagttaccttgtaatggagaagatggaaaagaaaaaagaaatagaatgtttagactgtggtaaatataaagagaggaaactgagatgggggtcggagggagactgcctttaacaaggtagttcagggagaagtctcagaggaggtgacctagaagcttgagggtgtgaccagaaggaggagagggagctgggctcgcaaacagctggggaagagccttctgggcagggaaaagcatgcctggagatcttgaagcagcaagagccagagcttgggaggatgtggaaagagtgtgagaagaggctggaagaggtggtggggccagagcgcatcttccatagggcagtgaaagaaggattagtggagtaatctgtttatattatgcacttaaaagatcattctggttgttgcatggcaaagggatttaacaaatgagttgacagtccacactatttgaagatacacacttgtgtttttctttctttctttctttctttttttttttttgagacagagttttgctcttattgcccagactggagtgcaatggcatgatcacggctcactgcaatctctgccccccaggttcaagcgattctcctgcttcagcctctcaagtagctgggattacaggtgcgcaccaccacacctggctaattttgtatttttagtagagatggggtttctccatgttggtcagactggtctcgtcccaacctcgggtgatccacccgccttggcctcccaaagtgctgggattacagacgtgagccaccacgcccagcccacacttgtgtttttcatagctgtgccctgaacccctcctagcaccttactttagtgagggatcaattactcatagggatatcctaatgtttctaattttccggcaaatctctggtgctgacactggtgttgacattcctctaggcaagttgtgtttgtgaaaactcccttgtgagtggggcattgatctgatggcatctcgttcagatttttttatatctgtcttgttatgggctctttcctaaaaaggtagcagagatgtaatgatattgaggacatttgctggggtggggatgtgttggtgaaaaacatgtctaatactttagtggggaggatggcatgcattaataaggtgtaggaggtgcaatctcagcccactgcaacctctgcctcccgggttcaagcgattctcctgtctcagcctccccagtagctgggattactggtgtgtgccatcacacctggctaatttttgtatttttagtagagactgggtttcgccatgttggccaggttgtcctggaactcctgacctcaggtgatccacctgcctcagcctcccaacgtgctgggagtacaggtgtaagccaccgcacccggcctactttccaagtgttggaaggttacatttaggagttccatggagggatttaaaaattttttcttcctctcccttctcctcccagtcccatgttggattttaacatgttttttcttttcaagccatagtcttcactaagtgctttgttaaactttgggagataatcttttcttctccactcaagcagaggccattctgaaggtaaataagagaatgatcaaccaccagggttatgctcccttgtcaccgggatgaatagaagaatacctagcaaggtgacagattatatgtgtttgcattttcttgcagaggttacacccagcaaaattaggtcataagagagcttgaaggagcctgaagttcaggtctgggaggagtcaggagcctaggtgtttagagagtagttctagaatgtgtagcattctagaatgtttgacattgcaagttggatgctgtgaacacaggtctcatgctttcatctcccagtgggtgtgcagacactggagagacccaggtgagggcaggtttgtgtctttattcacagtgcaagagcaagagtgccttttcagaaagggttcacattcttgtttctgaaatttataagcacttgaatgaaaagcttcactctgcagtttggaatcagtataacctttggcacaatgg

SEQ ID NO: 6027 - DNA, 2300 bp, Homo sapien
gttctgtagtggtgctttctgagattttggtgcacccatcaccctagcagtgtacactgcacctaatgtttagtcttttatcccttaccctcattttgagaaacattgatagaacatcttacattgtatatctgaaggttcctcaaaataggcaaacagggaaaagaacacatacagattgtttgacctgctttgtaaactgtttttagaggaagactttggaggttggtgttgggcttaattcccagaattttggagcagaaattttgaggtgtgacttcagtagtggtagaagtcccatgttcccactttccccaagtccacctcagtctgagtgcctctagacagcgtctgtttcttccattcccaccgtgcttcacattggcatagaataattctagcaaattggaattctcaggttcttgaattgtgttgccaatagattaggaacttgtaacaaaagaagcaagaatttcctttctctgcttcatctgcctggggcctttgtggaaggacccgactattggataggaagagtcagcatgggaggcagaagacccggctccaccctaggctctctgcattgtcctgagaaagtcacatcttctctgagactcaccttcctcatcttaaaggctggcgtagatcagtgcttcctgagtgctggcactagtctgggagaatgtttagaaatgtaaatgatgagttaatgggtgcagcacaccaacatggcacatgtatgcatatgtacctgcacattgtgcacatgtatcctagaacttaaagtataaaaaaagaaaagaaatgtaagttcctgacctttacgtgcaagaatcccgtatatatatattttgtatttttcaaaagttctacagattttttgttttgagacagagtcttgcccggtcacctaggagtacagtggcacaatcatagctcactgtaacctcaaactcctggactcaaccaatcctcctgcctcagcctcccgagtagctgggactacagatgcatgacaccacacttggccaatgttttaatttttttttttttttctgtagagacagagtcttgctatgttgccagggctggtctcgaagtggcctcaagcaatcctcccacctcagcctcccaaagtgctaggattacagacgtgagcaaccgcacctgcagatggttcttatgcacagcaatatttgggaactactggactagattacctttgatggccttgtcagctctataattctattctagggttttaatgaaaaggaatttatattagaacataatagcccaatgacaggagaaggagtgtgagtttattcattttgacttgggacttttgtatggttgtagacggtcacattttgtactgcatcttactgtgtggatgttaaagagtaaatgataattactggggttgtcctttttatatcaatacactaattccatgaaggtccttctagcttgtaactttgtgtaaagctgaagctacctacatgttaattctgtctccatcatatgattctgccatcacagaaaacccatgaaacattacgacagtaaacattggcttaatggaatgaggcagaaggattttcctggtactgaggggaggggtccccttctagaaaatggaaaggaaatgatcgtttactatggctgagagctggatttgtcacgaattgaagctgaggatctttatcgagccttccccacctccacctgtgagatctgaaatactggaaaacttggaattattaccctgggatttttctgatagacatttttagattatataaaatatgtgtatatatccctagccctattctcagtactcttaccagatgatactgaatattctaggagtatttgcaggagaattcttttagatattgcagttatattctttctcttattctggatattaatctgattttcaaatatgcattcatgtctgagactgaaagtctcgagttcctggtagtggctgtttttatacctagtcatctgactgagaatatggtgccctaagctcttgagggtaatcacttaaatacatctcccttaatcttctttgctgggcagtgagaaaaggagacagtaaggagccaggggaacagagagaattgtggggcagcaccgctccttgggtccccactccccatttctcattgcttggaaatccatgccaagatgcctgccttccttggtctaaagtgtctggggaaattgtgcagctctgagaaaagcaaagtcacctcatctgagagaaccagtgccaggggctcgaacag

SEQ ID NO: 6028 - DNA, 2300 bp, Homo sapien
agcatttgtatttgttttgctaagtgacggtcactttcctgtgaagggttctagaagcgtggttgggaaagatttctgctctgtgtttttaagataaggaacacacaaccgtgtctctgatttcaaaatgacatggtataagctccattgctatttaattagaaagtggttgtttgaggccgggcactgtggctcatgcctgtaatcgcagcactttgggaggctgaggcgagaggattatttgagtctgggagtttgagaccagcctgggcaatatagggagactctgtctctattaaaaaaaaaaaatagccgggcatggtggcacatgcctgtagtcccagctactcgggaggctgaagcaggagaatcacttgaacctaggaggtcaaagctgcagtgagctgtgattgtgccaatgcaatccagcctaggtgacagagtgagactctatctcagaaagaaagagagataaagagagaagaaggaagggagaaaggaaaagaggaaggaagagagaaagaaaattgtgcattttaaacaagtttctaggcagttggtttcacctcttttgtttttgtttttttttttgagacggggtctcaccctgtcacccaggatggcatgcagtggtgtgatcatggctcactgcagccccaatcttctgggctcaagcaatcctcctgcctcagcctcctgagtagctaggactataggtgcaggccgccatgcctgcctaattttttttttaatttttagtagagacaaggtcctgcaatactttccaggctggtctgaaattccagagctcaaactatcctcccatctcggcctcccaaactgctgggattacaggcatgagtcaccacacctggccagtttcttgactataataaatcatcaaccaaattgtggttcaactaacacaagtcaaatttggaggactatgattaggaaagaatcactttattgcttaacattcaaaaaaatcaaagtttcaatattggattgcctgctcccccactttgcccctgtcctgccttgtaaaaggcaaggaaccaatgcaatgcaggttatttttaaactagcaccctattttagcccctgaaaatagctgtagctctgtacttggtttcttctctcatttaatatcaagtaggaataatacttcgagatttaaaggagtaggaaaaactagcctccattacattttaaatgcaggctaacaagaataaagaatgcaacgatgaaagacttccatccttatggtaaaaatcccaagacactaacaaaaaacacattaggctaaaatatggaatcactatcatgagaatgcaaggcattaggtgtaatcagaagatttcagttgatgcgactggcctttggcagcagctgacacatgacagctctgcaaatggcaagcattttatcaacgagcaatccagttgtgattctttgtctggcgcctggtgctacagccaagtcaggaggacgttatcagaggcaccaagttccaggcagtagcctggaccaggggaagggcacatagggtgacccatgaggatggctgtctacccgagtcatttcaaaacaaaataaaaaagccacttagctggggaagagagtaagccaggactcttcaattaatcaaactttgcatttggccaatgtgtttcaaatagtcttgttttccagtggattgattataggccttacattaaattaatatctcacaacgggtgctgctggttacatctttattggaggaattaaatgttttaccctcacatttaaagcaattatgccagtttcctcctatttcttagccaatgtgtgtatctgatgccaaggatatttgtcctaagggtctttttccatttaaactgtcttcataacttttccaatatgcaaaattcccggtgttcaaaaataactgtgagaaaagttggattgtgggtggtggataatccagcccaacatcagggcattactgacgaaaggaaaaaaatgcctctttcctgagtctttccggatgaggtcattgttttcagacagcttgtatacctaatataaaaaggctcaaagtccacggctcgtctcataccaggagtttgtcagggaactgtttccaaagccataatgaataatcaggctgttagtaaaagaagcctctccaagttatagcattttttaaaaattctagtagtgaagaaaataattaaaagcccatctggttgagatagtaattcattaaggaaaaagaggaggcagaaggctggggaataatcgatccttttctt

SEQ ID NO: 6029 - DNA, 2300 bp, Homo sapien
tttttctctgcttgtggaacacacacatatgcacacatagggatttttctcaatttacaaaactagggtcatttatgacatagattttattctaaaacacactcttttcacttaacaatgtatcatggccatccctccagaccagtgcatatgggtctcactcactctttccaataactgtgtaatagtccacatgtatgcgccacaatctggtcactcattcccccaatggatgagcagttaggttgcttccagttttgtggaagttccgaaaacaacgttagcaaaactggtctaagatttcgacagcacacatgagttatttccctgccagtgcaatggaatctatccacacacacctgggcctttttcctcatgactcaagcttctgaaaagccagcagtttcactgagtgattgcttctttgtaaagtgtttgttttctgcatgtgtcttgcatggtgtatgtatttactatttattgaattggaccgaaagctaaccagatagaaaattgtctggaagggtttatgggatgcactgtttgccattaattctgaggttttgataggaagggagaaaataggagattttcatttttaactttgtataattccagcctgtttgaatttaaacatactgtattaatttataatttaatattttaatgtattatataggtatgttaacatagttttgttgtattaatacattgatagtgatttttttttgagactgttgaccaggctggagtgcagtgacatgatcttggctcactgcaacctccacatcccaggttcaagcaattctcctgcctcagcccccgagtagctgggactacaggtgcacaacgccatgcccacctaagttttgtactttttttttagtagagacggggtttcaccatgttggccaggtgggtcttgaacccctgacctcatgctgccttggcctcccaaagtgctgggatcagaggcatgagccactgcacccaacctgattttaatatattacttttataacttaaaaataacttttttgaaagcttgcaggatgatccagacccggcattagagaaaataagctctaattcaatggctcccaagtctgcctgtacataagaaataactggggcttattaaaaatgcagatgcccaggcctaacctgaatattctgatttagtagctctgaagaagaggctttgtatcagtacctttgataaacactccagttgactcttatgatcctgccataatgggacaccactgtaatctagtggtccttagaatcacttttcacatgttttgggactctatctttagtgtttagaaaccattagatctggaatgaggcctgggaatctatatttttaaaaggttgcctagacaattctccccaggtatggaaactctattccaagtgttataatttcctctagctggtaattcaaaaatcaaaatataatggatccgttttggtctctagtggaaaaatacaacaccaagttacaagtctttgatgagagtatcctaaaataccacaagatgggaatgtcttagcttgctctatcataaaattaaagaatgcttttaattgttagcttgaatagagaactggattttaatacttttctcttaaaattttaaaaataaagttgcttttcttatgagattaaattgatttatttgtttgtttgtttttttgagatagagtctcagtctgtcacccaagctggagtgcaaagtcgcaatatcagcgattctcatgcctcagcctcccgagtagctgggattacaggcgtgtgccaccatgcccggctaatttttgtatttttaagagtgatggggtttcaccatgttggccaggctggtcttaaactcctggcctcaagtgatccatccgcctcagcctcccaacgtgctgggattacaggcgtgagccaccgcacccggccaattgatttcattgttttcttttcctttttttaaaccaaccagggacatttaatttaaaaaaatacaagcaagttatccaggacctaatctgctaagcagtgttctccccaagaggatgaagccctgctggctggctctgacattcaattcagactgaaaacacagtaactcctctggcccttgctgggaaatgtcctgcgcaggccatgggcagcactccagtgcagctgacctcccacaaggcccccaaacacatgatcccaccaaaggcttgaacaggggaacctcacaagcaggcagagagcacacctgagacacaaggacaagtaagtcaagcaaatggga

SEQ ID NO: 6030 - DNA, 2300 bp, Homo sapien
tgaaggaccttaaaatttcagtggactctaagctttgtgtgggcatagatcatgtctatcttgttcaccattgtaaccctagtatctaccctagagactggtacataatatgtgttcaataaaattttgctggatgaattaattgcttggatgaagacagtttgaaatgttcagtctgtatctggagatcagtgaggacccactaataacctcatagtagaacatgaactagtcatgttataaatagaaaaattattctcaaggtaatgggcaaaataaacctggggggtgggtggtagggaggcagtggaggctggaggctgaatgtaggcagggcaaccaggctattcctgtgatcatgctttaggtgagaaaggttaagagtggaatgaggatagtgggagaggagagttgttttgagattgaagcaactgaattgtgattcactggcaagttttctgcctaaaagacagtgaaagggatgttgtcaagatggataaataatgagttgatttttgtagttggcatttgaatctgagaatttctattcccattacaaatcttttttctagtatttcctttcccacatgatcatttggttgggtttttttcaacaatgctcaattatccatcaattattttttctgaaagaattacgttcacctattttttaatatttctgaattgtcagaactattatacaattccatacaattcccatcacatcaggatggatttgggcagtgccaacatagaaaacaactagaacatctctttcttttctttctttctttcttcccttctctttctttcttccttccttcctttcttttctccttcccttccttccttctctctcttccttccctttctttctttctctttctttctttctttctttctttctttctttctttctttctttctttctttctttccttcttttctttctttctttcttttctttctttcttgtctgtctctttctctctttctttctttttctttctttcttatctcgatggagtcttgctctgtcacccaggctggagtgcagtgccgtgatctcggctcactgcatcctccacctcaagcgattctcatacctcaacctcccgagtagctgggattacaagcaccggtcaccaaggcctgctaatttgcttttttttttttttttttttttttcattgaagacagtgtttcaccatgttggccaagctggttttgaactcctgacctcaagtgatccgtccacctcagcctcccaaagtgctgggattacatgagtgagccaccacacccggccatagaacatctgttttgagagtgcacagaggaagagaggacagggcgtgagagtggaatcccacctttttagttagaatttctagatctggtggctttttattatgttgcttattagcatcaagcgctagttgataaacctccagggcactaagaggtttttgttgtattttctcctttttatcctgacatatagaaaaaggggatttgttcagagtggtcaccagcccggcccagccccgactcttcagagttgatgcagtaaatcaagtgtatgcacagacctcccttgagtgtctgttggctcaagaccgggtgctgggtggggggaccctgacgccccccgctgactcgagggtcgctggaggaaaagtcccgccccatcccaccccgcccataggctttccgagagcctggccgactcggaggggctggtgggtcggtccccgcgtgtggactgcgggctgagccccctcaggcgaccgtggtcttcgctctcctgtcaagggcatcacttaggggaaggaacgaacggccctttcttgctttctctctctgggaccagagagctggagagccattcggagcacccacgttatttttcttcttattaagaagacgggcggggagaggggaggacgcagaccctcgttcctcggggacagagccccgcccggcgccgcggcagagcggctgctggacccgggtgggccccggcggctcggggcgggggaggcgcgccccgcccagcgcggccgcgggtgtcagcgctgccgcgcccggcgggtccctgcggccgctgcgtccccgcccgtcggccttgctgcgcggagcgggcggccaggtgtcctgcgggcggcgtccccgcaccgggagccggagggggccggggccgggcgggcgctccggggctgccttcttccccgcgccctgcggggctgtccaacgccttccagctccggctcccgctgcctgcaccatgtccgccagag

SEQ ID NO: 6031 - DNA, 2300 bp, Homo sapien
attttattgtgtttataataagtacacaaagatagacatcatcaaatacacacaactctaactaagacctcctcatacaattagtggttgtaaggcattttggaactacaaaatgccatataaatgcatgataattagatcatgaaactaattatggttaataatatgactaaccatcttaaactgtgtatgaatataataacaataagcatacatacatgctctcagttgaagcagacacggccagaatttggtaaggggcacaaaacaacagaggatgcctccagcattctgggggtagtacgtagaaaattaaggtcgtatttatctgccaaggagcaccgcagggatataaaccacaaaaacaggagggaaaagaagcccagttaagatctcctccttaattcctgatttctggccctattattttgctaaataccactaccacaactcagaacaagtataagtgtctgtgcatctcttactagggactgggcactgttaaagtgttttacatatattaattaattcccacaacaacctcaagaggtaggtactgttctccccttttgacatataagcaaattaaaacacaaagaagttaaataactttccactgtgggtggcagagctgggacttaggctacccagccccagagcctggccagttaccaccactccatatgacagccaccttttctctgttccatgaatcaattacagatatatatacgtgtgtgtgtgtatacatgtatatatacgtatgtgtatatatacgtttgtgtatgtataaacgtatgtgtgtgtatacatgtatgtgtgtgtgtgtgtgtgtgtgtgtgtgtgtgtgtgtgtatttttttttttttttttgagatggagttttgctcttgttgtccaggctggagcgcaatggcgcaaccttggctcactgcaacttccgcctcccgagttcaaggattctcctgcctcagcctcccaagtagctgggattacaagcatgtaatcccattacaccaccacgttcggctaattttttttttttttttttttttgtatttttaatagagacggagtttcaccatgttggccaggctggtctcgaactcctggcctcaagtgatcctcccgcctttgcctcccagagtgctgagattacaggcgtgagccaccgcgcctgggccagatacgtattttcagcactggttgtgcaaaactcactccccacctcatcttaagaacttaatgaaccttttggtaaaacgccaataccagcataaaacaaatttcttcaggatacaaatattttcataatttgtattaactcaacctaaactttaccagcctgaactgcttcttcaaggcttgactaatacactgttagggagtattttaagcagcctccacccaagtgcttaccttgtagctctatttatctgccttaggcatttactggactcctttcagattctttccctcgctaatgttttccggtatcatctgataactgaatagaaaatgctgttctgaatcactacacctcactatcaaccatatcacaaataaattatgttatatattatatataaatattataatgggctatttaaactaagccagccgtcttaccatgtgctcatgtgggatttcctgtttcaatgttgaataataatatattttaaagttagcaaagccatttcacctgcagtcgttgatttcttcaaaatctgagcatttaaatccattgccaatgtttgcttaaagaacactgttttcttaacgagtcttccaaatcggtccttacaggaagaacctctgaatgctatacgcatatatggacggctgcgtgtccctacaaagtcagcctgttacttccactggagaaacaaaactcttgagaatcgctgagctgtaaaaatgttagaaagccggtgtcccaggcgccctgagaaagccgggagagggcggtggctgcccacaggccgcctccagccccgcgcgaggccgaggcctcagcgcgccccccgcccccgcggcgcctagcggccccgccgcagggcaggcctggccgggcctccccgggctgcggcggcgccccctgcaggccgcggcgggcagagcggggggaaggaacccgagccgggctgccaccgtgtcccaaccggtgccgccgccggagcttctccgggccccgagtcctcgccgaacgccctcctcgccgcccgccgcgtcccggcgccctccggagccgccgagccgcccgcgcacacctgaagcggccgggccaggccctgcctcga

SEQ ID NO: 6032 - DNA, 2300 bp, Homo sapien
agaggaataaagacacaagtgggccaggcgtgatggctcgtgcctgtaatcccagcactttgggaggccgaggcaggcggatcacctgaggttgggagttcatgaccagcctgaccaacatggagaaaccccgtccctactaaaaatacaaaattagctgggcatggtgccacatgcctgtaatcccacctactcaggagtctgaggcaggagaatcatttgaacccgggaggcggaggttgcagtgagctgagattgtgccactgcactccagcctgggcaacaagagtgaaactctgtctcaaaaaaaaaaaaaaaaaaaaaaaagacacaagtgagtagcataaaagaaggatgtgcagctagagacagagaactttctaggttctgaatagtgtgtcagtgtatttctgataaatcttctccccctgtgcccccaagctggtatgaatcagttttctgttgaccaaagagcccaaactcatacatgtattggagcaaaaaaaacctgtgaattcaaggcctgcccaatgtgggagatgttgattaccttagaaaaacaaagcttggtgcttctgatcccaagaatgccgatataatagcagagtagcattaattttgttgtgtcctagcatcccagaaatcaaacatgcaagaaatatacatttcttcattttctttaaatcagattaactctggtcctacactgggctgatggaaaattcaaatataagcatcatatgttacccctagttctgttctccctctgcatccctcacccccagagccacaagagaaatagggaggcttgctgatgtccggacaattgggaaaaggcctctaatctccaagtgccttggagtcatccaagtcatcattgatcaagccttgcaaccttccctgcaagtccctggctctctgcttccatggcacaagaatagagaactctttcctgaggctaatggacaccatgctcctttgggtgcagtcatcccttctgaagtcacaacatctttgtggaaaaattaacatcttgaagcagggccaggtgtccactaatcctgtgatatgccaatcttttcagttagcttaggcttttataatagaccacaagagtaagtgacttccttctaggagtttcagctttccaccctgaaaaaactccctcaaagatttttttttccttttaataaattgttctgccatgtgtctgttgcacgaatgggtgcaagttcaaatgggaccccataactggtgattgtgagcagctaaggggcatcactaaaatactagatattaaagtccaagagtatgatgaggacaaagagtggttgtaaagaaacctaaaaaacaatgagggcaaactttatctgtctcacaatagttatgatagcatttaatgtttctggtgcagaagtaatttttctccactctgccttgtgctggaatcaaaacaatattcctcaatcttgttagggagtgaataacttttagggagaaggtctcaaatgggaagtggtttaaagtttatgaattgcaagaataccttttgatatctaaacaaagtgtactaaggaattcaacccacagaagagctgatattcaaaatcagaattattaaaaattgtagtggggtcagtgggggtttggggagggtgaacaggagtgcatgaagagcatcaaaataagcacaagtgatttaccattggcttggtttcttcggggaatttgaagaattcatacttatttatacgttttcaaatatttatttaagtgcctacaacatgtgaggcatttgggaatgtctcagttaacgtggtacataagttccttgctctaatagagctcacatttggatgtcttctaattctgaacctgaatgtaagagcacaatacaatcaatgaagcagtgagcccaggaagccatggatcttcacaagcctcaggaaaagtcaacatttaaaattttctatttaaagtccaagggcacagcaagctcttggtctatatgggaaggccatggactacaattcccacaagtccgtgcgacctctccgttctgcgcagcttcgcggtatgaggaagagggtcctgtcaggcgcactcttgttgcatcatcagcgtgcacctccacgatgaaacaggtctgggctacaaaagtatggccgcttctgaggcggcggtggtgtcttcgccgtctttgaaaacagacacatcccctgtccttgaaactgcaggaacggtcgcagcaatggctgcgaccccgtcagcaagggctgcagccgcggtggttgcggccg

SEQ ID NO: 6033 - DNA, 2300 bp, Homo sapien
tgatatcagcaaaagagggccaccaaagcagcataaaggagaacacagttgcaggagcgtcagtagagagaccagcgtagcagaagtagaaagttgtttggccttgtttttaaaaatatgtggctaagttgttaactattgcaattttatcaacagtgacatttccttcagcaagtgccagcatggtgacagcattggctgtctagatctggaaatcttacatttgtatgactaaggtgccgctagtaataatgtcttaatgttgctgtagactaaaattttttcatagaaaaatcctcatctgtatcatgagatacatctgtttgagaaacagtatgaacagatcagccatctgaggtctgccttgttggagctgctaggtgctagagaaattcttttgagtgttatagctcttctgtctgtttgagtctagtagattctagtcttttgtttgtgtttagcttttaagggtcaaggtcatactgaggttaaaactgtcttgttgggttgatattaaaatctggacatagtattccatgctgacttttaattctggtattggaagaataattcaaagcatacttgtttttatttaatattgttcaaataaattcaaatttaatacacatataccagaataaaaagtttagataaattttctacaaaatggtaaaaccactgaaatttcttaccattggctgtgaactaaacagattatagaatatttctgtgatttagtttattactaaataggaaatatgtatgaagacatctttgagtatgaaaattctaaatttcagtatatcatagattttagtttttaaaattatagaactgtattttttgtctttttttttttttttaaatatggaacacggtcaggtacagtggctcacacctgtaatcccagcactttgggaggctgaggcaggaggatcacctgaggtcaggagtttgagaccagcctgaccaacatggtgaaacccagcctctactaaaaaatacaaaaagtaggcatgtgtggttgtgcacgcctgtaatcccagctgcttgggaggctgagacactagaatcgcttgaacccaggaggcagaggttgcagtgagccaagatcacaccactgcactccagcctgggcaacagattgagacctgtctcaaaaaaaaaaaaaatagataaataaaaataaaatatggaacacttcactaatttgcatgtcaccctcgctcaggggccatgctagaactctactttaatattgcatcattttgtttgaagcaataccaaacaaaagctgaaaacatgattaacagatagtaaaagctttatgtatatgtcttcattcatattttctaaaatcattgtttaaaaaatgcttgtttagtaagcatgctaaaatccttgcttatgtgtgttttttttttttttgcactggcttatttttgaggccggctgggagtgttcatgtaaaacaagagagaaattccaacaacagagaagggggaggctggggcggggggacagataaatgcaattttacttgacaacagagttgaatgtgagtgtgtaaaatttctgccataacataaaacagatttgaaatcttaccaggtaaaatttaaaatgtggataatacttgttaagtgccacattaagttatttacaatatttgatccctagagaaacttagaaaagaacttacggggattattttgctgcttgtattctgatcacttcattattaattactgcaggatcatttctatagctaatgtgggattttcctcagatcttcttaaggccatagtcagaaccaactgaatatatatataagatgattgcattatttttattggagaaaaattgaagcaaatgaaattgttttaataaagaatataagactttctccctcttttatcttgttaatgtatattttattctttttaacaaggtagaattttggctataaaacatatactgtaatatatgcttttggaaaaagttttaaatgaattttcagggctgttggtgctgtgaaaatagtacatgtacttctgtggttgttttagtgtcttttttgttgatttttggcagataaaataacacaagaagatattgaaggcattctacagaaatttactggaaatataatgcaagtgccccccctgtaagttcaattagtaaatttggaaaaatgtttacttttcttttccaatggttaacatcactctagttaaaatacacgagtttcctcttagcatatggcaaggcaggttttaaatctgatgtgccaaatgtta

SEQ ID NO: 6034 - DNA, 2300 bp, Homo sapien
gtcaaagggactacagcgcaccctttgaattaccttcacactcactgacggttttaagagtttggccactttccccacgtctgaaagcgactctaccttagatgtgagaaagatgcggctgactttggctggcagatggagaagaatggaaaagcagcagacagtgttcatgcatggctgacactagaaagaattcttctggatttcacagtcattgaaatgaaaagatgtgatccagaacaggatcttccttttaactggtgtctgcagtgttctctcctctgcttcttcactcatttcaagaagtctctaaggggcagcctgatgtggaaaagatgttaagggaagaagagggcatcctaattctaggtttgataaggacatttttgatactggtaaaaccctgaaattatggaaattatgatttgttctgtatgccaacgagaatcgtggttttccttttgctcttttccttgcgaaggagccaactccttctggatctttgtttttattttttcctccttaagtcactgctgaggtatttttaaaccaagccaacacgtatattttattcaccgaaggaagaacaaagcatctgctaatagaagcagtgaaaaaagcacagcagtcagaggcctcgtgtctaaagctcagttcattactcctaacctgccattggccaatatttcaacctttctgagttgctctttctcatctgcaaaatggggttaatggaggatttcatctgcaagtggggataagagacatgaaaagaactgacgcgaaataaacacgagttgaatcctaacaataatattttgactatgtagttacaacaaacttttctttcttctttttttttttttctgtgagaagtgcctttggtggattttgaattctttttcatactgcctgttctttggtgggactccagcaacattgctgtaactcgaggatatatggctgcaatgtgtgtttggcttcctttctcaagggggtcaaataaaaaggcaactgtttagagaaggcaccaaagtacaaaacaaaaatctcagaatatgccagccaatcttggaaagtcatctgaagaagaaaaagtgctgctgaggaaggaaaacggcccttttgtgggcatcacttctgctcttctgaaaaaaagccccgatgctgcaatatttttcaaggcagaatatcgtcccagatggaggagggagcactgacaagcagaaaaggagagacgtgcggtttcgaggcagcgtctgtaaggggtggagagcgcggggctcggagcctcgcagttctttgttgggggcgcgggcttcgttattcccgaggcagcaatggctccccctcggaggtccctccgcggagaccgcctcgcgcctctcgcagtccccaatccccgcccctcccagccctcgctgaccccacaacgtggtcggactgcggtgcctttaaggcttttgcctgctgcacatgctcagctctttgtgtgttgttggagtttttctctcttaagagaaaaagaagaaataggcaggaggatggggcggaggaagggggaagcgctagggaaaaagcgttgcacttttgcagctgcagacggcggacgggaaggacttcttttctgctgaagctgcgaagcctgtgtcgatctctcattcgtggggctcccggggcgcggggtgcgggtggggccggggtgcccgcaccggccggggggaagggcacgcgggccacacctggggggcctgtctccagtcagcgcgcgggccaggcggggtgggcgcgcgcgcgtgggggagtccccggtccctgtcaggggcggggcgagaccaaggcgccgggcctgtggggaggagtgtaggcgcgcgcgagggcggggggcggccccacgcatcgtgggctcccggcgctgccgctgcggccggctcgaggcaccggagacagaatggctgccggggcgcccttgaccgccgggcgggcgaggcggggctgaccgccgcctccttgatcgcccccttccacgttgggcgcgcccacttcggggcgcccgctcggcccccgccctcctgggcgcgcggcgctcggagccgaggcagttggcgcgggccgcgggcgaggcggggccgcgcgcggggtcccctcctcctcccggtcaggtcccctcaggagcgccgggcgcagtctgcgcctcccgctccccgcctccggccgggtccgggacgccgcggctgtggggtcggcccgctaaggacaaggtcgggagactgggtggcgatgcccgagtgcgactggag

SEQ ID NO: 6035 - DNA, 2300 bp, Homo sapien
ttaagtcactgctgaggtatttttaaaccaagccaacacgtatattttattcaccgaaggaagaacaaagcatctgctaatagaagcagtgaaaaaagcacagcagtcagaggcctcgtgtctaaagctcagttcattactcctaacctgccattggccaatatttcaacctttctgagttgctctttctcatctgcaaaatggggttaatggaggatttcatctgcaagtggggataagagacatgaaaagaactgacgcgaaataaacacgagttgaatcctaacaataatattttgactatgtagttacaacaaacttttctttcttctttttttttttttctgtgagaagtgcctttggtggattttgaattctttttcatactgcctgttctttggtgggactccagcaacattgctgtaactcgaggatatatggctgcaatgtgtgtttggcttcctttctcaagggggtcaaataaaaaggcaactgtttagagaaggcaccaaagtacaaaacaaaaatctcagaatatgccagccaatcttggaaagtcatctgaagaagaaaaagtgctgctgaggaaggaaaacggcccttttgtgggcatcacttctgctcttctgaaaaaaagccccgatgctgcaatatttttcaaggcagaatatcgtcccagatggaggagggagcactgacaagcagaaaaggagagacgtgcggtttcgaggcagcgtctgtaaggggtggagagcgcggggctcggagcctcgcagttctttgttgggggcgcgggcttcgttattcccgaggcagcaatggctccccctcggaggtccctccgcggagaccgcctcgcgcctctcgcagtccccaatccccgcccctcccagccctcgctgaccccacaacgtggtcggactgcggtgcctttaaggcttttgcctgctgcacatgctcagctctttgtgtgttgttggagtttttctctcttaagagaaaaagaagaaataggcaggaggatggggcggaggaagggggaagcgctagggaaaaagcgttgcacttttgcagctgcagacggcggacgggaaggacttcttttctgctgaagctgcgaagcctgtgtcgatctctcattcgtggggctcccggggcgcggggtgcgggtggggccggggtgcccgcaccggccggggggaagggcacgcgggccacacctggggggcctgtctccagtcagcgcgcgggccaggcggggtgggcgcgcgcgcgtgggggagtccccggtccctgtcaggggcggggcgagaccaaggcgccgggcctgtggggaggagtgtaggcgcgcgcgagggcggggggcggccccacgcatcgtgggctcccggcgctgccgctgcggccggctcgaggcaccggagacagaatggctgccggggcgcccttgaccgccgggcgggcgaggcggggctgaccgccgcctccttgatcgcccccttccacgttgggcgcgcccacttcggggcgcccgctcggcccccgccctcctgggcgcgcggcgctcggagccgaggcagttggcgcgggccgcgggcgaggcggggccgcgcgcggggtcccctcctcctcccggtcaggtcccctcaggagcgccgggcgcagtctgcgcctcccgctccccgcctccggccgggtccgggacgccgcggctgtggggtcggcccgctaaggacaaggtcgggagactgggtggcgatgcccgagtgcgactggaggcagccgagcggaggcgacggcggttgggatctgtccctcctgaccggggagcgggactcggacgggcgccggtgaggaggaggagaagcggcggcggagaggttttctgcggccggaattcccttcaacagcatccctgtcggcgcccgcgagcgcagtctcgccgggcaggggcgccggggaagatggagactgggggccgggcccgcactggtaccccgcagccagcggccccgggggtgtggagggctcggccggcgggcggcggcggcgggggcgcctcctcctggctgctggacgggaacagctggctgctgtgctatggcttcctctacctggcgctctacgcgcaggtgtcccagtccaagccgtgcgagaggaccggctcctgcttctcgggccgctgtgtcaactccacctgcctctgcgacccgggctgggtgggggaccagtgccagcactgccagggcaggttcaagtaagtgccttcgccggaccccgaacctccagccctgcctcgc

SEQ ID NO: 6036 - DNA, 2300 bp, Homo sapien
ttgtctcatttttttactgatggtttaatacaaaatacacagagcttctttcccctcataagtagtgttcgctctgatatgaacttcacaaatacagctcatcaaaagcagactctgagaagcctcgtgctgtagcagaaagttctgcatcatgtgactgtggacaggcaggaggaaacagaacagacaagcattgtcttttgtcattgctcgaagtgcaagcgtgcatacctgtggagggaactggtggctgcttgtaaatgttctgcagcatctcttgacacacttgtcatgacacaatccagtaccttggttttcaggttatctgacaaaggcagctttgattgggacatggaggcatgggcaggttctcctttctttggaaacacatccatgctgggatgcacagttcttttcctaaggattgtgtttactcctgactgcaacgtcttggccactgtttggagcagtttggtctgaaggtcattaaggatctgcttgcatcttgtttcatgtcctccgtgacagactgcagaccatgttagaagagaaggaaggtttgtggatcaagagggttgacattaggtttggtgagatgagttgcttggcacagatcagcagaacaggaccctggtgataaggcatctggctttgctaaccacttatcatcttccattattctctttcttaactaagtagacccgaaagtgcacttttgaagtctggtttagatggcgagattccgaatctacaatgatcgagtactggtggccacttttctccaacattaagtaaagaggaggagattccaccttcagaaagtgctgggaagcattggctttcttcccacattggtagaagagatggaggaggaaaccagggtgcacatttctacagatcccctttgcctgctggtgtttgccttgtaagataagtcactggggggaaggggaaatctatgaaatccaagataaaggcatagtctttcagctctattggtgttaaaagtatatttgtgtccaaatgttaatcaacacaaatgtacagtactcagtactgacttttttcacttcaaaatgttttcaagggaaattcagcagacacccaactgtatttaattagtgaaaagatctataaagactcttactttgaataaacacattaagtaagtgtgtcaaaatatttggaatgccagttatctatgagcgcatatctcttacagagtgtattttgttttcattaaggtatctctgtgtatctacactggactaatttcatagggatctgattctatgtgatccactgtagaaagctactgattacttctgcagtaacagcagctctaattagcatcagatgaccaaagcggaaatgggagtttcagcgctaacaagggcagccttcattgaagaatgcatgggtaggcaatatataaattacattttgaaaagcctcatctgtcaccaacaaatatctcatttttcttcagtgataaaagcatattcaagttaccagctcctcaatttgaaaatcagttgctgattaaataaatagggggaagcatcttgttcagggacaacacgttagagagattcttatcaaagcaagccaagcaaggtttccgccattcagtgtgatcttagtttgacacggtgaccctaaaacaccatcatttgccccagaactggagcacaataagttaaatcatttacctgtctcacttcttcttggcgtgcttaaaagcaaaaatgattcgctacttcctgtccttcagtccgggcatttggggtgccactgaagacaggggttatctgctgaggtttgggtgtcttgcaggaagtatctcattgcagttgattttgatgaaaccaaacagtaactagggtccatgcagaccgtgactccctgattacatctagccatgccctacttatttcagagagaaagagagggggaataaaggcagtattgccacactgattagaagcacattcattccactttgatgttgaatatttttgaccgatacatgcttgagtatctttttaatagagcacatgaaggaagaagcacacaatatagagaaggaattgagaatgccaattacatatttatttttccatacctgatttttttcaagtctgtaataaaaaaagtataagttgagattaacataggttatttttcatgaagtatagcaaacgatctagaatgtgataggagtgtggtttccatttctttttttttttttttaacagacttttgtgctgtagtaagaatgtcttagaagttgtgtcttc

SEQ ID NO: 6037 - DNA, 2300 bp, Homo sapien
ccattgtctggcgtgataggtttgcagatttgacagctgggcgcacgcagatttgattcaaactcggtctccccgagagatgaacttggacatcagcaaagatcccgagcactgccggctggctcctagaccggtctcccgacccagtgtagacttcggtgccccgggcgccccccggcgtgcgggaaggggagcgtgtgtcaggcgtggggggcggggggtgagcagcacgactgggaaccagcggtcccaggggttggggcgaagggctgtgtacatgttaggctttttttgttgttgttaatttactctcgaaacagccaaaatggaggtcagcttataaattttctaaagccaggtctggccgggtttaaatgcagtgggctgggggctccgcttttgtctccttgtcggagctccaggagagaggtagagactgcgtgtgcatgtgtgcgtgtgagtgtgagtgtgcacgcgctggcgtggacgaacggatgggcgcatcccaggatcgccgctccagcgtcctgggtctgagtgtgtcttgaaagcaccaagtcttgaatcacagccactagtgacgtgggggaaaactttgtgttccgaagaagggtctggctcgattgccctaagaagaaagagcccttgtgcccgtgtatgtgtgtgtgtgtgtctgtgtgtgtgtgtgagagagagagagagagagagagacagagagagagagagagagagagagtgtgtgtgtctggcagcacccgcggccggctgcagaacactgcgtgtcctgtgcgcgagtacgggtccggccgcgggtcccaccgcaagcgggcgtgtgcagctgcggctgcctggcgggcgagcttaggagggagctggagctgcggagcggcgggaacaggagcaggccgagggtcctctggccagaagaaatctggcctcggaacacgccattctccgcgccgcttccaataaccactaacatccctaacgagcatccgagccgagggctctgctcggaaatcgtcctggcccaactcggcccttcgagctctcgaagattaccgcatctatttttttttcttttttttcttttcctagcgcagataaagtgagcccggaaagggaaggagggggcggggacaccattgccctgaaagaataaataagtaaataaacaaactggctcctcgccgcagctggacgcggtcggttgagtccaggttggtggcatttggagtttttttcgttctgtttgggaacccattgccgcttcccgtccctcttccccactccttcttcccccctcctccggccacccctttctttttgctggcgtctcccaactttagggcccggggggcgctcgtggcgccgggctgcacctgccggggcacgccgggactgcgggccggcgcgctcgccctgggctggggtgcggaagcgcccgagtcctgggcaccgggcgagagtgtgagaggagcggacgcccaggagggagccgaggacgcgcggcgggtagggggtaggggcgcaggaaccgggtttcagccccagtcgggacatcggttccccctggcttggcggcctctggagggagacgagtcccggggagaaggagggcggcgactggggctagggattggcgatcggagtggggagggccggcggctgagcgagctcgctggctgacgcgaggagggggaggccaacttcccgggagaaggggctctttcggcgccagggctggctagggagctgccgccgccgccaccgagggctcggactccaggcagctgcaggctccgctcgcgacgctcggaaagtaccgtttatttatttatttgcttgcgttcagcgtctcgggttgaacccaacagacacccccttggactttaggaaccctcttcagacctctccagccctcacctccatccccgtgtcagcggcccctggaaaacacgcacatgcaccccgacctgggtgggggtgggtcctcaccccggtgttggaaattccccaaaggcgggaacgggggaggggagagggttctgtggggggagtctccggcgctctccgctctcatctcaaagcgcgccctcccttccaggttgggtcggacctgaacccctaaaagcggaaccgcctcccgccctcgccatcccggagctgagtcgccggcggcggtggctgctgccagacccggagtttcctctttcactggatggagctgaactttgggcggccagagcagcacagctgtccggggatcgctgcacgctgagctccctcggcaagaccca

SEQ ID NO: 6038 - DNA, 2300 bp, Homo sapien
agtaaagtgttgactatctcatgaaacttattcaatactaacctgacagtgaaaaatagaatgattgtatggtccatagtcaaaatacagtttctactgaatgtatatggcttttgcaccatggtaaagtctaaaaatataagtagaagcatcataagttggagatcatctgtattttaaaaagaagtcccatattctacactgggagagcttttagttcacccttcccccaccctgttaaaatttgattcaaaagaattccgtggaatatatagggtaacatgaagtcatttctaaacaaagaacatttacaaaagatgtggatgatgtcttaaacctcattgtaatccaactatcccaagtaatcagcaccggtaagcactagtccctctattgaaaattgaaattccaattactgattttccaaaagaagacattctcctccacttacgaaatggaacaatgaaagaggattttctgtttggggtgaccggggagaaacggagtcttcacacaaagtcttagttcatattcagccctcctttccttgaaaccacatccccaggatttatctggcttgtttgtgaaaatatgggaaaacattttaagtcgaagaaactgatcagatgacttaattacatttctgcttagttcagcctgtaacttagactgttagagagagagaacttaagtagcccttggtttgaaccatctgtcgcgaaaatgtgacatatgtttgctttgtttactcaacaaccaagtgtaaactgatacactgaactagagtatccctgaatgatgtggctatgggtgtgtgtgtgttggaggaggggtgtctgatgagggcgtccgtctcctcatacttaccctggaggaacacgcgtacagcacaagagaagtgcggatccgtaggatgtcccccgggtttggggcgcgccccgaggcgcagaccctctttggcgactccacacaatatgcagcccgcctgcaagcagccgctgcagccgaggggcgcgcctggctgatgtgtggttgaatggagagcggcccaaccctcctccttcctcctcttcttctccccgccctgacacccgggcctcaaacttcaaccaaagcccgtgcccttttcaatttacccccctcgatcaaaatgagccattcttgtctgtcctccgcggcggcccattgtctggcgtgataggtttgcagatttgacagctgggcgcacgcagatttgattcaaactcggtctccccgagagatgaacttggacatcagcaaagatcccgagcactgccggctggctcctagaccggtctcccgacccagtgtagacttcggtgccccgggcgccccccggcgtgcgggaaggggagcgtgtgtcaggcgtggggggcggggggtgagcagcacgactgggaaccagcggtcccaggggttggggcgaagggctgtgtacatgttaggctttttttgttgttgttaatttactctcgaaacagccaaaatggaggtcagcttataaattttctaaagccaggtctggccgggtttaaatgcagtgggctgggggctccgcttttgtctccttgtcggagctccaggagagaggtagagactgcgtgtgcatgtgtgcgtgtgagtgtgagtgtgcacgcgctggcgtggacgaacggatgggcgcatcccaggatcgccgctccagcgtcctgggtctgagtgtgtcttgaaagcaccaagtcttgaatcacagccactagtgacgtgggggaaaactttgtgttccgaagaagggtctggctcgattgccctaagaagaaagagcccttgtgcccgtgtatgtgtgtgtgtgtgtctgtgtgtgtgtgtgagagagagagagagagagagagacagagagagagagagagagagagagtgtgtgtgtctggcagcacccgcggccggctgcagaacactgcgtgtcctgtgcgcgagtacgggtccggccgcgggtcccaccgcaagcgggcgtgtgcagctgcggctgcctggcgggcgagcttaggagggagctggagctgcggagcggcgggaacaggagcaggccgagggtcctctggccagaagaaatctggcctcggaacacgccattctccgcgccgcttccaataaccactaacatccctaacgagcatccgagccgagggctctgctcggaaatcgtcctggcccaactcggcccttcgagctctcgaagattaccgcatctatttttttttcttttttttcttttcctagcgcagataaagtgagcccgg

SEQ ID NO: 6039 - DNA, 2300 bp, Homo sapien
accatttttatttggcataaatttaagtactgctgctcttgccctgaacattataagatgtaatgagcacggatatctataagaaaaactatcttttaacactacagaaaatgtataaataaacctagatatacaatagcagtatttttaattatcttaatatgtcacttttattattatgggacacttaaactttgagttgtgagctcatatgaatcatattcgcttcaaaaaacaaaataaaatttaaaattcctgctaacgtgtatagttatgatacctcttagaagattgtaactttggatttaaaagcaccaaaatattctggtatgtgaagaagaagactgcagaagatgaagaagccatttctccccataccccctttcttgaatttccagcagctctttcttccatactcctgtgtaagtgaggcaactgcactccccaaagactgcccaaattttactctgccaggtttcagcacagaaagagcatgttaaataatacatgtgaatttgagtgtaactaataaaattggaacgttaaatagcagcatgtttttgaaaaccagcctccttgtgatgacgttccttgtgcaagtccatgggaaataattctgaagggagtgttattaattagtaatgtaatttatcttctggaagccctttcctttgatggccgctgtggtacagtttataagcctccaaacaagtgctcaaagaaaactgttcaaaccacaatttcagctttgttttcacccttgaacagataagagtaaaacttattttggtatatctaaattttacacatgcctctttatggtggaggattatgaagttataaatatatatttatgaagagtttttaatgaaatggtaaaatgtctgggatgtaataagaggataaaatagtagactccaaaattaaattcatggcttctgattccagatttcttggtttcagttctcaccaccctatatgaggtacgcaactatggcaatatacttaattgttccgtgcctcagtttcctcaactacgctatgaaggtgatagcaaaaattatctcaaaaggatatagggtgttcaaaatagtgcctggcaaataataacaaattattattattactgattcacaataatttcaaatttataaaggaaaaatgaagagtgaggagggttaccttgaagggaattggtaaaatgttaatatgtacttctaaatgacatgattatgggcagttcttttctgctttgtatacttttcagtatttattcttttaaaataaactcaaagaattaagttttatgcatcaatggcttgatggaaattaaggcggaaatttggaataggttaaaatgtataactgattagactgcagcattaatgaaatattaattaagcctattgtgatgtgacagaattaacatttaccttattttacttaattttaagtacattctgacaaattactttttaaagttcaaccaatgtcaattttacattcataaagtcaaatgtttattttacttaattttaaatacattctaacaacaaattactttttaaagttcaaccaatgccaattttacattcagaaataaagtcaaatgtttattataatgtcaatatttcaacctactaaaactaaaaatattttaatttttgatttaaaaaatcccacgcagaagtcccaaaggtgcctttcatgtttaagctttaattagcaaccactttggtctctgacacatattgcgcagatattgaagtgttaatattactgcagcttgattacaaaaggcaatgattaattttaaagcagacaaaaaagatatgccctgattacaaaggaatgattaaggcggaatgtcagacattgcacatttatagcagtctttgccatcgtcaaagtataagactttgtaaaagtttatatttagaatcacagttactttgtactttataatattcagtgtttgcgccttggataccgggcaaccctactccaactgggcctaagacctttggggttcacatgcccagggcaaacctgccccccacaggatggtcccaatgagccgccgtagtttaagttctcacaggcaaggcccgacctgaagcactggctccagccttagggaaggttttggccgtgggttttgttggcacgtaccattttgctgaaagacagagcaccttgaggacgttatccctaaaatgagagaggactgggattgaaaggctgactacagaaatggctgctgcccagacgccctcaaaagccaaggtcttggcagcctt

SEQ ID NO: 6040 - DNA, 2300 bp, Homo sapien
tgacaggagggaatgaatgaaggagacaccattgaaggaggatcaacagggcctggctcgactcatggaatgagggaggcagggactttaagggtgtcaaagatgatgtgaatgtttccagcttgtgactcaaataatagcagttctaataacaggaacagggaaggcatgaagaagagctctttggagagaaaagcatttcttaagatttggatatgatgactttatgcttcagataaagtatctgaaaggcccagaatgtattggcaatgctgggctgggagttttggaaagagaatggattttgtgatgaacttttaaaagctattgttaactcctgtatgggacatttttcaggcagaactacaacgattgcagcaagcatttatggattcactagtatctgacactcattaaatacaattgttaaagtatgggtcttcatctctcagaatgataatctctctagggtaagaatttccttggatgctatgagatcaatgaaatctaatgctatctttttctttcaacaaatattgaccaagtgcctgtgatgatagacctattgctatgtgctgggggcccagagatgaacaaaacccagcttgtctcagaatagttcgatctggaggaggagagtaaaatgtaaatacctaacaattctataatatcctaagtgttataagagagtcattataaattgctgtaaaaacacagaaaaggatgtggtttttaaaaatatcctatattatcattgtaggtctttgtactttttaatttaaaaatgcttattaagtacctactaagtcccagacattgtgcttgtcacttgggatgcagatataaataacatgtagtcttctgagagctcctactgatgaatgtattaaatgttattcatacttatcttacaggtatggctgaaaacattgattcttgaggtgttgcttggaaaaaaaaacagccagttgtaactagtgaagctttcagagggtgatttttctatagtgtgggcactcacagcgtgtccagcacactgcttggtgctgttgaatagttaattctctaattactgcaggtctgcatgccagtgtggactggctgccatgaataccaggaaaggtttcaaccaaataaaacatccaggacttggaagtactcttgttcataatctcttctttgtctaattcttgcataatgtaacaaagtttttatgaaaaggctgtgcctcataaatgttggaaattttaatattataatagtcagaaacaaaaagttaggaaaaactaagaaataatgttagctattttctatgagcgtttaaaaattgagaaactgactaagaatatctgtagattgaattgctcatcactttaagttaacatagtagccaaaatggcaagtttctattacgttaaagtatatcatgaagcctatgtacaatcatgtaaggttatatttagctatatgtgaacatcaatttgcccatacacccattaacatagttgaacaatgacagcaccaaaaaattaacaggtaatatagtacttactatgtccaggtgctattcagacaataaataattcaatcatcttatttagcatatgagctaggaaccacgatcatccccattttacaggtaaggaaaggaatagtgaggcttactagcccaaggtcacactgctaataagtggcagaggcagaatttggacccagcattcgggctctgaaaacaataatgataactcccatattatactgccacacagataagaggaaaagattagctatgtttgttattgaactcggaacatcttatagcagggtctgtttgtattaattgggatgcttacacacagaaatgagttagggaaaaatattctgaaagtgcctaatcctggtttggaaaaaaaaaattaccttttaaatgcttattatctaacaccttgtaaccttaaagtaactttcaagagtgactcagtttgtgcttaaccaaaatattactaataatgaaacagcaaaaccttggaagtttccattgccaatcataagatgtaaggcacaccccgataattttatttactttgcagagcataaggtggaataacatgttcttttaaacgtagagtttaaacattgagttgcatcattgtgaggaaaaccacttagtattttatagtgaggtgactttacaagtaaagatcttcaagaagatttttatgtgatttaaaaaatcagcttagatgcttggaatttggattgttgcattcttgttctttggcacatcaagaggtaagatt

SEQ ID NO: 6041 - DNA, 2300 bp, Homo sapien
aatgttatgaaaattttggaatgtgcagatgtatttagatcttattattattccaataatcctaactattgatggcaataatgtcatgcttgataatgacaaaactaattcatctttagcattctttataaaaccccccacttgttacacctttaacccagcactggttcacaatgctgactgttttgtgattgaataggagggagttcagttattcttgcagaaacagagaggcagagtcttaactggtctacaatggagatactatatgcacagggatattgtgtcagaggtcctagtgatacaggatttttttccatgctgcttcaccagccagagacctccacagcctgcagtgcctctgcttgagtttcacttgcacctgctgggctcaccactggacttatctcacccacttggcctggcagcctgtgctcagctcactctgctgacctggatctcacacctgccaagggtgagccaggcatgcccactgctgtggtagggcaggtggcttcaggccagtacaggcactggttccacacgaggctgtggctggaccaggcatactgcaagcagcttccaccttgggcaccagcttctgaacgagggaaatgtggtggtgccaaaaaaacttggagatggcaggaaccacgcagccccaaagggggtgttacatacagcatgttacagctgtggcttagggagccttgaggtctaagcccccaggaaacattacggcttgtttgtgttacagctcatttgttcccaccctctgcacagttcagcgaataggggtgtgtctcacattgtttgatcccattgctgtactccagaccacagctcttgggctgtcccagccccactgcagcttcctgatgcgtggggtgggatggctacagtgtttcagcagctcctttggcacctgctgtttggtgggtctcaggttcttgtcccacgtccaggaagaaagaggttacacagacaactgaagagtgagcatggtggagaagagttttatcgagtgaccaaacagctcttggatgagaggggaacccaaagtgggtagcccctatctgaaggcaggtagttcccacccaaaggcaggtagtccccagagtgtggcttagtctgggctttttataggctcagaatgagggaggtgttggctgtaggtagccttggaaaaagcaacattagattggttaaaaaaccttgttcaggctgggtgcggtggctcacacctgcaatcccagcactttgggaggcctaggtgggtggatcacgaggtcagatcaagaccatcctggctaacatggtgaaaccccgtctctactaaaaacacaaaaaattagccggcgtggtggtgggcgcctgtagtcccagctactcgggaggctgaggcaggagaatggcgtgaaccccggaggtggagcttgcagtgagccgagattgcaccactgcactccagcctgggtgacagagccagactccatctaaaaaaaaaacaaaacaaacaaacaaacaaacaaaaaaccttgttcagaaagaaccaaaaacgttgttcaggaaagaccaggcaaacaggaatcgaagttctcactctggtcagggactttacctggaactggcagcttcgttttcaggcttcacactgtttttggcttaaaggttgggtttcactgaggacacacccctatctgcctaggaaattgtctgcctcctgccactgtcactaggaagtgactcagtatatttgtgtcaaagcacaaagtcattcacatttgcttttgcttatttccacttcttgaatgtcccttttgagtcacataattctttggtacaaataaaattatatgtaactttgataaatgtacaatatccaagcctagacaaaaggtctggccctcccaactcaagaagactgccacttacagttactgtttctaagatatggtttatgctaccagttatcagttaattgctatcagttaattgggaattgttttcacagaaatggcttccttctttgactgtaaccatgcccgaagttatcaattttatgctgaaagcattcttaatcctgatgcatttattgcttatccttgtagatcctacacatcttttaaagcagtaagtaaatcatcttacttggaatttaattataaagtaattttttgaaacacaatcatccagctaaacattagggctttgtgtaggtagcaaaaaaaatgcacctgccattttgggaaataatggattgtttctgtgctgagtactgaacagtagctgggattgct

SEQ ID NO: 6042 - DNA, 2300 bp, Homo sapien
cttgtggttacaaactattagaatgaatcaatttccttgacgtactttattgtactgtaccctaatagtcatacaatcaaagtgtgtcagagccagctgtggcatgcacctgtagtcccagctacttgggaggttgatgcaggagatctcttaagcccagaaatttgaggctacagtgtgctatgatcatgcctctgaataacaactgcattccagactgggtgacaaattgagactccatctcaaaaaataaataaataaataaataggatgttacagtagccctagcctaaatgtctatggtttattaaattaaaagttcaaagcctaaaatagcaaatactcaagcactgctacccatgtttttaaaatgttcacatttcattccttttcctttagatttttaaaacatacaaataaaattaaagaagcaaacgaccttatattcccttcaatccttcccctaaggcagagttgaatttgatatgtatcaaataaatgctttcatattatgtttctggatttgctgttttcattaaatattataaatataaaatttgaaatttacattgatgtagatagatctaatgtatttattttataggaatcaggcataatttattgattagttctcctactaatgtgagtttttattgtttccagtttttgttattaaaagtaatgtcggccgggcgcggtggctcacgcttgtaatcccagcactttgggaggccgaggaaggcggatcactaggtcaggagatcgagaccatcctggttaacatggtgaaaccctgtctctactaaaaatacaaaaaattagccgggcgtggtggcgggtgcctgtagtcctagctactcgggaggctgaggcaggagaatggcatcaacccgggaggcggagcttgcagtgagccaagatcgggccactgcactccagcctgggcaacagagccagactctgtctcgcaaaaaaaaaaaaaaaaaaaaaaaaaagcaacgtctaccaactctgccatctttgtatgtctctttatgtacttgagtggaattccttcatggcatacaacagaagtgaaattatcaaagcatacatgcatttccttctttattagacattaccaaatcactgtttaaaatgtctatcgattgctaaagaaaaataaaaatgaaggccacaatttagatataacccaaggccacccatgaccacatagccaaaaccaagtcatcctgattttccagaaacactagctctaatcataaatgaaacacaaaaacataagctttacctccttgtccgcgtgattcagggaaatgaaaccaatcagctgtagacaaatcaacataaatatctctacttgccctagagaagaatgttaatgcataatagccaatcaccaaaaaaggtcaaaatacttccgcctttataaactgtcttgtgactgctgtaagcgggggcttcttaccattttcagtttgaagtctcccagctcaaggactgttcttttgtgtgcagagcaaatttttaaaaattaaaaaatttgatctgattatatttttgacattttaaaaattatattccaggctgggaatgcagtgaagaacaatacaactttccatcagaagcaaatgagaattcccctattacacgtattcagtgttgccaattgctttaatgtttgcaaatctgctgaatatgaaattttaccttgttttaattaacatatgcttgacaactagtaagactgaacatcttgcatagttattgactatttgagtttcctcttccgtggattgtctattcatatcatctacccatttttctaatagggagtttctctttttccctcagttggttttgttttatttttgaaaacagacatggtggcctgttaggcacttttaaaatgcatatcctttatttagatcctggagatttattattatttaataatatatagcgagtttattgaaggacaacatttctaattacataagtaatcacctttcattttctgtcatcagggaaattgcttcttttgttccaaagaaggttgcccaacaatgggtcattttgctgatagatttcacttcaaaaatatgaagactaatggatcacattattttttaaacacagggtccctttccccatttgcccgtaagtatcatagctaagtttaattgtaatgctttaaggtacttatctttaaaaattcaacagtttttattgagtgtctactaaataactgggcattaggccagactgggatttcagtgaagaacaacacagtgaggtct

SEQ ID NO: 6043 - DNA, 2300 bp, Homo sapien
aaaatacaaaaaattagccaagcgtggtggtgggcacctgtagtcccaactactcaggaggctgaggcaggagaatggcatgaacccgggaggcggagcttgcagtgagctgagatcgcgccactgcactccagcctgggggacagatggagaatccatctcaaaaaaaaaaaaaaaaaaagatgctagcaactttgccacacatactatgaaaatagacgcttctagatagtacattgttgtctgaatgaaacaatgtagtttataacatttcacaacccagcttaagagttcaacaggattatgtatagaggaagttattcatccagagcagatgtaatagacggctgattatgtaccattccgttcttagcttttataaatttgagaagttgaatcttcttgagatattataaaatttgaacttattttagtttacaaaatatccccacagatttcactatttcagaatttggtgactattgatcctaattctttatactatattaaacaaatgtccccctaattatggattacattttgtgccatctaaaatgacaacttagaaactttgtgtgaattacttggtaactcacacaaaatgtaaataacttcatggtaaaaccagaggaaacaatgactgtcataggatatgactctgagatcaatgtagcattaccatcactaaatactagagagatgcaagacttctgtttttagaggcttctggatttttttttccacatgttttgaataaaagaaatttcaacagctttttacttatgagactgtggagacaattattattgcagccattatgcaaaataaattgctttgcttttcatattcattccatttgttcaatcatccatcagagatgttttgaaggcctgctgtgtatcaagcactgggctaggtgctaggatgtgacaacaaggccctgagcattccagccttctctgagtttataatatacaaatgatcagtcttaagtgagagaagttctaaaaagaaccttccttagagggaacaagggaaccagcttaaccatggctggggaagattgcctgaggaggggatgaaaggctgatatttgaaagattaggtaggaatttgccatggtgtccatccatggatccttccttgtgccttctgtctttatcttaacaattcccttgccaaacttccttgaacttcccttgtacacgataattctgttgcttttctctatacctataaacttttccaggggattgaattatttttgaccacttttgacctacgaatgtgacaatttcaacaactcagtgtatagctgtgacactttcaggctaaaaggttctggtctcttaaaattatggtatcacattgtactctttttaacatttattgtaagcaatccatcattaactgaaaacatcccagttattttccatcaaacaattctctttcagattattttttctaaaccattttcttccaagttgagtcatattttttctgcttattcatcatttcatctgatagtggggtcagtgattctgcctctatgctttcggctgtacctccaattccttttcttagcttgtttattctttcctccatgacattgttgagaaataaatcagttctatggactatcaaaattaatcaaatgcttttccagaaggtatgagctctcttgaaggattgcttctatttcactgtttttgagggtaaggcaaggttatacaaaaatggcaagagctggtaggctgctggtatttgtttttaagactgctgttatcaaatctgtgaaaacaatttaatttcacacatgcccacagacaggcacagagaattgtgaacttaaaaagagacagaaagactagaacctttactatatagaacctttactataatgaaattaaagtggttttgagctttacataatcacatatctaccccctttctcatcatcccacaactactatggaaaactttactctgtcaaccttagtttatctatgattaaaattagaaacacatccttgggcctttctttgcatgccatttttccacggtttcaaaaagataagcttcgcctataaaaggagtttttgttgctatctggttgcgtgtggaacctgacggaactgccacggtgagtcgggaacatgttttccaggcctaattgatcagaatgtatccattttcccccagaggtctaaatgaactaaaacttgccgatcttttaaaaacttagccagactcaatcatgtttttaatttcgtgtagatgctgccactttggactctttc

SEQ ID NO: 6044 - DNA, 2300 bp, Homo sapien
ggtttcaccatgttagccaggatggtcttgatctcctgacctcgtgatcctccagccttggcctcccaaagtgctgggattacaggtgtgagccaccatgcacagccaacttatgcaatctttctaaaataaattctagctgtaagtagatgaatgtcttgggagcaaattaggcaaaagagaaaaaatagaagatagatacacacacacacacacacacacatattctctcattgtatgatttgttttttttttgagatggagtcttgctctcttgcccaaggcttaagtgcaatagtgcagcctcggctcactgcaacctctgcctcctggattcaagcgattctcctgcctcagcctccagagtagctaggattacaggcgcctgccaccatgctcaactaatttttgcatttttagtagagacggggtttcaccatgttggtcaggctggtctcgaactcctgacctctggtgatccacctgcctcagcctcccaaagtgctgggattacaagcgtgagccaccacgcccggctcgttgtagatttttatagtattgtgttgtttgacagtgaagttggtgacttactgttgtgaataatgaaatgcattgttaatctttgctgctgagacactattaaagtccccatttatcatcagaacagaactggctttagaatatttgaatggcgacaacatgtaggaaatatggtacacaactaaaagatagggcatcctcattcatcatttgtttgttttcactagaacaagtgtttcccttgtccaagtggaggctgcccacagatgggtcactatgctgatagatatcctgggaaaacaaatgatgtgggccagaaattttatctagacactggtgatgccagtaattttgcacgtaagtttctgttttctgtatcttatattcttattgctatatattttattattatgtccactgaaaatgtgcatacttgcttttctatacaaaagctttaaacaccccctctgcaaggtggaaaaatgctcaatgctatgttcaaggtaattatagctaattagggtggcagaacggagtttgggtcctggactcttaatgctgcaaaaataagtttcttcatatttgattctggtgctgaattcagaaggctttctctgctccagcctctttatattcagtcaaaagtttcactgaacaaaattctgagatttttgtaaaagcagaaaagtaatctaggagagagagatggcagaggttgtgagaatggaaagacattgacagatttaagagacgtttaggattgtaggctccatgggtgatgggaattagaggctggaggagtggtaggaatgggaacaggttctgggtttcttttccaaataacagaggaataaaattatttggatgagagttaatggggttaccgacatttttaaatactaatgacaaattttatctcctccccaatttgctctgcctatctctaaatggcaaactattggctagcaccaagaaaacgttcttttggttttcataaattaatatattcccaaaggcaatgaaaagttgaattatagaattttgaaaataaatgtagatatttagacaaaaagatagcagtaccctaaaatttggtgatctatgaaaataaattaaactgaaaaaatgtcacagttcacaattttacaactaccttttaacataaagttcttataactttcaaggataaattgtcaggttggaaattgaaaactaaatgtattccttagtcccttggcttgaaaaaaaatctgtcttaactttgaaaaaattctgcaaagcccctattacctaatgcctgtcccctaaacacatataaaggaatatctatcactatttcattagaaaattacacacacacacacacacacacacacacacacaattataaataaattattcaaaacgtggcagtagtgggatgcaaattaacttgtttttagtgtcttttatctccaaactgacattttgcaatttttctcccttgcaggttggaggtataaggtatctgtcacactgtctggaaaaaaggttacaggacacatactagtttctttgttcggaaataaaggaaactctaagcagtatgaaattttcaagtgagtaaaataatattgctctatgcttttttttttttttttttttgagtcggagtctcgctgtgtcgccggggctggagtcttgctctgtcacccaggctggagtgtagtggtgcaatcttggctcactacaacctctgcctctagggttcaagcaattct

SEQ ID NO: 6045 - DNA, 2300 bp, Homo sapien
aaaaaagaaattccagttgttattgttgtttgaaagactcacccagaaatctttccatctggtgtggaatgaataaattgtctgacagcctgtgaaggagaagcagcttgaacctcagccttgctagaggcttagtctaattaaatcccctagagcatttaaacaggagccagtgcattggagcacagtgtatattgactgatgcacggagtttcctcattgtcttaggaaagggtatgctcgaacctggtgctgtgtgctaaagaatagtaacagtgagtgcaacaggtgctgctgtctctgaattccaggcctggcttgggttcctgtattggttagctactgctgcataacaaacaatcaccaattcagtggcttaaagcactgaattaaagcatttatccatgctcaaaaatctgagtttgctgggtggttcttctggtcttggctggatttactcatgcctctgtggttacagtgggttgagtaggcagtgccactaatcttggctgggtcctttacatacttgggggacagctggctttgagttgttcaaagatgttgctgttaccacacttaatgaccaaatcaagtcataccatgtctagctcagattcaagaggtggagaaataaactccacttcttgatggaaggagctgcaagatcacattgcaaagggtgtgtgtacaggaggaagggatgaagaactctgaccaccttcccagtccatcaccaagtctagcctgtttctccatcctggggatgcctggaagtagggaggaaacaggtcaagggccaagagggttttcacattttctcttttgactcattctgtgtatccctcttgttctacatggttgacatccagtgaagcttgctgattactagctcaacacaactgaatattcaacaactctgtacagcctgaattcaaatcttacctcatcactcgttagtcgtgtgactttttaggcaatttacttatctctctgtgcctcagttcccacatttataaagagaggcttatgggattgttttaaaacttattaggtaatacacgtaaggtgcttggaattctgactgtacttggtaaggcttcgtaacagttggcagctattctttatgattccaggagtcctttccattttcttaagaggaaggcccttaggcctgcacccttgtgttttggttatttaagattgagaactttgacaccgaggcatatttaacttggcaaggggaggcactcatggtgtttgctttgtgaaggcttatctgccttgctgtgtgaactggctgggctgttcacagatgcagaggtctctggttatatcatgatggctttacagggtccaagaattatctgcaggtgtgcaaccttcagaggacctggggaaactcaacagacatgacatgggcctctgggggctcctgaacccaactattgagattacagtggcataatgcaatcattgctattgttttaaagtgttgtcttttggattggttcattgcatagcaatatataactggaataggcagttaatgggaggattgtggtcagaagctactgtgagggctgttgaatttttctccaaagctcagatgcccagtattcctagtcttcgaaagagagagaggaagattgagagagagagagagagagagagagagagaagaagttttcttaatcagagatttctctttactttcaactaattgcaggtattttcatctattctaaatgagaaatactatcctctatcattagggtttgctgctgtgtccctattgagacttgtaaactatttggtgatgaaatagaaaactgaaaagtgagggcccattcagctcacaagtacatgcatagttacataggtacaaggttggtgacttcactccctgctttaaccaagcattctgtcatatttccagacttgtgggaagacttgacagctattattaatcttgttttgtgtatttgggcagattaaagtattaagtgcgcacagcatgggctataatcacctgctgttttcttgaagtagtgtccaaatgataaggctggaatatatatttttagaaagggctggacactcgatccggtgggagggaacatctggaacattagacagggtaagccacctttgcaactcctttccccctgctgtgacgtacaggtgaggtaaacagtactgaagtccagggcgtcggtgctcactgctctggcaatgcccggtgagactgaattatgtttaaatttattgtagatgctgatcttctggacaatcacactttt

SEQ ID NO: 6046 - DNA, 2300 bp, Homo sapien
gagtattgttacaagggtggtgatggtggtagaaagatctggctgctggaaatggttttttttttttttttgagatggagtgtctctgtcacccaggctggagtgcagtggcgcgatcacagcttactacaagctccgcttcctgggttcacgccactctcctgcctcagcctcctgagtaactgggaatacaggtgcttgtcaccgcacccggctaatttttttgtgtctttagtagagacggggtttcaccgtgttagccaggctggtcttgatctcctgaccttgtgatccacccgcctcagcctcccaaagtgctgggatcacaggcgtgagataaaactatacttaggttttcttttttttttttttttgagatggagtcttgctctgttgcccaggctggagtgcagtggcgggatctcggttgactgcaagctccgcctcccaggttcatgccattctcctgcctcagcctcccgagtagctgggactataggtacccaccaccacacccggctaattttttttttgcatttttagtagagacggggtttcaccatgttagccaggatggtctcgatctcctgaccttgtgatccacgcacccaggcctcccaaagtgctgggattacaggcgtgagccaccgcgcctggcctgtacttacattttcaacttaagatgtatgcagtttggtgtatctaaattacacacccatttaaaacatggcaggatggcacctggttattcacctaggttcttctgtagcagtgaagaaaagaaaatacctccccttcttatctccaggtcaaggtacagtctgtgcagctcagaaacacttttaaaacaagctatattatttctaaacaaagttgtatttgaacagtgttcatgttcattttattctttttttttttgagacagaatctcgctttgtcacctaggctggagtgcagtgacgcaatctcagctcactgcaaactctacctccccagttcacgccattctcctgcctcagcctcccaagaagctgggactacaggggcccaccaccacacccggctaattttttgtatttttagtagagatggggtttcaccgtgttaaccaggttggtctcgatctcctgacctcatcatctgcccgcctcagcctcccaaagtgctgggattacaggcgtgagccaccgcgcctggcctcattttattctttggagcttcgtctgtgaggttgcgttcatttttgtcctctgtctagactctctaatagggaaggtagccctccacctaccccacccccaaagtaagtaaggtgtctgtcttcaaaaacagtcagttccactgagcaacaagtctcctgacttcctaggcccgcacaatctgtcaagagcaacaggacgacacgatgggtttgggggatcatgtgtccaaagggattttgttccagagatgctatgcgcggcatgatgtttccctgttaccactttgggaacacaatctcttggcaactaaacctgtaaactcagattaacagagctctttcccttcccaaagttggttttcctttccttgaatcttacttaataaacattgctgctcccagggttgagttggttttatgtgtttacgataagttaggttcaaagcgcccacgtgcagtgccttatctatcctgccccggcctttcctctaaggagtccaaaggataaagcctggttataaaaggccacagccaacctgctgggctgtgagtggaagctctggtgcagcatggtaagtcagggccccatgtgagcaggggatttggcagggcgggggcagcccaggctacaagagggacgtggcccagaggcggggaagccaccacagtggagcccctgagtccagggtcctagtgtgctgctgtctaactccctgtgcactgggaggactcagcctcagggtccccacctcaagggagagccctgtggggcccgggttgcggggcgtctgttctactcactgtccttgtgacccgggctcctgacccagctgggtcctgcccctgccagcctcactgtgcgcatgggtctgtgtgtgtctgtgtttccatccatgtagatgctgcccccttggaccctcggccttctcctgctggccacagtcagaggtgaggatgctgtcaccattcctttagggagaaagtgacatgcctgggctggcctttggtgaggcagctagaggtatattaataattattataatgattatgaagagcattatcgttacttggagaaaacaattgtgccactcagagagtg

SEQ ID NO: 6047 - DNA, 2300 bp, Homo sapien
attcaacaggcattaagtgcttcctctgcataccaggccatgttctgggacgtgtggtctaagttctgcccctcagaacccggccatcagccatcttcagcgatggaatgctctcaatgcatgtctgagaagctagagcgcctagactggtccagttggctgcacagacacagacagtgggtcaaggcagggacagtgaccaggacccgggttcccctgccaggcacagctgcagggtacgtccacacttaccgctatagcctggtgtgattggcaggtttctcatgaaggtcttggaaggctccatgatttcgctctctgttagtggagggaagagggaatgaaacggtctcatcaaaagtcactgccttaaggaattactattgagtgtgcacaagctcttgggagtggaagaatgactgccaggagttggggctgagaggcagcactaccaccttacccaaagccagagacacagctggcttcagtcacaaaccaatgacctattaccaagggcccatcaccttttatgttaacttggataacagtgtgtagatcacacctaccagggtctcctctcccctccatccgacctccagccatccaacaattgtgaactgtactcatactatggctgtgaaacatgatagaggctgggaatgcaaagcttctgagcaagcccagaagcccctgtgttaggttcatgagcctcaggtgaggagagagatgaggcccgcacacccccagacctccttcttgatccaggtgaaatcaggttgcagtggtgatttttgccagcccccaccattacccctggaacatctggcaatgtccagaggcatatttggctgtcagaagtgggggatgggatgctactgaacatcctgcaatgctcagaagcctccccccacccgccggcacacacatgcacacacacacacacacacacacacacacacacacacaaacaagggagaagaaattctggcttgaaggaatcaggaagtcccaaaaggcagacatggagtccaaggagggtaagcagaggccaccctctgcttcagggggctccactgaaacatcagtttatgtggatgctgtttctgcaataagacaccttccctctttgggtatcgctggtcattccccccaagtgggctgaggccttgccaagtcctgccctgctgagccagttcatctctttaaagaaatgcctttgaggctggaagaagaggattcagggtggaggagagggccacagtcatggcttagtcagcaatgatggggattgttaagacagttcagcccccgccaggctgacagcagtgaggactgtgccgcgtctaggccactctaacccctggcatcacgtacctgactcctgggaggaagcactgggcctggagtcagacagacctggctgtgagaccatgtcccacccatactgaccacctgcttacttttctgaaagctttccacgcttgtttaatcctctcaacagccccatgatataaatgctatattatacccattccccaatttaaaaaggcaacagacagggaacactggctatccccatgtggttgcagcagaaccgcattctcctttaatccccacagcttccctaagaatgagttcctgttggaacccccattttataaatgtgaaaaataaggcacagagaggttaggtaactggtttcagggttccagagtgaaagggggtgcgaacagatgacctctaaactctcagggacaggatatgttgcccaaaagcatcagctggggtataagcctgcctggaggaggtgggcagggaggagggtgggaagaaaggcggtgtcctgagaaagggggctaggagtgggtagaaagtagggcccctcctagccaccctcttccaatcccacctcagcgctcacctgggcggggctggcgctatccggtgcccacttggcctctgcccggccgcccaggatccctgccttccaccaggcctttgtgcgctcacccggtggagcacaaaggccccaccaccgccagcctgcccctcccccacccttcccgcggtcccacctggaaggtgggcgcttcccccagcgcccggcacagcccggaccccggtgtaaagtcgggcatctgcgcagtaaacatctggcctcggagctgtcctccgcgccttggctgccccagccaggggaaggatatgcggagggctctaagtcaaagcgggcgtttttgcgggtgtagacactgcggcgcctgggtctgcaggtctggccggggaagcgggtgggcggg

SEQ ID NO: 6048 - DNA, 2300 bp, Homo sapien
tctccctgtgtactgtttctcttaaatgagcagatagaaatctgcagtgttggcagataggtgatggagaggatgataattttatcttctggccacagagctgcagccccagttgtcagagtccttaaatgaaacccccaaatccatccctccttccctacccccactggaatattctagaataagagcactggataagtacacttgaacacatttttctaaccttagaaaatacctacaaggcctgttgtcttgacccattactcaattgtccctggcatattatctgatcttcacgtttcttggaagcagaatcatcaaggctttcctttgtaactgccctttccgtacacagcaggcatgaataaatgctgagtaacagacaagttacagacaggaggggaaagaggaggaaccatacaactgtttttgcaaaatgatggctgagtccagattatagaggttgccttacccttagaatgttatttagaccaagtttagcttttagagtccaggtctggttaattgccagggtagcaaagaatcgcatgcaccaatgtaaacaggagtcagaatgcattattagtcaaagatcgaatttcacattgtagagatgtatagctgtgattaagctgcatatgtatgctgggaaacggcttgagtggatggctaatataaaagttgttggccataatgccacacctctcatctgcttgaaatatggaccagtattctaaaatatcagctactggggtctcattcactacaagataaattcaaacttcacagaactttgcagcagttcaccaccagacgggactgtgtctgcaaactctcttgtcttcacagacgcctaataaagcaaaactctgaatctcatgtggcccagattttttttccccccatcctgggtttgcaaactgcatgatggacacgtcagtactgatctccctctctaccccatctcaggtggtggagagagagtttcagttttttccaggtgctgtaagttttcttaagttattctaacaagactaggccctttgtttgctgggaaccaaggccccatcgatgggcacagagccccttttctctggaagaaagtggtctagccagagggagggcaggtaagcagagtgaccactgccaatgccactgcaccccagtgtaagtcattaaaacatgcagaaggcctggctgggctcttgcccctgggcatcccagccgtcacgtgaaactggctgtgtccagagcctacacctgagtcgccctccacagttggctctgaaagcttcctgatggcccgaggtatgttctaaatggggtgataaaagagaggtataaatggtggtcggctccaccagccttcatttgcagttcaattttcagaaaagtagaggtagggaaggccgggaggtgcagcaaacaagcgtgtcctggaagtagcgcagcttcagcgtcattttctgtaaagggagcagccagcacatgctggttcatagggcggacatcttggtgggtttcaattcaatgagaggaagtctgggtgtccctccaagagtgattagaaagaaggatgactcaccttccccaggtggacagccactcctctctgccttcacctgtcccggccacctgaaaatctgcccctcctaacaggagacagggagggaggggctgccaggcccaggaagctcctgtattggaggcgccagggcccccaggcctcgcctcctcccgcccactgccggccccgccccctgttcccgcccacccgcttccccggccagacctgcagacccaggcgccgcagtgtctacacccgcaaaaacgcccgctttgacttagagccctccgcatatccttcccctggctggggcagccaaggcgcggaggacagctccgaggccagatgtttactgcgcagatgcccgactttacaccggggtccgggctgtgccgggcgctgggggaagcgcccaccttccaggtgggaccgcgggaagggtgggggaggggcaggctggcggtggtggggcctttgtgctccaccgggtgagcgcacaaaggcctggtggaaggcagggatcctgggcggccgggcagaggccaagtgggcaccggatagcgccagccccgcccaggtgagcgctgaggtgggattggaagagggtggctaggaggggccctactttctacccactcctagccccctttctcaggacaccgcctttcttcccaccctcctccctgcccacctcctccaggcaggcttataccccagctgatgcttttgggca

SEQ ID NO: 6049 - DNA, 2300 bp, Homo sapien
actttaagagctgaacgttctggttctggaagccatgtgactgcgcagaacaacctaagaaaccctttgtgtcctgaggggtcgttgacctctccttccgggtcggagcagtcactctgagggcaaagcgtggtccactgtgtgtgatgttttcaggatgctagggtcaaagaaagaaaccaagtggtacataagcccagcttttctgctgggctaagtgtaagtgtgagtaacatggtcaagcccctcttttttgggctaatgtaaagcctttcctgccttgcattaatgctatctccctgtgtactgtttctcttaaatgagcagatagaaatctgcagtgttggcagataggtgatggagaggatgataattttatcttctggccacagagctgcagccccagttgtcagagtccttaaatgaaacccccaaatccatccctccttccctacccccactggaatattctagaataagagcactggataagtacacttgaacacatttttctaaccttagaaaatacctacaaggcctgttgtcttgacccattactcaattgtccctggcatattatctgatcttcacgtttcttggaagcagaatcatcaaggctttcctttgtaactgccctttccgtacacagcaggcatgaataaatgctgagtaacagacaagttacagacaggaggggaaagaggaggaaccatacaactgtttttgcaaaatgatggctgagtccagattatagaggttgccttacccttagaatgttatttagaccaagtttagcttttagagtccaggtctggttaattgccagggtagcaaagaatcgcatgcaccaatgtaaacaggagtcagaatgcattattagtcaaagatcgaatttcacattgtagagatgtatagctgtgattaagctgcatatgtatgctgggaaacggcttgagtggatggctaatataaaagttgttggccataatgccacacctctcatctgcttgaaatatggaccagtattctaaaatatcagctactggggtctcattcactacaagataaattcaaacttcacagaactttgcagcagttcaccaccagacgggactgtgtctgcaaactctcttgtcttcacagacgcctaataaagcaaaactctgaatctcatgtggcccagattttttttccccccatcctgggtttgcaaactgcatgatggacacgtcagtactgatctccctctctaccccatctcaggtggtggagagagagtttcagttttttccaggtgctgtaagttttcttaagttattctaacaagactaggccctttgtttgctgggaaccaaggccccatcgatgggcacagagccccttttctctggaagaaagtggtctagccagagggagggcaggtaagcagagtgaccactgccaatgccactgcaccccagtgtaagtcattaaaacatgcagaaggcctggctgggctcttgcccctgggcatcccagccgtcacgtgaaactggctgtgtccagagcctacacctgagtcgccctccacagttggctctgaaagcttcctgatggcccgaggtatgttctaaatggggtgataaaagagaggtataaatggtggtcggctccaccagccttcatttgcagttcaattttcagaaaagtagaggtagggaaggccgggaggtgcagcaaacaagcgtgtcctggaagtagcgcagcttcagcgtcattttctgtaaagggagcagccagcacatgctggttcatagggcggacatcttggtgggtttcaattcaatgagaggaagtctgggtgtccctccaagagtgattagaaagaaggatgactcaccttccccaggtggacagccactcctctctgccttcacctgtcccggccacctgaaaatctgcccctcctaacaggagacagggagggaggggctgccaggcccaggaagctcctgtattggaggcgccagggcccccaggcctcgcctcctcccgcccactgccggccccgccccctgttcccgcccacccgcttccccggccagacctgcagacccaggcgccgcagtgtctacacccgcaaaaacgcccgctttgacttagagccctccgcatatccttcccctggctggggcagccaaggcgcggaggacagctccgaggccagatgtttactgcgcagatgcccgactttacaccggggtccgggctgtgccgggcgctgggggaagcgcccaccttccaggtgggaccgcgggaag

SEQ ID NO: 6050 - DNA, 2300 bp, Homo sapien
attagtgtgatgagcatgaaggccgtgagggcaaatcccaggcagagtgtgcgctgcctttcatgctcccctgcaaatcaaaagtgttctgctctctgcccccagcactggggcctgcatgtcacctcccatccttctcacgcaccctcatgtcactgtggctgggagtcccatgagggcacgtggcgcccaaggcccttccacagcaggaggcagatgtgcaggggctacgggtttctgctgcttctgacaggctgtcaaggccaatgtcctgatgccctggtctgatggggaggaacgagtgccttgaggacactgaggagggcccccctggccagcatgggtatgcaggggagccttcctggagttgggcagtccatgatgagaaggagaagttcttaggttgctggtggtggtgaaatgagaggacgggtgatccaggcatcaagcacattttcatgtctttgaaataccagcataagagaagcaggggtgggtgagagggattgaagaatcagagcggctgtagctggagctggagtagggtggggacagaccagatcacaaagcatggactgaaggggtgagacaggagggcgggggagctgtgggcaggctgtcgcaggcacgtaggcaggaagggccctcgggggccatcagtgacttaatgatttttaccatgtgctagatcccaagctaagcatgttacatgcatagtctatctaatcttcagttttatgaagtgggttctcctgttatacccatttcgcagatgagaatattgaggctcagataggttaaataacttgactgtggtttcatgcacagccaggaactgtccatttgggatttttaatgcaggcagacagaagacaagttttgtgttttgaacttgtcactctgccatcaccttctggtctccaggctctcgcagcagctctctgcccattccgtcatccataacgctctcgcagcagctctctgcccactccgtcatccagaacgggattgtacgatgaagcctcccctaggtgatctttgggaaatgccacccatctctggaagtgagggatgctggtggttacagctgggtgggaatcccagctccgcgactcacctgctgggtgtgatattgtaaccctgccgatcctcagcttccttatctgcaaaatgttagttatggggaggaaaggagatagaggtaaagcaccaggcaggtagcacagtgccaggcacccggaaacgacccagtgacggtgctcctcggattcctattactgccctcgtttgccaaggcagggtggtgacaccgcggacccagggggtgcctggccaggcccaaacaggtgccagcggcgcgtgtgtgtggaggagctggggacagggagtatgaatcattcacaactgaagccttgcattattaatatcgttattctcagacttctaaggagggcccagctggatcccatatatggaaggcgcgactcagcctccggggcaagcacctccctgggtccggagttgccatggagtcccgcaggcggcctggaggcggtgccccgggctcggcccccgcgcaggtccttggtctgcggcctgggtcctgcccgcgccggggtccacccagcccgcctttgcgccggcccagggccgctcccctgggaccctgggggacagacagaagctggtggggactggcgcgggcgtcctcgggagagcgccgggcgcgctgggcttgctgaagggctccaggcctggccattcggtgacttccaaagaggggacgcgccgcggggccccgagggcctgaaatccgctcccgcagcgcagccccgggcgcgccactacccccgccgcggtcgactgcggggcgaccgctcggtcccgaagccgggagaggagaggccgggcctcggcgggccgctctgggcgggcggggagcgcagctccggagccaggcagttccccgcgcccgccttccccgacctttcccggccggcccgagctcggaggggcggggcgccgggcgggccggggcggggcccggggaggagccgtggctgcggcggctgccgcgtcagagcagcgctcccgctgcccggcggctcagacacggcccgagcgccgccgcggacgcggacagagacccgcacgggcacgggcgctgcgctggaggctcccctcgcggtccggggctgcgcgaccatggcggacaaggaggccggcggcagcgacgggccccgaggtgagcgcaggctgcgggtcctgcggccgcggctggcggggcagggagggaggag

SEQ ID NO: 6051 - DNA, 2300 bp, Homo sapien
ctcagacccaatccttaggtgacagttctggaaatgaggggtgtctaaaacaaagggcatctgaaacttcggtttttcagcttcctttccttgtctcatgacctctttcctacccgctgcctctgttttctctaatatggaacagtgaaaatgggggccagcaaaacagattgctgatgtctgttgattttatcaaaggaaggttagattgagtaagatggcataaataagcacacataggacaatacctggcatatatcaggtgctcaatagcagtgaattctctccctgctgtcatgaattcttgaaggttggagaccatgcgctgttctgcgtgccaagttattttttcggcctgatagcaggtgagctactgagtgaagacagagactggacgctaattcagctctgaatcttcagcacctggcatggaaggtgcacaggacatatttgaaaaaggagaattaatagaattgaccaataggctgacctcctgaatgatgactgagcaaattgatctagaggtattcaaaacagtttagttgactgtcccaaactttctcagacctcttctgccactgacttccctgaaaagaccctttgcagccaggcacggtggctcatgcctgtaatcccagcatgttgggaggctgaggtgggcggatcacgaggtcaagagattgagaccatcctggccaacgtggtgaaacctcgtctctactaaaagtacaaaaattagctgggtgtggtggcacgtgcttgtagtcccagctagttgggaggctgaggcaggagaatcgcttgaactggggaggcggaggttgtagtgaaccaagatcatgtcactgcactccagcctggcaatagagcgagactctgtctcaaaaaaaaaccaaaaaaacaaaatcaacccttttgcatttttgtcctatcctgttttccgtccccttgagaccgtatcacacgttctttttcctctttggtgaccttctttgtctttcttgctgctcctgtacactgttgtttactcacactgcttttattctgagctctcatatctcttctatttctggttctgacgcctatcttgtctatgcctcgcacactcacctccgactcggagtcctgacctgcacagctgcgattgcggtttgcacactttgagggtgaacagttgtcatgcagcccttttgagtgctaaaaagtgaccacttaagattttcctcgtggttaggaagatgagtattttaaaatcattctggaggagattagtggtaaagaaaaccttcctcagcaactaaatcattgtggaaaaataagccaattagtcactaaaacaaaaaccttttgaagacttgtgaacagaggaaagaacatgtgaattacaggttttctgttttgtggcattgatagactccagtagtattcatgatcgctgatcatcgcgatggggaccccggaaaggtgaaattatgttcagttgaatattacctaacccttctcaaaggacaatttgattttgttattccattgttaagggctttttggtggcccttcgagatctggctctggcttctctttgaccttgaaccctcactctggttgtgctgatctgctgaccgtcctccggacacggtagggtgctccatgccacagggcctttgaacaaacctttcttatccttggaataaatgccttttcttccttttgttcccctgccaaacacatgctattaggaaagattcaaccccatgtcatcacctccacaaagcttctcctgacacctcccaagttagattgacctttttctcttttgtgtcccccactgtcgaacttgatgttcttgtcaatgacaacaatagtggtaacaatgatggtttcctttcattgagtgccttttggttccagtaagtgtaagtgctttcacttgttatatcatttaagccctgccaccctatgaagaggccactattatacatacagtcatgcattgctttatgacagggatatgttctgagaaatgcattattaggcaatttcatcattgtgtgaacatcatagaatgtacttccacaaacctagatgatatagcctgcctcacaactaagctattatatgcaggacagtctgctgctagctgcttctaagctacagaccatatatatgtatatatgtacatatcctctccctgcccctcttgctctttatatatatatgcatatacctataatatatgcatatttagataggcttttatatgtatattgtatatatgtacatatatacatttattttttgag

SEQ ID NO: 6052 - DNA, 2300 bp, Homo sapien
acttcctaaaaccccacttatttcttgcccttcctatattcagaaatttgtggttgcttccttctcttacaaaatgggattccagcttcttcataatctcacctcaaactacttttccaccctatttctcattattcctgaaaagaaaccctttgctccagccaggttggtgtactcattactcacccacctccaaaacatctgattgtgagttaagtacttattaaccatttattatgtgtaaaacccattcaatcactcaacaaatatttactgagcagctattccatcaggtaatgtaatgatgctgcagacacagtggcgaacaagacaaatcaagtcgctgtcctcctggaactgaggcaaatgggttatagggttatagggggagactcttaagacatggtggtcccagcccaggatactcgcaatcttccattgagatgtcaaatgaatcaagacatccctgagggctgaactttgtggtccaggctgcaaatggggaaagagttcagaaggaagggctggctggagtgagagctggattgtggacgtggcttctttgatgtgggactcaacccaggcactcaaggatgaacataggagagaagcaggtgcctttcttccaggggtgtatgaggaaaggcaaaaaggtgaaatggaaacagcagcaatagtgtcagcttattttgcataagggttcactcaacacctattcagcagagcacatcctctgcccttgcagggccccaggctccgtggtggatgtgaaggtaacacagactcagattctaccgtcaggggatttccatctagcaaggagagaaggcaggttcatgatggtccattacacacagacagtgagacgttccgtaagagagcagagagaacacggaggaagtttggaaggtgcatgtctgggtttgtgtaacagtacttatagcatcacatttttatgcatctgcacccatacgtgcatgtattgaaaataactgtgtttcaaagtgctttctcactcacttcctcattttgtactaagtgactcgggaaacaggcagaggaggtaagatgatgttttccagaggggggaaagtgtggcacagatcttgtaactgatctgcttaggtaggaaacataaacaggcgtgagtggaacaagaacaccctgtccgtcgccgcccactcctgcagcagaggaagtatctagaactgaggacgcacactaagttctgtaatcgcatgatacctggcaggtacaatgaagccaggaaggcacttcggattgaaaagggcaaggacataggcagcattctggagagggaacgtgagccaaggccattcccccatttccgttttacctccccaagtcctgcctgaatcatcccccatccttaggtctgcccaaaccacaaccatcccttagggttcaccccagatattttcaacccacactggtttttttcattccattgatttcacccccactaatatcccagagaagggcaagtggccgtttctctcctggacatcatagcaggcccagccagcacacggctcggctcagagcaggtagttaataaacatgagccgaatgaaagaattcctgagatcgccaccgctcagtaaggatgccctgagcccctacatccctcccccaacagagtgggcctgcctggcacgggcggccttagcaacccggaggagctcactaacagcagagagcaagggggcgcgtggggagggcggggtggcccaagacgctgggccactgggacccgagcgcgcgaccccagccggaattcggagctaaggctgccgcgctccggcaaaacgcgcttgatgaggtcgttaaagatttccccctctggaaaatcgccagggaaaagtggtgaaaaacgaagccgggagggccctagtctcgggagtctaggaggagcccaacccccggacctaatgccgcagggagaaaagacagagcagcgagcgcaaataccatcctagctccaataaaagggaacgacttttaccgcaggaagaacctaggcctggaagccacgcgagatctgggggtcgggatcacgttgcgttgcctagcgacagcagggacgctcgtgggaccccaggctaaaccccgctgtagccttaaatctcctaccatggaggaagaaggcggcggccgcagctgtgggaccactagggagctgcagaagctgaagcagcaggcgatggagtactaccgggagaacgacgttccgcgcaggctggaagagctgctcaactccaccttctacctccagcctg

SEQ ID NO: 6053 - DNA, 2300 bp, Homo sapien
acactgctatcaaggactgcctgagactgggtaatttataaaggaaagaggtttaattgactcacagttctgcacagctgcagaggcctcaggaaacttacaatcatggtggagggagaagcaaacacatccttcttcacatgagggcgggaaggagaagtgcaaagtgaagcggggaagccccttataaaaccatcagctctcatgagaagtcactatcacgagaacagcatgagagtaaccacccccataatttaattacctcccacccggtccctccccacatgtcatatgtggggattatgagcagtacaattcaagatgaggtttgggaggggatagagccaagccatatcaatgttggagagggacagaagaaatgacattggagctgaacactggaggaggtatagtgtttcagtgccagtcaagggggagatgtggtgagcagatatttcagggagagagaatgggacaagcaaagaggagggaggtaggaaacttctggctttggggaacagtcagtgattcggtgtagaggaggagggcagggagtgggagatgcgcctgttaccagagggaggggctgagcactgtgaaccacacacatgaaggccagcaagcacgggaaagccacaggaggttctgaggaagagaagtgtggtcagacttgcatgttaggacactgctctggcagcattctgcaggatgaactagatagagggagagacgaggtgagagtaagcacggccaaaactagggcagttactaagaaaaggaaaaggagattgcttttttctgtttttctttttgagacggagtctcgctctgttgccgaggctggagtgcagtggtgcaatctcggctcactgcaacctccgattcccaggttcaaggagtttgcttttttgcctctgcaattcctgaacatccttcgaagtccaagccaaagccttcctggatatacagcctccaaggatcttttccatccctgaattcctttaataggcatatagggatctgcccctcaatctagcacacagtcatctatcaccttatcttttgctccaattattttatgtattagtgacttttgtcccaaactaagatgtaagttcccagagagctgtacaaacgaatatcctggctgcctaatagaataagaagatcattatactggggaacaagagtccatgtttttagtcctagcttgtacactaagtagctgtgagacaaagacttggtgtccctgtaaaatgaggacgttagaatagattgtgttcaagaattcctctagcaacagatagtaggaagagaatggaatgagagtcaagcattcactcattcatcctgcaggtagtttctcagcatccactgtgtgccatgcactctgctgggtactagggacacaaatgtggtttgattttttttcttctgtcactatgtcctttgggaaaatcatttaaattgcactggccacaggttctttatttgtaaaatgggaatcatcatttttacctcgtcgcagtggtactgaggattgagttacagtacgcagcacaaggggctcagtaaaccccacacctctcccctttgatagtataggccatgagtgggaaaaagtcattcgcggaacatcctttatatcaactgcctcaatacgacgtggttttgcaccctgacagcacatctgcctcttcataggactccttctgcttggtgttcacattgcctccttgctttgccttgccatagtgcaaactcctaggggccccagccacactgccttccttactacttatagatctggaagggagaaaacgtctttgcttcagctgctcactgcttaacgctaaggtatgtgccagatctcagggctgggcagagacccggaaggtgagaagacaaggcttctgagcccagcaggggctcacaggctgcctagggaggctgcctcaagagactacaatacacgaaggaaatgctgtaggaacccagaaggacggttggtccagggctacgtgggcaaggctttggtctgaattttggagtttagggcggggctggtcagatattaactggcatcccggcagaggagccagtaggatgaggccccagaataggctgaagccaagttgtagcaaacgccaaggtgttcatcctgtgatcaaagaggagctgcttaaggtcggtgagctgagctgagggcattaaggtatgtgttaaaaatgacaattggcaagcatgggcggtgggccggcccacaaacggagaggcctcttaggcagcgaggaagcctg

SEQ ID NO: 6054 - DNA, 2300 bp, Homo sapien
gtcaagaatttgaggaaataatgccattatccaaataaaaaactagaaattactgtgaaagatacattcatcaataaaagatatccttgaaaggtatgtatgtatgtatgtacgaacacacacataagttttccttgaattaaatcaagccattgagaaaaactacacagtgtccttgctattgaaacaatgtagtagttttacaacttattttagtagtgatgaccatgtgtttttcaaatatctgtttacaaatgatagagatggtaagtttttaaaaattataaatacaaatgatatgggaatagttgttgtagtacttttttcaaatgtaaagtggctatggttctattttctgtatcttgtcagtattggtcataccttatggtgtgactcttctacacatagaagcatatcagcaatgttaaagaaacaaaccagattttaatgataaaataagccattatagtgttacatgtgatgtgatagtccttttaatgtatttacacaataaatgaaaaataaaaagagatacttctaaggaaaaaattatatgcctaattaaaatatgagccttatttaagtcttttgcaaaccagttgattaggcagctgacagcaaaataatataatctcctaatcttgttagtcagtttcctccctgacaacaggttacttttctgtaacttcaagcagttagggaaaaaattccctaaacaaaataacataatctcttaatagaggttaattatgagatttgtaaccatctgattttacaagcaccttttttttgttttacatgctaaagaagaaacaaggcttcttgtaaaaatggctaaaacaaccatttttagccagtagaattattagaatccttcaggtagttggcaggcagggagggagcaggattaaggcaagtccttagtgagttcaaacattacaaaggctggcaagattattagccttggtggacaaaagctgtcttttgactctggcatgaagtctggcaagttataccagacttgaggttcttatgtcctctgatcaaaagattatgtatggttctcctgccttcccctccctccgctgcctcccaagtatgtggcacagttgagaaggaccgtttctaagaaataatgggcatctctgatgaaagacttgttgatgtattaaatccttatgtatcactgagaaatacgtcacccagtgttctgtacaaacacttgactagtaatggagatggaaaaccatagctctcactctgtaacatacttcccggaagagccagagcagggaaacatggatcttcctctgtcttcttgaaagccagtatcagtttcagcaggagtacagatttatagcatctcttgtttccttcagtgtcttctgggccctgaataatacattaactgtctcctgtgttaggaatgtggagttaagatgccgacccttgcttgcctctctgtatgattataactttcctttcatactgaagtcaagatgtgctcagtgcagcccttctttgggtcggcccctggagagcattatgtgcctcctttgacagctacgacgccacggacatcaggtgtgcagccagggtcaccctctgaaggatcagtcacacatttttcagtgccgctgtgacttcagtttagtagcttgtggctgccatataaagatttccttctaaggtgagtttaatatatcaattctcttctccacccagtcaacacacatcacgtcttaatcgtcgctatgcaggtaccttcccactgatgaatttcatatagtcacctcttccagaagtgttcttgtactgttcttctgaaacaaaagctagcatttacaccatcaatagcatcttcttaaatgatccaacactctgtcttgttgaaaatgtgcacatttaaaaaatattaatatatagcaaattcattttgtttcataattccattcaaattctggtaatgttttcatggtttgatttttatattcttttgtatattgtattaagacattaacctttttgtttttgttttgttttcactttaggggacacttaacaaatccactagttcaagaagcttaaaatcccttgaccctgaaaacagtgaaactgagttagaaaggattttgcgtcgcagaaaggtgacagcagaagcagatagcagtagtaagccggtttgaattctccacagtccttctcttcatctctgaaacatcttcttctaagtctctttttacatgaaacaatcttttaaaaagtattattaaaatatttgtttttaatgtgagtgagaa

SEQ ID NO: 6055 - DNA, 2300 bp, Homo sapien
aaaaaaaaggaaagaaaggaagcattgggtgatgatatcttctgaacaggtgttactctgtatatccatttgccccttttcctaagggcaatgttatgccttttttatcctccaagtatgtgttttctattgctggcttcctcaggactgttttgcaaatacagttcaccacactgaggacatttatgatgcagttgaaagaattcaaaaattcttgattcattcatgttttggtaaacattttatggaggaaatgatgctatatgcagatatgtacacaagcctatgtacagttttaaaagaatgttaaagtgagcatctatgtaatcaccctccaaatcaagaaataggcaatactggtaccctaattctttcctttgatccttttccaaagataaccaccttcctccctaattactatcttttatggtgatcatttccttgcattattgaagaaaaattttcttgcctaatatgtatccctaaactattgtaaatatctgtatggcctggttttgaactttatgtaattggaattttcatgtatcattgtgatcttgctctttttactctacattattattatttttatttttttttttgagatggagttttgcttttgttgcccaggctggagtgcaatggtgtgatcttggcttactgcaacttccgcctcccaggttcaagcgattctcctgctcagcttcccaagtagctgggattacagatgtccgccaccacgcccagctaattttttcatatttttagtagagacagggttttgccatgttggccaggctggtctcgaactcctgacctcaggtgatctgcccaccttggcctcccaaagtgctgggattacacgtgtgagccactgcacacggcctactctgtattattttgtaagattcatccatgttgtgtagcttaagtctattcatattcagtgatatataattcactttatgaaggtctcagaatgtacttatccattgtggtgctgatggacatttgagttattaccagttctggggaattacggaaattcttcatgaacattcttgttcatgtattctggtgcgcaagtgcttgcctttctgtaggatatatggcagtggaatcactggctcataagatacatatatttttggctctactagataattacaaagagttttccagagtgaaatgtactattaatttatatatcctgtttggtttgggaacttctgttactccacaaacccactaacacttgatattatcagattttttttgtctatttgatgaatgtatagtgatatcccagtgtggttttgtgtttgcctaatagctaatgaagtcaagtacctcttttgtatatgtattggaaatttggacatcttttttggagttgcaaggttctcttccattttgtcttgaattatgtgctttttctcattgatctgtagaatttctttatatatccttgtctttttattctgcataatatcaaaggttataaaattttagtatagtcaaatttatcataatttgattttacatagatttgtttttaaatggaccagagagagagtgatgtaaatatgttttatccataagtatttagtctacatcatgctgattcagatgtttttatacccatagttcacaaatagatatttactgataacatacactttttactgtgaaacattccctaattctttcattcttccctccccctctaacatagtacatagatagctgtttctgaattttatatatatgagtattgaaattttttgtctcttttcctttgtaagtgtgtatgcattttattattatagtagtgtactctctccaataatcagtttggttttatacagaagaggatgagacgtgtttctcttctgtaaagtgatgaaaagtttaatattattaaaaatggaacgtagactacttagattctagttatatattcatgcacctatcaaagagtgagatttttactggttatttaggatctaggcatccagtaatctcctgttgatctttttctttctcccaaagatccctcatgtccatgatccggaaacgatcccaccccagtggcagtggtgctaagaaagaaaaggcaactcaaccagaaacaagtaagcatcacttctattggtgtaagtggttgatggtgtaccattttggggcaattcacatatttgttaagttctttgactataaacatgttgttgggagagtagtatgaagcactgaacagctgtaagaatgaaccagtaaccgtcattgccttcctgtagttt

SEQ ID NO: 6056 - DNA, 2300 bp, Homo sapien
aaagaaatacacaacctcaaacagcaactggagcttctagaggaagataaaaaggaattggaattgaaatatcagaattctgaagagaaagccagaaatttaaagcactctggtaaaagcattgagtaggctactatgtcttactattaatctttgaattactcatgcctagtacaaaacctggcatatagttagtctagaacatttactgaatgctgtggaaaaataccaagatttgttttgaaattccttaatttctaaccattgcaattcagtagaatagctgctgtattaaataattcaaaaatatttagactaattttttggacttagagcccttgtgaacatcatatacagaatttagacacagagataccgttagcctaggaagaccaacttttcagcatttttcagagcttcagagatgaatgttcattatgtactttattttgttcacttagagtgcatttttagaaagaattaaactttttaaaaatactgtcttcatctttggtgttcatactaccttcatctttggtgtctaataatacacatgaaataatactttctatattgtacctaacaatgaactgggcaacaatatatctattaaatggaaaatctttagaaacaccaggggatacttaaatcaaaagatttattcattcagttctagaaggcttaacgggaatgtgcgagttagattactatacgggcatatgtgtaagtctctgttggaaggtcggtaatttaagaagtcaggtacattccctttataatagcttcaatattcacttcagatatttttggttaattttatactagaattttgaaacctatgcagaagaaccatgtaggccttttttccttctaaaagcattcagtgctttctaatccacaatgaaaattgattataatttattttttaattgatccaaaattaagaagtatttcattctttttagtgaatatcagagtagcctgtagccaaagccatctttattatgaatagaggaggcagacactggaaatatataaggttcaaatctgaatgccttctattaatacttattatctgctgtgtgtgtacccagccctatcctaggaaacaataagaaatacagaagaaaagaaaccatgctttttgtcttcagagaactcagattccccttggagggataggtgcatgcacataaaaagactagaggattctcagttttggagagcatagcccacactgcctatttaagtgttgagggtaaatacaaatggacagatccctgagggtacactcagtcggggaaagtggaatggctgtggatggggagagctacctctgagtgccaacagtatgcagcaccttttacccattatctcataggtattagcacctgtgatatcaacttaagttcagttctttgaagtcaggtgttacgtctcctgtagcaccattcataggcactttcacatcattggtgcttagtaaaatgccttcctcatgaaagacttgaaggaatacgatacatttccagaaatctcttcaaaagagcaaaaagtttctgagttacagatttaggaagctgaatctggttaaaatcaaagactctagtatttgcagtttttgaaggaaattaagcaggggagagaagtatgcagctattaaatttcattactaaatgtcatctttaaaattaattcttggtctgtacacttttaaagtattaacaatttcttagtgtttgagtcatatacttcgttgttaacaaatatttcttcagcctactccttcctacccttcagccattgtttttaatttttttcttttctaaagttgtatatacagcaaaaagataacatttaatattgatggataggagtcctctcttgcattagcaatagactagatagtgaaaagtttaaaaaggtctgtaatttcatattgaaatttctaattttgccttaataaaaagaacttacttttgagaaaggttatgttctttttttcacatgtataaacaatgtttagttgcttatttcagctctcttctgaatgtttgctctctgtgcagttgatgaactccagaaacgagtgaaccagtctgagaattcagtacctccaccacctcctcctccaccaccacttccccctccacctcccaatcctatccggtaagcacatccaggaagactgctctgcatcaaatgttcttctccatcagattgtgccataagaggagtcatcttaaaagcatgaaagatactagctgatgcttctcttggaaatttttctaaaggccagt

SEQ ID NO: 6057 - DNA, 2300 bp, Homo sapien
tgccttttatttgcacgaggcttcaaggatttgccttcacagtcttgattctggatttaatttgtatcagtggttcttagattctgtagcccagcacttcccaactgatgtgccaactgcagcttgataaagtgacttatgagcatgccaacgtattgatcctgtcagtgagcagcctcatccagttacctcagtttgcacacacatattgtcattttcttggaggccatgatgtaaaaaaggttggaaagcagtgtctgccaacttcccagcctgagctccttttattattgtggcaaaacattgtaacgaatgggaagaaggaagatgatattttggaaaggaccttaccgttggacaatgtgtaccagttactaatttaaaccaaaaccaaaaataaagcctacactaaaagaaccagttaatagattatctggaggtgctgatggattcagagccactttcaggaccattatctttgtttcttagtgtgctctgttcctcagttgtgattatttactgatgattctctcgcttcccacttagaggtattattggaagacaattcaacaattatttttattatggctatttcagacatctgagaaggcataatgaacaaaataatggggctgagttcagtggctcacgcctgtaatcctagcactttgggaggccgaggcaggaggatcacttgagcccaggagttggagatcagcaagacctcctagcaagacctcgtctctcaaaaaaatttttaaaaatattagccaggcatggtggcatgtgcctgtagtcccagctactcagagggctgaggtgggaggattgcttgaacccaggagttccaggctgcaatgagctatgatcgtattaccaccctccagcctgagtgacagactgagaccctgtctctaaaaaaattatttttaatgaacatccatatacctgctacccaacttaattcacagaatattagcatggtgatgaaagccctggtgtaactctttctggttgcatactccttgctccctgcccagtttccctaaacaactgttattctgaacttggtgtttatcatgtcagtgcatatatttacatgttcactacaatacatagtattttgagtgtttttaaatattataaacatgcctgctttctaaattcaatatatttgagatttatcttctaccttgatatatgtagctttactttatgttctttttttttaaaaaaacttttctatagtattctctttcgttgatagacatcaaaagttacttcagaaatttaaatttttgtgggagtatttatatgtgttttatttaagccaagagtcatcagagttcaaagtcttattttaaaagttcatgttcatcttacttaagtcaaaaataatcagcatttttattttattgtattttatttaaattattatactttaagttctagggcacatgtgcacaatgtgcaggtttgttacatatgtatacatgtgccatgttggtgtgctgcacccattaacttgtcatttacattaggtatatctcctaatgctaatcaacatttaaaatgaataccaaaattgagtatcggatcttgactaaatgattcttgtattttctgggtgatctttagttggatttttgcattaaaaatatgaatcatggctgggtatggtggctcacgcctgtaatcccagcacttcgggaggctgaagcaggaggattgcttgagcccaggagttcgagaccagcctcggcaacataggagaccccatctctatattctttgtttttttttaattaaaaaaatatgtatcatatacattggatggctagcatactgttatgtttaggtgccagtgccaactggaatatataaataagttctgtaccaggtatacatcctaacttaaatagctatccttgaagctttaaagaagagctttaataaaaagtcctaacacattgaaaccaatttctgctttaaattgtaacttcatgttgaaagttgaacagcaattgagtatcacacattgccatatgtcctgttttacaatttttggtgttttctcccctcaaaatttcacatttttaggtaaataaagttaaacaagaaaagactgttttaaattcagaagttcttgaacagagaaaagtcttagaaaaatgcaatagaggtaagtctgtccagtctttttttctcaaatacgtatgcggtgtgttctgtttgcatatattgtgtgtcattttacacctgtgcctaaatatgactgtaaataaaatcttctcctatat

SEQ ID NO: 6058 - DNA, 2300 bp, Homo sapien
ctcttcagggaaaccagttgttcagaggctgcatggtgtaagaagctgctataggacatccatgctctctcatctccctgtctcatgctctacacagcagtgtgtctgctccatttcacagaggaaagaacagtaccccagggcttgagtgaggttcccagtgttacacagaccatggcagagtctagattcaaacatgggtcttctgagcacgatgttcttttagaagcaggtgaacagtgggagcttattgactcttcttctgcaaaggtcctaactttattctaattctgtattgttagtgcatgagttttccacagcaaattatcagacccgatccttttctgggtcatttatctttaccagctattggtttgtgttgaaaaactgaaagttgaatataagtatcaaatcaatcttatgtcaaaacattcacatgtgtttgtatatgtatgtgtgtacttgtatatatacatatagattctggcataatgcatcccaaggataaaagcaggaaatttggggcagggggagtggacccatgttttgatggatattttctcttttttttgcagttcttccattttaggaaaactgctgactcttttatgttttttttttttatcagtgactttgagaatggagtcaatttgtttgagtttataaggaaagctcttttgaagggaaacctttttattgaatgccttctgagtactggggtataaagaaaaatatatgaaggtcctactcttgagtaaaaccactctaatgaggacctcaaataagttgacaaataaccacgatcaattatgctgctctgtgagtgcctagagcatggctgggcaatggacaaagaacaaaaagacaaggttcctactcttttccatgtgataactttttactagcctttaatgcttgccttaataaatgtcacttaggtttttcaaagtcttctctaactctctcacaagcagaatttattgcttttttggtaataagacatctgcatatttatgtatgtatgtatcacatttatcaagcaaaatttattgtcaaaatattagagtataagcaaatgatgtgggttgccttcaaatgtaaaaacagcgagtttttttaacatcaagataaatggggattatggaaatggtgctacttgctagtttccattattttttgcccattttctaagtggacttagcagtatgtgaaaaagtaagagcctatcatactgaggtgaacaactcttcaaatttatatttttggggtatagaaaaatagatgactatatattttgcaatcaaccaaataaaatggtttactttgcttgtgtagcaatcaccatattcaaatgttagtcatgcctccacaattgaagggcattctcttatgactcactcaggatctttatcataatcgtttgggtttttttcctatatggggggaaagcgtcattgagctttgaatggaatagctttcatgtttctcagagtggtgggggtgggggtgtgtgtggagtgtgcgtaaaaagaaggaaatctgtataatagaagaatgtctgcctttaaatagtaagtatttatgtttagtattatgttctgagatcaagttttgaaatgcataaatgtttaagtggctgattagaagtcgtttgggtgagctactgtaacagtgcatcaggcggttctgtcagcttgccaggaacaatgaatgaaaagagaatgagacagacactttccaagacttatgtttcaagaagcaggatatatgatactgtttgcatcttggctcagttgtctattgttaaaatttcttcctcttgtgtaatattcagagatgaaggtctcaaagtattttattttttaaaaaaatcaataaagaagccactttaaagagcaagatatgcatccattatgctaactgttcatgcataatacatccacatacatgcagtttctttgagacagagtggcaagtggttgtgccagagaaaaagtaattacttagcagtttgaaagtgaaaatgagtctcttattaacagcaatctatctagaaacaaagagcaaggatctctgttctgatgacatgtgtttccatctaacacacaatacctagaatttggagaatgctgcaagacagctttgagggcagctaccacttcttttttgcctgtgaaaattggagggaaagaactttgaattggaagaaagaagaacaccaaaagagaaagagagtgaaaggaattccatcctagtgggaatgatttaatgtgttgtattctttagggataagagtgtag

SEQ ID NO: 6059 - DNA, 2300 bp, Homo sapien
tattcatatcatataaataaacaatagtgtaatgggagaactgaatcccaataaggactctaatagccctcctaataattcataccatgtcctcaagtgaatgccatattgtatttcaggagttttttttttttttttttttttttttgagatggagtctcactctgtcacccaggctgcagtgcagtggcagaatctcagctcaggagccttttctaattttaaggaggataaatgggattaattgcaagaggccgcagatttagtatggaaccaaaagtttgattatagatttgataattaactcattcttaaactccagaaatactatctaactactgtataattggagtagacaaatcagccattaaaaaaaaatggaactttgtgaactaagccaaatatttaatgggcactctgcttgtatttggtagagtgagagagaatgagtcaggatgactcatcaggtttaacaggtttcccaactgctggacaaaagctaaatgtccattatttttcattaaaatctcccggatttttttattattatctcctggggatcttcatggcagctatctgcaactatcttgaattatcttacgcatacctagggaaagggctgaataatacaatcccatatcaaaattatttttaaactttaaacattttaatacactgtattaaaaaatactatgctgcccttttagatcattctacccctaaatcactcatgctaaagtactatattgccattttagagaaagagaaagcagtgctaccattttttttttcaaaattttagttagcatgtagtgagtatcagaaagacactagttacaggatttacccatatctcaacctcactctacaactatcatggagaaatgaacacaagaaatggagctgggcacttccataaaacagcaattgaggaatgagcagcactgtgctgttgctgtacccaaactaagagcttagaggtagtgagaaaaaccaagctgtgcaataagtctaattcagtttggacttatctcccatgcttaatgatcagtgtaaaagaactgcaaccttcagcttatagtcagcaaccacaacccctttctcacagacctgtaatttttttttttttttttttttgagacggagtctcactctgtcacccaggctggagtgcagtggcgcgatctcggctcactgcaagctccgcctcccgggttcacgccattctcctgcctcagcttcccgagtaggtgggactacaggcgcctgccaccacgcccggctaattttttgtatttttagtagagacggggtttcaccgtgttagccaggatggtctcgatctcctgacctcgtgatctgcccgccttggcctcccaaagtgctgggattacaggcgtgagccactgtgcccggccacagacctgtaatctttattaaaaacaaaaaaacaaaaaaaaaacaaaaaaaaactgcattataaattctggacttggtgttttgttaatcttcctctattaaatccttacaactcttccttgagagtaggtatcactattcttcctattcttcagatgaagttcaaagatgcaggagacttgaccaaaggttagctcgcaactaggggttggggagaagcacctttgaaacaatgcagacctgccacttctctcctgggcatggtctaacacagacatgagttcaaatagttcagagggcagtgaactgggacaaacgcttggcttaactgccagcctctgctgcccgggggctgcgtgaccttcggcattcggactgcagtggcaccctctctaaagggaaggtcatcccgccaccaaccagatgatctgcaagggccctccaggccccaccatccacgtgcagcagggtccacgttctgaccacctggcaaacctggtgcgatgggggaaagctagccagggccctccttcactcacggcatggtcatttaagtagctgggcggcctgattcgatccttgtctcctcttcaaggtgcaaaatgtaccaccctgggcccgcccctgtgggcagctaggttttgcaaccgcgcccccagagtctactgcgggaaaactagggaagaagcccaggcgttcatggctcattgcgtcccgctctacctctgtggttctttgggagcgacccccgggaagcgtccaaagtggagttcccacacacgctgcgaacccacagccggttttctctgaactcgcgtccctgagtccgggaggtggaggcggagaaaagggtgcggagcgaccccacgcagggccgcccc

SEQ ID NO: 6060 - DNA, 2300 bp, Homo sapien
agtgggagtcaagacccggcggctgcacccccgacggcttggccgcatgggagcaaagccctcggtgcctcaaggcgccagtctgggcttttgagcgttgcgggaggtaacaggagagttcgccggattttaacacaatcccactctacatcttcagaacagggtggccgcaaagtcccttacccctcttacccgtctctgctcccacccgcctcaccaacccgccggagcagagctcgtaatcaaaggcactttccccgggcgcccagtcggcgtcggacttcgagggcagcgtgcgcagcgaagccgggctgaggggcgatcagcccgctggggaccctggaaacccgccgccctgcggagagtagctcgggacagttccaccgctccgcccagtcaactaaagtggaagcctgatgtcggcctgcagggccagagatgccctccggagctgggccaaacctgggtgcccctaagtggctggaggggtggctgggtggacagcgcgaaagaccccgctcagggggccccctcctggcttgggacggtagaggggtcccgcggggtggcggcggaggcaggggaggtggcggcggggcgggaggtgcggacggtgcgcgcgtcgctgcgagctggagcccctaggggcccgccacacacactcgcacccctccccctcccggccttcctcccacccgctcgccgcgaccccctccccaaccccctcccctccccccgcctccgccccattcttggaattgtgtggaaaaattctcagccaaacctcccacctctcctctccccccacccaccccctttaaaaaacccctttcctccccggcccctgcactctttgtgaatgagggcagggaacacggcccttcccccgcccaggagccacgccagaccgccgcactcagaggactgtttgttaatagtccaattagataattgccatctttcactccttttgctccgcatttcccataaaggaatgaatggggagagcggcgtggagagggcttctgccccggcaaggtgacgagaagggctggagcatgctccttgcacaaggccatgcgcttgaattgaatcattgtagcctaatcaatgctcttattggattactggctgttgcttttctcaaagatattgtagcagagacaatgaaatagctaggggaaaactttttttttttttttttgaagcagatctcacagttgagatttctcggccgtctctccctctccccctctctctcctgctggactctgagtacaaagctgccctttgaatgggctgcctcagggctgctggaggtgcaggcatgaaaaaatccaactggaactaaatgaagagaggtggcagtttaagatggctgtctgcgtcgaggtgtgttaagaaggagttgtttaggggaaaatcttggcttttttagagtgcaagggagatactttttgggaaaactttctccccccgctctgtcccccatcccccactcccagacaactgctttcttctgccgcagggtgcgcagggttttttttttctccccccacacccccccgccgcccaaccctcattcagctctatctggcgagtgtggagaaaacccctctagccagtatgtgagcaggagggtcaaaggcaaaaggaaagttaataatgcctgctaatggtactaacaattcaggatgaatcttgtcaaaagtttttctggaagtgtgggtctttgattgtgtgtttcctgaaagcaagaccaatcatttccgtttattcactggctaaacccctacttgattggggacaaggacagaaaccatccattacgatctgatatattatccaaacaatttagtgtattcatgaggtaaccgaaacgtgggggctgcgaaattacccgtaatcaattgcaacagcgagtgtgcgtccccccgggtgtcggacaactacaactcgccgtctcagaaacaggcgggagccgcagcatttcggagttgcgctgttcgctacctgatcgccaggctggggacactggacgtgctcagaggacgcgggtgctgacgaggcggcctcgccgcagctccaccaggatcctggaccagactggccgcctctcggcgagcgcgccactctcccgtcgccgctgacccgcgcgcggccgccgaagcctccccgcggggacattcattcttgccccttgcctgtcgccgggccgggcgtacgggccgcgttgtcgggggttttgtcccctttttcctcttttttttttccttctccgccccccccccttttttttt

SEQ ID NO: 6061 - DNA, 2300 bp, Homo sapien
agaaagttaatatgggtgggagggatatgggtgggaggcaatatgtgaacattgcatattaaatggcccaggattcaggaaggggacttcccacctgcttctgtggtatatgtgttaacctaccccatctctttcctcttgcttctcattgtgtgtttaaaatttattcaacaatctgtatgattcaagtatcttaactagatctttctattgtattacctccagaatagtttgcctggtagcgcaatagtttgcctggagattaatttcctatacaacatattgaaatagtgcattgtgaattggctactatgactgctgattagggtgagggttagggttaaaccagtttctgaatctagctactcccccctaccataaaaaccacttgcattcaacaattagccattgcattaagtgctaaagatacaatgatgagaaaacagccatgattcctgccctcatgaagtttagaacagaagaaagactatctggtaatcacacaaataagtaacaaataaatctaacgttttaaccagtgataaaccctctgaagagaaagtgcactgaggtcctctgagagcatatgccaggggaatttgacccattcagagagggttaattaagctaagggaaaaggcataaatgtctcaggcagaaggaattggctatgcaaaggccacgtgatgggatgatgtcatcaaccattctttcagcagacagcactgaccccgtgtgcccagccgcatgctagaggcaggaatacaggggagaaagaccagcactgcccccaagaaaagcccacgatgactgtcggacctaggaggatccttggagaacctgaaaaggtttcacattgcatggaggataagactagagccttataagataagacatcactgagagttcagttgttaatcctgggaggggtgaactcatgaatgatcactgggtgtggtggtgcatccctggctctagtcttaccctccatgcaacgtgaaaacttctgatgccccaactcaaacctaattttcaagccttcgttagctaaaatctcaccgaagtccagctttaggagaaataacagatactattccctggcttatgccaaactctttacatgcattgttttgtttttttatctttgtaacaaccatgtgagattgcactaaactgacactcagagagaaggtaagtcatgcccccgagtcattcagctaataagtgaaaagaaaaaaaaaaatcaagatccaaacccaggtcattctggccctagagctgaaactcagtgaaaaccaagctctagccaggaattgtggttaaaataaagcttcagccagctggatactccagggtgtttaggaatgtgaagtttgtgggtatatcttggtattgtggttgtgttgatgctattgtagttttggtaatgtggtcatctcttgacagtacatgctgaaatgcttgcagattaagtgtggcaaggtccaggttttacttccaaataatctgtgtgaataggggaagcagtgtgtgtgtaggttttgacagctggggaggcagagtccgtgggaaggaggggaggaaatagattgaccataaaatagatttgccttcgttatttggaggttggggacaggtgcatgggagttcactataatattctcttttctttcctatatgttggaaattttccataaaatgtttttttccaaaacaagttaagttctgggttatgttttgatggcctactccttcatctccaaatcccatagactttcacaattatatttgcccccgtaattggaagttgtatggggctgtttcaaaaatctgagtcatcaaagatgtaattgacttcctaccgccggattagcaggcaaaaatgtacccgatactttctctaccggcgctgtgttgggctctgggctgaaacccagtctctcacaggccctcggaacagccccaccagttaagatccatccctgacttccaactctgtaactagggacaagttaattgactcctcttagcccttagtgtcctcatcaattattacgtggtaataacccctcagagagtcgccgggagaattagctcggcgcggtgcatggggctagaactcagggcccagcaggtctgacaatgcaggtttccccgctcgcctgttgggtttttgaaacgccctcagcggggttttcctcctaattctggtttggaggagccatctctctccatcccgtctgccagcggggtttgcttcacacacagacgtgggcagatggcatcggggacacaggtgt

SEQ ID NO: 6062 - DNA, 2300 bp, Homo sapien
ctcactctgttgttcatcctggactacagtggtgtgatgtcagctcatttcaacctccgcctcccaggttcaagcaattcttgtgcctcagcctccaagcgtagctgggattacaggcatgcaccaccatgcctggctagtttttgtatttttagtagagacagggtttcaccatgttggccaggctggtctcaaactcctggccgcaagcaatccgctctcctcagcctcccaaaatgctgggattagaggtgcaagccactgtgcccgacccccatcttagctttttgagcaggctttctcagaccacttctggtgccaactactgttgaatcctctgggaagcagacaccaagatagagtcacaattgcaaaagcttttttgggaagacttgtaaaatgaaaatgaaggaagcagatggaacagggaaagcctctggatcataacacagactgacaagttctctctgtagaccaaagggccactctggaacaggctcaagttggaggagtcctgtattgggcagaaatgaataggcccttgggtccccaccttgcttagtcagtgggcacaggcttctccaagaagagggcttgaaaccggtggcaaaccctcagagaacaaaaggggctgtcatgaaccatgctcatcaaagctgcacagcgagtcctttctagaagagggatctgaacctgcatgcatctccacagctgccatctgaggcactttttatccccactggttgtcaaatgatcctttattgaaatattttcctttgtgcttaacaagctgagcattccactgcaccactgttgatgtcatgagggtggtgaccatcaacattgcagcccacagatggtgcagtccccgggatctttttaattgttccagagagttccctaactaaagattggagctgcatctgtcaggcaatgttgacattctcatcaaatgatattttcattgggtttaatgtttttctgtttctttctgtctcctggaggttccttgagggctttgatgatcagggcagaggcagaaggtactacctcaatctatgcctgcctgttctgaatggtttcactgtaatcctcagatccttcaaatcaccggttgccctaacgatgtcattaccaatgtgttttggagacagacacaggggtttgatcttaggggccagcacagatgtggcaccaacatcattcccggtgcatctcagactttaatctcgttggggtcaaacttaggctgtatggtggaggtaggtggtgttggatgaacctggattcaggaccaccaaagaaagttgcacattggtctactctgagctgaaaattgaaaggtggggcaccttttctcatggcagacacaggcatagctaagcaagtccaaatgcacaagcacaggcctagcccctgcttgcatcacatctgctaatgcccagctgtctggagcaagtgagatgacctaccctaaagccaagttcaaggaagtacactctgcccaccgtgaggccccagcaagggggggtatgcagcaggggagtgaagaattgggaccaataattagatccacacaggataaaggtcctttggaaaccattgagctctggccgcattagttactatggttactgttactattataggttactactattatcacctgtccagaagaccaggtaccctaagccaagttgtgtcacagacagctctcaggaaagaatcacttgactaaacgccaaagatcaggtttgggatctgcaattcaaaactgcagtttgggcatagaaaagattaaacgtagcacaaaacaacaaccacactatcctcccaaagccccttccaggcagctccagggccggcccagcggatcaatagcaatctggggtgctagggagggcgccatctgagtagttcggaagaactgaacatgatgagttgccggctgcttcctgagtccttggggaagcacacgcaccatccacttagcactggagcctggctgttctccgggcactcctaccccatcttcctggcggggcttagatgctcctgcctcttccaccagctcctcttgccctgcatgcttcagggacgatggaggtctcggggcacccccaggccaggagatgctgcccagaggccctgggaaagctcttccctggcctctgcttcctctgctttctggtgacctacgccctggtgggtgctgtggtcttctctgccattgaggacggccaggtcctggtggcagcagatgatggagagtttgagaagttcttggaggagctctgcag

SEQ ID NO: 6063 - DNA, 2300 bp, Homo sapien
atatttaaaagagagagataataattttatacataaaggtcaataaatacaatataccctatttaaatatatgattaaaaaactcattttagatgccaacttgaaaatgtgtaaggcaaacatattgttaaacattttttagggggtttcaacaaaaagtctgttataggccatagtgctctaggggtggtgacagtgatccggaggcgggaacgccgggctggcattgtccctggagccatctacatccagctggctgggctggagtttggtgtggcttccagtgttcactgctatgatgctgctatcaggtcagaatgtcagcagggatttgtctaggctttactgtctccccagcattaaccatagtgcctggcacgtagtaagagctcaacacatattcagcgcatgaatgaggggccggcacttacggagctctcactttgtgccaggcactgtgctaagagctgcctatgcattcccctggaattctcacaaccacgctgcagtaggtccagtgagtatccccattccagagatggcgaaactaagccacaaagaggatacataaccagcccaaggccaccagtcaaggaagtagcagactgggacctgggcatcctggcaggcaccctttaccataatgcctctctgtccccatgtggtccctggggtagagtctgcatccttgggttctgaaactccagagcaagcactctggggcactccctgagtgataccctcctgccatcttaaacggctctctgccatctgcttcctcctcctaagtggttttccttctgtcctccctgtttaatgtttaagttgtgcacatcctgtgacatcctggagacccatgttcctgacctacttacctattcaaccatctcttctcacacatggggtagcaatgagaagcacagggggtctctgcaagggagtagggaggtggagagagcgggggcagccacacatcacactgctgttctcagtggcctcctgctgtcaacaagctaacattaataaaacaagcccactcttctgctaagagactgtgacagggtaacatttattctaggtagcttttcaagaaaacagctcttgctcccacggtcccctcggagggcctgcagagctccagcgatgtcagagggcatctgtttgtttctcctttgcttataaaagggacctggaaatcaaaggcaggctcttagcccttagcagtgaggatgacagctctgcaccagccacacgcaggcccctggctctaggaaccacctctcacccagacgcccaggcacagcatggtggggagagagtacaggacacagggcctaggcctgctgccccgcccacagcccgccccctagccctttctctgaggccaggtgtactcacctagcctccagggtcccctgctcaggtggccccagaggcccaaacccactgctcccactttctgagacctgggaccctcacctccccaactcccaccatagggcgacactgaaaagtgtccccttcccccccccgtttccaagtcaccagcttgaggatgcccaaggctcaaaggctcctccgagtggcaccccgcatcgggctgcagaggtcggagaggggaggggatggtgggtgcaaagggtggcttcttcaggaaagggaagcctgtccctggctcccagcacctgtcacccctggcgatctcaccccgcggccatcattcccgtcctcacggcccatttcagggacactgaggctcaaagagccacgtgatttattcaaagcagctcgagccaccacttggagccacaagaaagccctggtccgtgcctcctcgccttggtccctggcccttcactcttcgtccaggctctctgacctctttccctctgcgcccctgcctcttccccaggcctgggtccccaaggcactcggccacgcgctgggtccggggaagaggcgcggccgcggccgaggcggggacagggaggcggcagcccctcctgcgcagcgacggcgcgggcgggcggaggccggggcgccccagccccccgcccccgctccctccggccgtgacgtcagagccggacggggtaaactgagcggcggcggcggggcgctggggcggagactgcgacccggagccgcccggactgacggagcccactgcggtgcgggcgttggcgcgggcacggaggacccgggcaggcatcgcaagcgaccccgaggtaacacggccccggttccctgctcgcagggcgcggtgccggaggggagcgggcccgggggaggcagggagg

SEQ ID NO: 6064 - DNA, 2300 bp, Homo sapien
aggccaccagtcaaggaagtagcagactgggacctgggcatcctggcaggcaccctttaccataatgcctctctgtccccatgtggtccctggggtagagtctgcatccttgggttctgaaactccagagcaagcactctggggcactccctgagtgataccctcctgccatcttaaacggctctctgccatctgcttcctcctcctaagtggttttccttctgtcctccctgtttaatgtttaagttgtgcacatcctgtgacatcctggagacccatgttcctgacctacttacctattcaaccatctcttctcacacatggggtagcaatgagaagcacagggggtctctgcaagggagtagggaggtggagagagcgggggcagccacacatcacactgctgttctcagtggcctcctgctgtcaacaagctaacattaataaaacaagcccactcttctgctaagagactgtgacagggtaacatttattctaggtagcttttcaagaaaacagctcttgctcccacggtcccctcggagggcctgcagagctccagcgatgtcagagggcatctgtttgtttctcctttgcttataaaagggacctggaaatcaaaggcaggctcttagcccttagcagtgaggatgacagctctgcaccagccacacgcaggcccctggctctaggaaccacctctcacccagacgcccaggcacagcatggtggggagagagtacaggacacagggcctaggcctgctgccccgcccacagcccgccccctagccctttctctgaggccaggtgtactcacctagcctccagggtcccctgctcaggtggccccagaggcccaaacccactgctcccactttctgagacctgggaccctcacctccccaactcccaccatagggcgacactgaaaagtgtccccttcccccccccgtttccaagtcaccagcttgaggatgcccaaggctcaaaggctcctccgagtggcaccccgcatcgggctgcagaggtcggagaggggaggggatggtgggtgcaaagggtggcttcttcaggaaagggaagcctgtccctggctcccagcacctgtcacccctggcgatctcaccccgcggccatcattcccgtcctcacggcccatttcagggacactgaggctcaaagagccacgtgatttattcaaagcagctcgagccaccacttggagccacaagaaagccctggtccgtgcctcctcgccttggtccctggcccttcactcttcgtccaggctctctgacctctttccctctgcgcccctgcctcttccccaggcctgggtccccaaggcactcggccacgcgctgggtccggggaagaggcgcggccgcggccgaggcggggacagggaggcggcagcccctcctgcgcagcgacggcgcgggcgggcggaggccggggcgccccagccccccgcccccgctccctccggccgtgacgtcagagccggacggggtaaactgagcggcggcggcggggcgctggggcggagactgcgacccggagccgcccggactgacggagcccactgcggtgcgggcgttggcgcgggcacggaggacccgggcaggcatcgcaagcgaccccgaggtaacacggccccggttccctgctcgcagggcgcggtgccggaggggagcgggcccgggggaggcagggaggcagggaggcccccagagctacgcgggcggggctgcggggaccccggggcagccggggcgcagggcgcagggcgcaaggtgcacggggccgagcgtgcagtttgggaggtggcacagttgggggcggcggggatcagggcagcgtcctgggggttctaggttgggtctccagattgggtccccgacggcgctcgcgggcgctctttccagggagcgcgggctctcgtggggacgcgctcgaggcaggtgagccgaggctggggcgcccgggggtgtccccggatgccggtgcgcgcggctccctgacccgcccttccgcggcctgggggacgggagaatggggggtccacggccgccttgggtcctcaccgcgcaccgcgcccgcagcggagccccggagccatggccctgagcgagctggcgctggtccgctggctgcaggagagccgccgctcgcggaagctcatcctgttcatcgtgttcctggcgctgctgctggacaacatgctgctcactgtcgtgggtacgtgcggacagggcacccctgccccggcaccccagccccagcgccccttccccg

SEQ ID NO: 6065 - DNA, 2300 bp, Homo sapien
gcaaagaataatttagcaaataccctacataaagcctattttagaaataccttattagaaatccaagaaaagtttggagcaaactcactcagaccagtgccctgcttagctcatttatacaataaaagagctcataggataaatgaggtaccttgtggttgtgtttgttctttgaaaataatgaagattcctcatgagaatcctataagccaagatagctgaggtataagtaaattagatattaggcttaaacaaaaattaggggatcatcttacaagagatgacagagtaaatactaaaaattactttaccacaccagaaagagacagtgcaatttgtgatttatttcgggtccattgcagtattccggtttggtgatcatactttgcttaactttcaccaagaaagaaatttaaggagttttcagattttaaaaagtttcaggccatgatattttagtaataaactataaaaatatctataaatatctgtggaatgtatagtgcttacaaataaaattcacaataaattaatctgacatatattaaagcacatgtgaatcattatgtgcctggttagcgccacagaacacataaatgtcacagtagcacacattgtttgaaagagagagatcctaagttttaccctcccagaattggagttttcttgccactgaccacccagttgctttacccctagttccagacacaaaatagattattgtttttttttttttttttttttttttgagagagtctagctctgtcgcccagactggagtgcagtggcgcagtctcagctcactgcaacctccacctcctggatcagttctcctgcctcagcctcctgagtagctgggactacaggcgtgcaccactgcacccagctaattgttgtatctttagtagagacagggtttcaccatgttggccaggctggtctcgaactcctggtctcaggtgatccacccacctcggccccacaaagtgcttgaattgtgggcatgagccaccgcgcctggcctcagacaccaaatagattattaataaaagttttgttctctttccctctctcttcctattttagctagtctgcctgtgccttctgtatcttctcttcatcatttatccacactgactcacttgattcttcaaataggttgttctattccaactctatccttccaatttggaatgtttgaggccactggggaagagaaggtaccatgaaaatgggctctggaacctctgaatctgggaattctagggtagaggaaaaggcagtaggggctagtacaaacacccacctattctttcattctgaataaaaggatgtaaggagttctgatttttagaaacaagcgtttatgtacattttctgatgctaaccctactctccatcttccttcaacctaccacgctctgcattcaggtacttgacagcaattgcctttcataagagaccaagtatttccctttgcaattagagacacgaggttgaaaatccaaacaatattggtatataaatatgtcactatcagaaaggaaagatgaatatgaattttttcctcttttgaaatggagaggaaattataaaagaagcttttgcccttgtttaaagtacatgggcagaagagagaacaatcatttgttcagtataagtaaaagagtagaagtacttcataccttttgtagcccagtatgcaggtaccagagggaactgtggttaaaggcattaggagatgacatgctacttcagatctacctaaaaagcaagaagtgatgcatccctgaaaagcattcagctaacagttggggagaagctgtaagtgatatattggagttcttaatcagaacagtatattctttctgagtgttacatggtattaactggcaaccgttataagaagggctttagatagggtcagccatatttaaaattgtgaagcctgaagaattcacctcctagattttggactttttctttctgtttgaattgagtggtattttttcttctttttagaaaagaaagctattgttttctcatcaaagtgtaatccgattctaaaaggtaaatcattgataccagcctcctatcaatttttaaacatgcccatacaattaaagagatatttgaggagatgatacctatattctaagaactactgccagggtaagaaacaagatatgcaaacaaaatgtctaacatatgtagcactttagaatctatgaaatactcttcccatatacaaagagccaaagtcttctgactataagatctctacttgtttgattaaatcc

SEQ ID NO: 6066 - DNA, 2300 bp, Homo sapien
aggactcattcccatgaagaccacaaactttcattgttgaggagggaggtgggtgaagaatattttgcaactcgggatggatcaatatacagtttgagggttttatatttcaggaatgtgaataacttctttcatgccaccctacttccagcttctgtaacatttataatatgcaatgtgcatgaatgttatgaataggtttacggtggaaatcatagaagggtctacatttctcatttgagttgaaacagtgtagatcccagagagcagcccagaagcagaggccaggaaccaaaggggaccagagaacagaagttgccaagatctccgaaaaatctcggccatggtttgagcatggttcctcagcagacacctatcttatgtcttcatagtaatgaaagccattctggtttcgtatctgggcatgattcggtaaggcatgataagcctggttccgaagttctgtacctgtcccagctgggtcaggtctatttttgtggtagaatcacctacagttaagagaatccttggcttggaggttttcttcttttttttttgagacagggtcttgcactgtcgcccaggctggggtgcaatggcgtgatcttggctcactgcaacccccgcctaccgggttcaagtgattctcctgcctcagcctcctgagtagctgggactacaggcgcgcaccaccacgaccggttaatttttgtatttttagtatagacgggtttcaccatgttggccaggctggtctcgatctcttgacctcgtgatctgcccgcctcggcctcccaaagtgctgggattacaggcgtgagccaccacgcccggccggcttgaaggttttcaagggctagagaggagccctgccctggctccttaggtacagccagaatcggcctttaaggtatgggatatctgactcctgcaggactggaactccacgtgcttggagggataagcatttatgatgtaaccactaagtagtcagagggcaggaggagtaacgctgttgctgggcaacctggcttagcttcgtggctttggttaaggtgctactctatgcaaaattccttgccgtcttccctaatccgcctccccaattctcccttcctgaacattagggaacccactggcctgcttacaactgaagcagtttctgtgttagggcagagagtagtgatcaagacattagggtttagtgttagataaaccaggctccactctgcggccccacgcaacctccccacgctctctgcaccagtgttggcatctgtcaagtgggtgggggctaacagtgaataactgcctcatagatggactaccggcttaaccagagactgacagcgggtcgcatattaatcttccaatcacttggcaaactcgtttcactatgcatctctcctcctggctgttctttcaacttcctcctccctgaaatttcgaagatccacctcggtgggaaagtcattccgcgtggcgcgccctttccctgcgtccctccttcccagggcccaccctccgcggacgcagagcgtctgccggggggacggcaggtccgcgatggctgcctctgaggcagtcggtcccctctcgccgtgggcttgggaagcgtccgaaaggcccgctcggatcgtctgcggtgctgcccgcagggaaagcgccgctgccagccgggctgtcacgggtgcgagtggaagaagcacaccgcaggatgagcgacgccgctgcagaggtaaccgcggggactgcggccagagacgggggatgggcgcagccgaggataacgggatggccggcatccggaacgcgtcaggcccgctccgccggaccgccttatcctccagcccgcgtccccagccgtcctcccagatcccgaccgcagctccagaagtgacggccacgtgggtggcggcgcgcgccgcggggattggaatgttggcgtggggggacgaggttggaagggccgcagagaagtaaaggaggacccgcgtccgcgtgcccgggcgccgactgctgggcgacgccgccgggagcgagcacgcctctgacgtcacgcgctgctcgtccaatgagtggaggcctgagggaggcgccggtcccggccccgctgccgccgccgccacaccggcccttcgggagcgtctgaggaggcgcgggccgctgcgggctcgggcgccgcagcgcgccggcccgagcccctggacgaggcccacggagccgctcgccccgacccagccgcccgatgtcctcaaaatggaggcagcgggggcggcggcgtgaagaaagcggcgctg

SEQ ID NO: 6067 - DNA, 2300 bp, Homo sapien
acagtctgcctaagctgagtgtttgtttccagcctcaaaaacctgagggcggacctctagctccaccctaagcttactggctgggcacagccaaaagacctcccccctctgccatgtcttcaggctccctgctggcctagctggggttagaggagaggcctgtaacctcacagcctaattgagagagggatttccaaactgtagacaatattttgggggacagtggtccaggcccaagggaggtgcatctttaagtgcacccctaccccaagggctggatccaaagcccagaatctttgggcctggaaaaaggggaggaggagaaagcaaagccacctggaactgacagagggacaatactgggctaggaccccagcccagaacttcgaagcctaagggaaaggcaggtgtctcccactgtgagggcaaagctgaggcgcacacctgtctcatctgtgaagatgtgtatgtgtgttccctgggaaggtgtggggtgggggcaacaaagatgatctctgccagttcctcacgaatctgtctggtgccctgacaaccccggaaaacactgctcccaactcctctcttgcctggtttcccaaaagaggtttttggacacttgccccaacacaacattatatctggaataaaggagtaattgacacaaacataaatatacaccagatgaaaccaagggaggaagcaggtagctcgtcctgagacctgtcccctcaactatgcatctggtggcagtgcagcctggctcacggtggacttcactcttctcctcccattgccatcggcttcccaggtttcacggcaacctagtcaccaaacacaggcaattctgcgttcttaggagaaatgacaggggcctgggagtaatagttttaaacgacgctagaatttttttttatcattaattgtaaacgtgcaaaatacctgctggtacttcactttagaagaatgtaattggcaaaaggaaaaaaaggaaaaaagaggcggctgatgaatagataatagatctttaaccaccaataaacagagagcagcgccagcagcctggggatgtgatcataattatgccgccgcgcgagccaatggggacgagggaactcggtcctaaaatcatcccaaaaccgaaggcgagctcgaaaatgcggacacggcccgggaccggagatgcgatccgtagtcgttagttgcactgggtttgcacagcaaccaccacccccccaccaaccccgggacaacagatggcataataataataatagaaataataataataaaataatatcatctataataataataacattgaccacactgacaaaaataattacgacggaaccttaatagtacagtagcaccatatcgggctctcccctgaccttggactgccggtcccagatattccagaaggaattgttttggggaaggaggtgagcaccctcccagacagaaaacgctagagaccgtggggcgagagagggagagagttggaagcccactgctccggcggggtcggcagctcccggtctcaactcgcaaacgaacgagccgggtcaagaatcgcgaacgcaccgaccctgggacctcgaggctaagcgtggttgatggggtgggaggaccccgtacccctcactccaggatccctcctggcctaggaaaccgctgggagttttgctaagtgtggggattggtataaccgaacggcgcctttagcccgggaaccagcccctgcccgcttaccctcgcggtgctcttggggcgatcccagttctcccgacgcggggccgcgtaaggcagcagcggcggagcgctaggctagaggaatctgtctgtccttctgtcctaccagcttgggcgaggcaggctcgggattcagggggccgcagcggaggcggcgccggccagggactctgcagggaccggggtgccccggagggagtggtgctggtggaggaggaggcggtggctgagggggagtaggtggggaaagaggaggaggaagaagaggaggaggaggaagaagaggaggaggaggagaagaagaaactggaggaagaggaggaggcgaaggaggaggagaagccgcagcgggcgccgcaggagcgagtgagctgggagcgaggggcgaaggcgcggagaagcccggccgcccggtgggcggcagaaggctcagccgaggcggcggcgccgactccgttccactctcggcccggatccaggcctccgggttcccaggcgctcacctccctctgacgcactttaaagagtctccccccttccacctcagg

SEQ ID NO: 6068 - DNA, 2300 bp, Homo sapien
ccaaaagaggtttttggacacttgccccaacacaacattatatctggaataaaggagtaattgacacaaacataaatatacaccagatgaaaccaagggaggaagcaggtagctcgtcctgagacctgtcccctcaactatgcatctggtggcagtgcagcctggctcacggtggacttcactcttctcctcccattgccatcggcttcccaggtttcacggcaacctagtcaccaaacacaggcaattctgcgttcttaggagaaatgacaggggcctgggagtaatagttttaaacgacgctagaatttttttttatcattaattgtaaacgtgcaaaatacctgctggtacttcactttagaagaatgtaattggcaaaaggaaaaaaaggaaaaaagaggcggctgatgaatagataatagatctttaaccaccaataaacagagagcagcgccagcagcctggggatgtgatcataattatgccgccgcgcgagccaatggggacgagggaactcggtcctaaaatcatcccaaaaccgaaggcgagctcgaaaatgcggacacggcccgggaccggagatgcgatccgtagtcgttagttgcactgggtttgcacagcaaccaccacccccccaccaaccccgggacaacagatggcataataataataatagaaataataataataaaataatatcatctataataataataacattgaccacactgacaaaaataattacgacggaaccttaatagtacagtagcaccatatcgggctctcccctgaccttggactgccggtcccagatattccagaaggaattgttttggggaaggaggtgagcaccctcccagacagaaaacgctagagaccgtggggcgagagagggagagagttggaagcccactgctccggcggggtcggcagctcccggtctcaactcgcaaacgaacgagccgggtcaagaatcgcgaacgcaccgaccctgggacctcgaggctaagcgtggttgatggggtgggaggaccccgtacccctcactccaggatccctcctggcctaggaaaccgctgggagttttgctaagtgtggggattggtataaccgaacggcgcctttagcccgggaaccagcccctgcccgcttaccctcgcggtgctcttggggcgatcccagttctcccgacgcggggccgcgtaaggcagcagcggcggagcgctaggctagaggaatctgtctgtccttctgtcctaccagcttgggcgaggcaggctcgggattcagggggccgcagcggaggcggcgccggccagggactctgcagggaccggggtgccccggagggagtggtgctggtggaggaggaggcggtggctgagggggagtaggtggggaaagaggaggaggaagaagaggaggaggaggaagaagaggaggaggaggagaagaagaaactggaggaagaggaggaggcgaaggaggaggagaagccgcagcgggcgccgcaggagcgagtgagctgggagcgaggggcgaaggcgcggagaagcccggccgcccggtgggcggcagaaggctcagccgaggcggcggcgccgactccgttccactctcggcccggatccaggcctccgggttcccaggcgctcacctccctctgacgcactttaaagagtctccccccttccacctcagggcgagtaatagcgaccaatcatcaagccatttaccaggcttcggaggaagctgtttatgtgatccccgcactaattaggctcatgaactaacaaatcgtttgcacaacttgtgaagaagcgaacacttccatggattgtccttggacttagggcgccctgcccgccttttgcagaggagaaaaaacttttttttttttttgcctcccccgagaactttccccccttctcctccctgcctctaactccgatccccccacgccatctcgccaaaaaaaaaaaaaaaaaaaaaaaagaaaaaaaaagaaaaaaaaagaaaaaaaattaccccaatccacgcctgcaaattcttctggaaggattttcccccctctcttcaggttgggcgcgtttggtgcaagattctcgggatcctcggctttgcctctccctctccctcccccctcctttcctttttcctttcctttcctttctttcttcctttccttccccccacccccacccccaccccaaacaaacgagtccccaattctcgtccgtcctcgccgcgggcagcgggcggcggaggcagcgtgcggcggtcgccaggagctggga

SEQ ID NO: 6069 - DNA, 2300 bp, Homo sapien
ttaaaatatggggaggggggtgacatctacccgattctaggctccggcaggaacgcaatgggttaatgaatggacaagccgcggagtattgatcggctgccgccggaggtaggtcttttactgactccaatccgtaaactaattactcctttttctgaagttttaactctcctcctcccaccccgtacccagagaaaaacaaacaaataaaaaatatcgcaagaaatgaaaacacacgaacagatatttccctctaagacagtttcctgaccaggttctttttttttttttttaaagaaagaaagaaaaacaaaaaccagaccgaacctgccttcccgctgtggctgctcggcgccccaattaagcaggtcgcggcgagagcgccaagccctggagctttcctcccgcacgggttcccgcccctccccaggcctccgaaaagcaggaaagaaaaaacaaatcccatacttttctcccggggcgcgaggatcctctcgcctccagaagagggtggaagactaagaagccgcgggtctggactgaaggggcgcaaagtgggtggtgaacagggtcgaacgcagtcgaaagcaagcctggcggccgagtcctgtccgcgcccctcggagccaggacggttgggggcattgccgagggtaccaggagcctggggatcccgcgggctctgggctccgcggcgccgggcacgcacagcccagcctgctctgattcgagcgcactgggggacaacttctccgttcgcaccccttcccaaagggtcaagcggcccgcaggccatcactccaaaccagtcgtagcttcggagactggggatcgacaccacgcccggccccgcgccgcctagtttcccaacagggcgcgctggcccgcgagccggaggaacctccgcccaggccttgccaagcgcccacccggagcaggccgggggcagtgaaggatgcggcgggagcggcgcgctgcagttccgcgacgtggcacgtaccttggaagcgatgacccagatatcggtagcggtggatgagccaggggtagaaggtggacggatcccgctgctgcgaggcgaatagggggtgtggcgagtgcgaggagggtagggggtgggcggccagggcgtgcggcggcggcaccgggtgcactggcacggcggggttgggcgggtgcgagaccgcctcggcgaacaccaagtccgggttggagtagacgcccctaccggcggcggcggcggcggccgagtggaagccgttgaggaacggatttatggggctggagttagcgtagctgagtgccgcgggacggatggggtcctcggagcgcgaggcgggcaggggactgtccttggccaccagcgactcgatggtgaagcagcgcttgggcgccggctggaacatgctgcgccgaggagcgggcgccctgggctcccagctcctggcgaccgccgcacgctgcctccgccgcccgctgcccgcggcgaggacggacgagaattggggactcgtttgtttggggtgggggtgggggtggggggaaggaaaggaagaaagaaaggaaaggaaaggaaaaaggaaaggaggggggagggagagggagaggcaaagccgaggatcccgagaatcttgcaccaaacgcgcccaacctgaagagaggggggaaaatccttccagaagaatttgcaggcgtggattggggtaattttttttctttttttttctttttttttcttttttttttttttttttttttttggcgagatggcgtggggggatcggagttagaggcagggaggagaaggggggaaagttctcgggggaggcaaaaaaaaaaaaaagttttttctcctctgcaaaaggcgggcagggcgccctaagtccaaggacaatccatggaagtgttcgcttcttcacaagttgtgcaaacgatttgttagttcatgagcctaattagtgcggggatcacataaacagcttcctccgaagcctggtaaatggcttgatgattggtcgctattactcgccctgaggtggaaggggggagactctttaaagtgcgtcagagggaggtgagcgcctgggaacccggaggcctggatccgggccgagagtggaacggagtcggcgccgccgcctcggctgagccttctgccgcccaccgggcggccgggcttctccgcgccttcgcccctcgctcccagctcactcgctcctgcggcgcccgctgcggcttctcctcctccttcgcctcctcctcttcctccagtttcttcttctcctcctcctcctcttctt

SEQ ID NO: 6070 - DNA, 2300 bp, Homo sapien
ggagcaatgaggtgggagtcggctgccatcccacggccccctaggaaagctgagtcgtgggtcctcatttagccaccagacagtaacacagtccaatcttcacagcagtggtgtacaggtaagggagatggcagtgactgcacctctgataccctccccccacaactcctattctatctggataagagtaccccacagcccagtgccagtccctggacccctgggatccattccattccctcctttgaggccgcaggccggtccgtcttgctctcccggaaagccacagtcgcccaaagtgctccatgaaaaaagctgagcgggaacaaggctgaatttaatttgctttgagtttgctaattgagggggaggacggttcatttctccccggcgctggcccaaggcgcgcgtcggtgcgctcggggcttgacacgcacacaaagactccaggcagcgtgggcagcgaggcggacaaagaccaccgccgcctcggctgtccaggagaaatcagccgggccgcgccttgtgccgggctccgcacaaacccgccaggccctcctcggttttggggtggggaacatgttttaaaacaaaagcctcgacctttctgagctgcccaggaaaagtgttacaacttagtctgcccaaaaaaacgttactgtttgctgggaactttgaccccgccctgcggctccgtgtacagtagcgcctagtgtagtcctaaaccccctccccaccctgggataaacccaagccaggcccgcccagggaccctgctgtgcagaaggcctgtgccctgaggcagaccctctctgcagcctcccaactttacttctctgatatagggtacacacaggacgcttgccctctaccttcccatcgcccatctccttcagggaagtcactggagccgacggtgtgagccgtgggctcacagtcgctcagaactcatctttaacccacatcctgtccttaccagcctccagctccaaacacccagaaaccccactgtgctctccctcttcctggaccccagcaggggtcttcacactctcatcaaaagtctcaccagaaatgcagggatgtcttagccaggacatgcccaactggacagagaaacaactcggcgcgtttccccagaacctggggcagattggcacttacagcccctttctggagcccaacaaagccagcaccttgagacatacatcccgagcccaggcgtggaaccagctaccaggacctgtgcggaaggccctcacagagctccgtgctcatgggtgtgcttgggagccagctttggggagggggcgcacgcctagatgggttcctcgcgcccgggccgcagtcacctgagtttccgtgaggctgaggctgtgtgccagctgcttcctttcggcgcccaccacgtagtgattcttctcaaaggcgtgttccagccttagaagctgggacggggagaaggcggttcggatccgcttgggctttcgggccagcgcgttgtgcaaaaggaaactctcggggctagtgtcgttccctgcggggagcacagcagaaatcccattagggggggctgctctgaccggagccgcgcacttctcccgagccgggctggcccggcaccgtgctcagggccttcgcatagccgcgccgctcgacctgcgggggccggtggtcctcccaagggctcacgaagggaacgcctgctcagctgcccggcccggaacgccgggtctccaccggtgcggcacccaaccagccgctgtcgcagaggagccagtccccaggctcctgacctcggccggctccgcagccgccctggcgccgcgggcctcgccacctcctcgccgggcgctggaggcaggggagggagccgcagagcctggccaggggattggcgcccacaacccgaagaaactactttctcttctttctaacctctcggggaactttgacccacggtggaaaggcggcgggctgctctccagagttttcatggagatttatttttaaattatttgttttattgcccctccggaaaagtatagaggcggggcgagtcgttgaagcccgatcgggacagaaatctggccggcgggtgtgcttggctacagccgctgctgcctctcgcgaactgggctccggggctcccggctcccgagaactagaagagaaacgcgagcgaagggatcgaaacccggggggttaccgacttgcagacaccgccaggacagtctgtaacgcaggaagatcccagcggctccgggtctggtgaggggaccataagcatgactgatagc

SEQ ID NO: 6071 - DNA, 2300 bp, Homo sapien
tggaaaaaaaagcttattgagtatttgcaaatctttaattgccctgtatttgagttgtttatgtgggctgttacgggttttaaaagtgcctgtggcattttgacacatccaggctttgttttcagttactttattattattggctgtttctagcaaaattagagctgttttatgatgtatgaaatgattgcaagtatgtaaaaaaaaatagttgtttttcattttatgactttctcttcttcatatttatgagatgccagatatgaggacagaacatttgtggattcctaggaagttattctttttgcatcacaaaccatccgtgtggtaaatgtaaaacatttgcagtaaaggggtagttctagttaatcttataaaaaagaagaattgaatataaatagacccaagaagagtgtgcagttcacacttttggcaagcagctttatcttgagtggaatttgggaggatattgccaaggtagtgttgtctttacgtaacagtatagttctatttttcctcccagtatcaaccctcagctatctgggacattttaaatttctcacattaacatcctaaccgaatgcacttttggagctatgggctcacattattaagacacgtgctgtgaatttttttcaggagtgctaaatagacctatttacagtttcctggactcttgtggccagtgtttgtgagaatgctgaacaaggttaagggtaaaatacatagccatggaactgcattttcttcttggtgagtgaactggctcacttgtgattgctggtacctaggaaccatattgttaccctctggttgaataatgtatattattaaaactggagaattttctttatgcccaaaattttaaaatgtactaaggcacactttttttagaagttagactttttattccttagtgttaagtaaagtccgcctgaagaaagcactttggaaaccacaaaaaataccacattttgatcctgtccttggaataggtcccatagttttacataaaactgatagaggaagttaggcattatcttgggttacttcagcaaagagcagggctctttgaaacacttttccccgaagttactaatttgcagtctcttacatgcccctatttctttgaagcatttcctgttcttgtagggaggggtagttgttccctgtgctgcagcattttcttacgtaagtcttgtcttctgtgggcatggcattgttcactaatagcttagtctcactttttttgcccactaccatgaagagtttgatagcagggtctgcatttcattcctctttttgcccttagtctccagcgtgatgcttggtaggtagcaggtattagatattttgaataaacgcacacagtatagcagaccagtttcttaatgcacacagtgtagcaaaccagtttcctaatgcacacagtatagcagtttcctgaaatgctactctcattccgttagcctcctacttccagccctgcttgcgtgggctgtgaagatctttctaatagactgaaaacagatccataaagccgtatgtatgcatttttatgtacaactaaacattgttaaaaatctaagttttaaaggattactaaaatttaatattcaatctaaatagcacatttctggagactattaagaactgtgtattagggtaggttgtcagctgtaataaccacggtatcagtggcttatcacagcaaaagtttattgctcactcttgtcacaaaggagttcactggaatggtgataggaaaagtgagtgctttgctctatgcattcatccagctctgcacagtctctcaggaagcaggcttcttccttcttgtgatgccaccatttaacacatggcctccaagatcagtgcagcgcaggaggagagagaggatcaaaggagggtcatttctgtgtgccaggcctagtgcagtatgcattacttccacatatgtcccattggccagagctcacccgtgccccagcctcactgcaacctgtgaagaactgtgacttagctgtatacgcagaaggaagctgaattgggtttagtgagcttacaatattgtgtgtgccattgatgcctaatcagcttgctactaagaagtcgggatgctgtccaatgctggcatgctgcaaaactcctatgacacatatacagtaagtagtgttggagttcttgtaatcttcaggagaatgttttctcagtttattactggtactaagttgtttgtattttataattgccactagtcttgttttttaattgtaagtcacaggttgtttagcatcatc

SEQ ID NO: 6072 - DNA, 2300 bp, Homo sapien
aacaagagagagtcgttttaaaatgtaaagaattaacataaacttcaagaaaaatatcattgtaagaaagttttttaaagagtaaataaattcaattataactgaacaaaacaccaacactattttggaaatggaaagtcctcttagaagttcaaccagtatttttctctcactaatttcattaatataatgtccttttaagtttatggaaggggtgagtatacttaactctaaaaacatattttttttcaatttaagacacaatatcctagtgttaatttatattatgattttttaaattaaaatgtatctaactcaagctcaaaagtcatactgaaaagaccactgaagatgttatcaaatcatttcatcacaaaaatttatcattctctccatcctacagcatttaatatggtctaaacacaatagctttggaaaatcaattctgaatacaataactctgatgtaattgcaaattcaaaggaaaatgtaagtgcattcgaagttgaggatgtctgtacatacttttaaaactttttttttttctaacaggtatagactcccatcaaggcacactgaccctgaaaaatggctgagctaaaataaaagctgtgtttataacgctgaaacgaaatactgagttctaaatctggtgatttatcttttgacagctacaaagtgcgacacatcaacattacattgccagatttaatttctcatcttccatttcattgataattgtaaggtttaaaatccataacaatttatatgaagttctagttggtcaatactgtgatccagtcctcatactgaaacaatgttaacttacttaaaatccaccacaaaatattcaattatttgacagatgtttaacagaaagaataagggatcattaatgattccatttaaaaaatatttcatcacgagtgctacttttacttcagattcatgcaaatatggtgcttaaaactggatcatatttcaatccaaaaaccaacgcccgaagtatacggataatttccaagaacagaaaaaccataaataagatataaactcccccaaattcaaaataaattacataacttactctgttttccttctttgtttgtcctcaaagatgtcattgagattgattgccacctgccctaaaaatttatccagacccaccagggacctgtgcataactataaggaaaagaatgtatttctctggacttccctgaattagcaatccaggtagctcgaaagaggcctcctccttccaaactggctcaagggttttctcagctacagaggtggagtacttttccttgcccagctgaattatagtgtatgtgtcattggtaccacttttgccttttggcttcagatctttggcttggagcactgtgacctgcacgtgggttggaaaccacttttgggcttgctcggacagcatcatcctgtcctgtttctctgcccccgagttccctagcacaggcagtgcccctcccggagggagagcctaattccttaatcactgcatcctaaggacacttaacggaaacaggcaggctcagggctccccgacttccctatggctgatgtcaaaacgcctcgcgggggcagcccaggggcacggccgctccgggggtcccctttcgtctggagaaacacagaggcccaccatcacctggccgcgccgtgcaggcctctgcgcggacccccgcccctgtctccaccttccccaggcctgcggggcacgtgaggcctggccacacggacccgggcggagggctgcgggggtgaagggagcccccgccccaattctgcacccctggcctcccgcctgcctccttgcggccgagcagcctccgctgcctccgcgcctcccgcccgcccggcgttcgtccgcaggctcggcccggctcctcctcccgaccccggtaatacgaaccgccggcggctaacgcggcctcgctccctctcgcaaacctctccctcctcctcctccccctcgcctcagctcctcctctcgggcgggagcgggtagccaggggtggagtgggggagggcggggaacgcggccgccccggcgccggcgggacgtggggcgggcagcgggctgcagggctgcgggcgcttggttcggcctggcccggccggcggctcctaacaccgggcgggcggctgcggcggcacttccgggttggccttctccatgttggtctcgggaacgtgaaggggcggggcctcgaggtcaggggtcagcacctccctggttgccgtggcgactggaggcgcgcgacgcgggcgcaatgg

SEQ ID NO: 6073 - DNA, 2300 bp, Homo sapien
ggcttaaaaaattttaagtcataatttctgatttcaccagtaaaactaaacaattttggctctagccagctgttgggaaaactcaaaagaaatttaggtgctacagaaagagaggttagtaattccaattgttcagctcttgcctttagagtattctctgagttgtgttggagtatgttattgagttgctgtgaactactgctgccaacttctaccctagagatggctatatttcagagatgagtgaaattatatttgtaaacaagtttataatcattaataaagcttaccaatttaagctcttcagaaatacacatccactattataattttctattgtttaattacaacctttaatagagacatgaagacttttaaaatgtataagaactctaaacttaattaaatttgatttcatgatgtttatttggtttttgtaagtttcaggtgtcaaattatttctccttagagatcctggtgaaattccaccattgactgttccaacgtactgtttaaaaatccctaagaatatttttctttaaagttgacaactgtgcactctgggatccagatgctatattcgcagtacgatgattttgttctgttttccacacatggccttttcatacactgtctcccagggatgaaaaattctgccttgaatgagaagttttaaaccttgcttgaaaataataaacacgatactttacatgtttatggccatttaagttaaaaaaacgtgcatttacatgtatcatattgttttactctcaaaattagtcttgtaaagggaaaaaaggcattaagtaattcagtaaattgtctgctgcatgctagccactatgaagggactgcatgatagacaaggcagtcccaaaacttagaatttccttgggaaggtaagacacgaacagaattaacagcaatggggtggtacataagcgtctcttccaattgagaaatagaggggcaaaaggagatttatgtgccgcattgtgctaggaaaggcacatgtattatcccctgaaactcgaaacccgtgtttggggcatggtctccacatgatttgcacagtccaccacagtgtgagtccccacgggggtccttttgacgtcgagcccatagagtcgtgatggagtcttagacatgaggtagaactggcttttttactcgtgaaaacactgaggctcatggaggtgaaatgactcggccaaggtcacacacactgatagcggcagaggcgcggccggaaccaggtcttctgatgccagcccagtgcctccctacatctctactccctgtggaaactatttgcttccctatcgcccttcgtctgggtgggggatgtcattttcagtcaatttacggacttttcaaaaagagaagggtggataggagattggagaaaagtttcctttcggtcagtgaagaggcctgattcgttccaacaccatttatggacctgctcctgccaggcactgggcatccaggacacagcgaacacagatcccctgccctcaaagacgccctagttaggggcgtctccgggtctttgatgacctcctctcacgagcggtccccagccctccccagggctcacctgccggcctctgcaggtacccacgtccctaggacccgccactgggccaggcccaagcagcatcaagccccgggtccccgccattgcgcccgcgtcgcgcgcctccagtcgccacggcaaccagggaggtgctgacccctgacctcgaggccccgccccttcacgttcccgagaccaacatggagaaggccaacccggaagtgccgccgcagccgcccgcccggtgttaggagccgccggccgggccaggccgaaccaagcgcccgcagccctgcagcccgctgcccgccccacgtcccgccggcgccggggcggccgcgttccccgccctcccccactccacccctggctacccgctcccgcccgagaggaggagctgaggcgagggggaggaggaggagggagaggtttgcgagagggagcgaggccgcgttagccgccggcggttcgtattaccggggtcgggaggaggagccgggccgagcctgcggacgaacgccgggcgggcgggaggcgcggaggcagcggaggctgctcggccgcaaggaggcaggcgggaggccaggggtgcagaattggggcgggggctcccttcacccccgcagccctccgcccgggtccgtgtggccaggcctcacgtgccccgcaggcctggggaaggtggagacaggggcgggggtccgcgcagaggcctgcacgg

SEQ ID NO: 6074 - DNA, 2300 bp, Homo sapien
tctgctatctctttccccattctggtaacatttccaccatcagcaattgttatgagctgaatgtttgtgcacccctaaaattcctatcttaaagccataacccacagtgtggctgtgtttggagatgtggcctctaaggcagtaattaaggttaaataaggtcagaagggtagaaccctgatccaacaggattagtgtccttttaagtacagagaagagacactggagagctccccaaactgtgcatataaagaaaaggtgatgggagcacgacagggcaagggtggctgcctaccacgcaagagaagaggcctcaaaaaaaaaaaaaaaaaaaacctactttgctggcatcttgatcttggacttcccagcatctagaactgtgagaaataaattcctgttgcctaagctaccttgtctgtagtattttgctatccccagatgaagagcaattaagaagcctaatgcagttacaacagcactctcaggcacaccttcttgttacctgtttaactttttaaagatttggattcaaggaaaatcctactgagaagctgaacagatttggccaaaatagttttacacagatccttaactcattcagccttgcttctactctagaatcagagaatgtgaacaggaagagggacctcggcgatccaaacttgctgattcaggttttactatgattctggggttatagaaaactgctctctaaacttggcgcatcttctggaagatgttggaggtgaggtggtttagtggatagttaataggcttaaccatctgttgatgtgaaattgagatatattactgagtgcaatgcaaaattttatacacatttagcttgctttgaagaaagacattattggtaatgttaacagcaaaaaacagctgagattgaaaattagcgtgggctaggtaacatgttaaagtctttatgtgtacagtagcctcccttatccgcagggaataccttccaagactccccggtagatgcctgaatcctggaataatggcgaaccccacatatagtttttcaatctgataaccaagatggctactaagtgactaagaacctggtagcctaacagcatgcatggacaaagcgatgattcacactgcagatttcatcaggatatccagaatgggcttgcaatgaaacatttgaattgcttatttctggaattttttacttaatgtgtttggaccttggttgaccccaggtaactgaaatcaggctaagagaagccacagatgagggaagcctactgtattttcttttcttttctttttttgaaatagggtctggttctgttgcccaggcttttcttatataatcatcacaaaattagcaaataggtacacttaatgttattcttattataaaacagtatttcggaaaatgcaaatatttctaaaatagccctattcccatccctatccatagggtattttatcctcttcgcagtgcttttctctctcttttttttccccttattttctatgttccccaagcacccccttctgggcataacacagtgcctgccacaaataagaaaaaaagaagttcggtaaacttttggtccagtcagtgaagcaccttggaccccatcaccagacggtaggcgccaagagagcaagagtcagcatgttttctgctaaccagagattagcacgatgcctggtacaaagtaggcgcccaataaataggtgaagaaagaaaaaaaattaaaaaaaaggaagagagtgaggggaaaggatgaatgaatgaagacgtttgcagaggggcctagaaagaaagcactctgcaagattctccctcctggtggcatcaactctcagttcaaggtctatgtcagccctttccttgcccagacgcattggcctacagcagggaatgaagaaagaacaaagtctttaaaaatgttcagaagaaagagaaaacggcaagataaaagagagaaaaaaaagaaagaaaggaaccacctccttcgggcggactaaaaagggaagccccaggaggccggttgctaaggcgaccctagggccagaacggccccagcccattggttgagacgcaggagccaatgagaaggcgcgatgttgacggggtcctaagatggctgctgggcgaccacttcctgacaggtgagtacggcttatggagggttggttacccgccggttcgggctccggcatgatgagtctgggagggcctcttgtgggcagccgagggaggcggcatgggcggcctcatagctcctcggccgagcctcccggagcaggctagaaaagcc

SEQ ID NO: 6075 - DNA, 2300 bp, Homo sapien
tgcactccagcctggcgacagagcaagactccgcctcaaaagaaacaaataaacaaaaattagtcaggcatggtggtgtgcacccgtagttccagctacttgagaggctgagaggtgggaggatggctttggcctgggaggttgaggctgcagtgagccatgattgtgccactgcactccagcctgggtgacagagtgagatcttgtcctaacatatacatgtatatatacacacacactggttttagctaaattgattataactcagggaccgtgagcttaggatggacagaggtgcataacattgattacttttgttccaatattgacttttttctatatgagtgattcatttaaatttggagggtggaataaattgatattagtttccagtctaactggaatatctgcagccagaggacaaagtacaaggacttatcagagaggagacaatgaagctccatgctctggaaaaaggaaacaagaggctgagggaatgagatagcttctaaggagggagcttacaaaggcccctcctcccctggctcttgccccgtgggccaggctaatttgcatttcaatgaggacttaatactactgaagattttatgaaacgcctaagcttctcaaatgtttgttacttttgttaccctagctgaaatctgcaattaccagtatttttaaaaaatcctaaaatgaagagaagaggcctgtgggtgttcagtcaaggagggaggggtcaagtctcagtccaggaactactctgtgctgggagaagcagccagatacggcacaggtcgcggtagccgagaaagaaagcgagagaaagggtgagccggggagtcgctgggccagactgaagtgtgcctgtgtagaataactggcaggagagctgcattttctgaccccgggaggtaaaagacgacgccgtccttggcactgagtgcggtgaccaccaagaggagcaaaagtcatgagtctccgacccccaggcccccggctcagctgcctccactccaccctactcttctcagccccagcccagaaagcaggcagcgaggcaggtctttgaaccggaccaggttccttccccaaacacccggatccagagaggggcaggaattccctagtcattttcccctgctcctccccacatcatccgcccgaggggcggcagatccagcggaagctgtccgtggtgctgactcctgcctttggcttggccggacccgctgcccgctgagcgcgctgcagccaagcagggggctcgtgtggcggggccacgggagggtgagggtcctcaggtccgcgaccagctccaggctctgctgttaaatcccagcccgagccctctagcgtctctgccctccgcaacctggccgctaggcaggatccagcctttaagaacgggtcagtcgtgcctctctcaagcccccagctgcattgcaatctcccaccgctacttccttccccgctccttccctcctaagactgcaccggctcctcccgatagcctgacgcttcgcgcctctcctccgccctcctccactgtgcgctcctccggaccctgaccctccaggggccgtgcaagctcctgcagtagagattcgtcctcttcgctgctctggccaggtttgccggcccctcctcccgtttcggattccatcctccccacactgtcctcttcactagttctctaagcaccgagcatggcagagcgcgctccacccctattttccatacatgggagctggagtggggggcggagctgaggggaggcgctcccagtccctctaagaagctgctagcccactgggaaacatttggatccgttcagctcccgcggagaagcgagaccggatcaccgacgtgggcagaggactaccgagggccagcagaaattctgccccttcttcccgcgagtgctttcccgctctccaaaccccactcccaggtaggatcgcgctcctgagtctgcctgcgtggactgcgaggaccgtaaatagaggcggaagcgtttaaataaaccgtatgttctaaccgtgcttaggtttattttacagaggtgagaggacaacactttttgctacttttgctgttgttctgtggccggttattcccaagggaggactcaggcgatgggggaggggcgcggctggtgtaggaggtcggatggagtatggcaagggaagtgacggactttgattacctttgaacaggtggccatggcctcatcgaccactcggggccccagggtttctgacttattttctgggctgccgccggcggtcacaactccc

SEQ ID NO: 6076 - DNA, 2300 bp, Homo sapien
tgaggaacatttgtattatcagtagggactattatttaaataatttatgaaagacacagaaaaatatgcaattaaaagtaacacaactctgtttttttagagaaaaatcttccaagatgcaacattaaatgaaaaagcagggtacaatgcagtgtttaatattttcacactagtattttttttttttagggggaaaaaagcatatccatgtatatgcaaggaacatcctagaaagaatatacagaagttttcccagtgtagaatgggaccttttgggaatgggtcagaaggtctgcattgagagacttctctttattgcatactcttttgcatgctttctgttttttaaccatgtgcatcttatttttatatatttttttaaagagagaaacgtgtgttaagaattcagtggctgggcatagtggctcacatctgtgatcccagctgctcaggtggctgaagtgggaggccaggtgtttgagaccagcctgggcaattgaaacactatctccaaaaaaaattttttaaattaaattaagagagaatcagtgagcaacttaacattcctctatgtattttctactcttctgcattaacacttaaatatgaaaaactttttttgccaggcatggtggctcacgcctgtaatcccagcactttgggaggcagaggctggcggatcacctgaggtcaggagtttgagaccagcctgaccaatgtgatgaaaccccatctctactaaaaatacaaaaattagccgggtgtggtggtatacgcctgtaatccaagctactcgggaggctgagacaggagaatcatttgaaccggggaagcagaggttgcagtgagtggagagcgtgccattgcactccagcctgggcaacaagaacaaaactctgtctcaaaaaaaaaaaaaagaaaaaagaaaaactttgacttgccagtaattctagtcaggatttcagctgcaagaaacagaaaacatgattcaaagtgatttaagtaaataatgaagagtattatctcttataataaaactccagaaataaggctgtgtccagggttggttgaatctgtggttcaatagtattactaaggacttgatttttggtctctctgctctccgtaacatcggttttatcctgttccctgtcacgggcgtctttgtgaagagaccaccaacaggcttttgtgtgagcaataaagctttttaatcacctgggtgcaggtgggctgaatccgaaaagaatcagcgaagggagatgagctggggcagttttataggatttgtgtaggtagtggaaaattacagtcaaaggggttgttctgtggtgggcaggggtcacaaggtgctcggcccaggagctccgcagggagcttctgagactcattgtccaggagaaggcatttcacaagataatgtcctcagttaaggcagaaaccggccattttcacttcttttgtgatttttcagttgcgttaggccatctggatgtatacatgcaggcttgggctcagaggcctgacattcccctcatggttataagatgactgcaggagatttttccctcacaccacaatttctctaagtctgcttgggctgccttgagtgtctacttctgaaccaaaggtggtccccagggaatgccagaagctgaatgacttaatcagtgaaattgagtgtgtgctggggagtcaacgagtgcatgtccacagcctgctttcaacccagatcattgataaatggggtacttttcattagtgtttctcatgttgtcttttggtgatgtatttttaaagggtattccacacagtgtgattctacaatgtttgtacatccctgtctagttaatgttggtatctcccagtgttcttttgaagatgtatagttcaaaacatttttttatgctttccaccccgtgccagaaagacaagtaactaatagttgcatggcttttgttgttggatgttgagtttttctgctttaattgatgcctttatgcattgttttctaaaatatttagtgctccagttcattagactaatcatttccccaattaatacacaaaaaaagattttattttatttttcagaataagttttacatcgaaaccaagcttaacagagacttaaaagatgaccttataaagctgtttacggaacatgttgcagaaaagcacatttacagcctaatgcgtaagtaattcagcttatacgggtgagataacactagcaatgatctttcctttttcttttttttttggtctgagagcattgtcacgtaaaccccaatgttaaca

SEQ ID NO: 6077 - DNA, 2300 bp, Homo sapien
tatagtgaccagaaaatgtggttactatgatataaatccttagatatgtggagacttgctttatgacacagtatgttcaatttttgtaaatgtttagcatattcttgataggagtgtgtattctatggtcattaaggcaatattctacacatatatattagattaagcttggtaattgtgttactcaactcttccagtaccttaaagatttttttggtcccctcggtctatgtattagtttcctgtaatcagttgcttaacaaattatcacaataggtggcttaaaaaaaccgacatgaattctcagttctggcatctagaagtctgaaatctacatgttggcagggtcacaatccctccagaggctcaagaggaaaatttgtctcttccagctttgggtgctgtcagcattccttgacttgggaatgccatcactccaatctctgcttctgtggttacattaccttctcttctcttctacctctcttttataaagacacctatcattggattgatggcccacctggataatccaggatgatcttctcatctcaagaactttaattacatctgcaaacgccgtttttccaaataaggtcatactcgcaagttctaggaattaggatatggacatatcttgtgggaggctgtattcaactcactgcaattagagagggagtgaaaaatcacctactctgatggtagatttctttgtcttcttatacttctgttcattttcgcttcatatattttgtggccatatagtcgctatgatataaatccttagatatgtaaagacttgctttatgacacagtatgttagagacacttttttgactctatcttccctgtatattggactttttttttaaatgtaaagacccttctttatcccatcgcactcacccagccatctacctagagtctgttgatgataaaccattagttgtttgaaacagaatttgccttccttctgcctctctttttgccacacatgtaattctaaggttttatgttttccccttcagcataccacttaattctctttttttttttggagacagtctcactctgtcacccaggctggagtgcagttgcgcgatctcggctcactgcagccttgacctccagggctcaagtgatccacctaagcctccagagtagctgggaccacaggcacacgccaccatgccaggctaattttgtttttagaggcgtggtcttgttatgctggtctggctggtctcgaattcctgggcacaagcgggcctcccatctctgtctcctcaagtggttgaattacaggcgtgagccactgcgcccagctcgcattttttttttttttttgagatggagtctcgctctgttgcccaggctggagtgcagtggcgcgatttcggctcactgcaacctctgcctcccgggttcaagcaattctgcctcagcctcccgagcagctagctgggacaacaggcacgtgccaccacgcccggctaacttttttgtatttttagtagaaacggggtttcccgtgttagccagaatagtgtcgatttcctgacctcgtgatccgcccgcctcagcctcccaaagtgctgggattacaggagtaagccaccgcgcccggcctgagccggcatttttaaaagttgggttgctggccttagtgcatacaaacgtaaaggaattttaaaaacacatgagtaactcaaacgcatttcttttttgcgccatcctgctatgtgtgattcggtttttattctcgattttgtgcgtgtgtgtcgcgacggctggggaccgacccaagagcagtcggaccacgggccgcccagggcggtctcatccgtttataacctgcgaccccggggcctcttgtggtcccgtacctccgtcccaagcaaaagccggggctctcaggcactcagaggtgcgaaggccccgtagacttggaggacgcgaggaaaacacctccaatcactctggccagtccacagctactgccaagactgctccgcgcgcgtcctcaggaaccggcgagggcctcgtcgtcatggtaaccagattgcgaacgcgcgtgcgcaagacacacctttgtcacgtgaggccgggcagggggcggggccggcgaatgcccgtcccgacccgtcgcgcctcccctgttagctccctgccagccgaggcggggcgaacctctgccctgttgcgtgggagtgactcacagctcccgccccttttggctccgctttctcgcggccagtccctcgcaccacgtgccctcctggccgcgcccccagctgccc

SEQ ID NO: 6078 - DNA, 2300 bp, Homo sapien
cctgggcaacatagcgagacccccatctattaaaaaagaaaagaaaaaggcaagaaaagatcgaacagaatgatcccaaagatcccttcccatgctgacattctgattccctcattcattcattctaatattaaccaatgccagcactaggttctgggcatcccctgctgagccattctaaacctgctgggcacagccaagacctgtgagtgtggcctcaggcctagtgagggctcattgtttccacagccactgcatggtccagagtgaggaaggaaagccccatctgccccatgaagcccaccctgccagggcccacctgccaggggaggcattttcctgatcccagttctaggtttcatcctagaagagccctcagtatctaaagcctttcctactttcaatttttaaaaaagttgggaagtgtaagaccacctgccatcttcctaatcaaaactcatcttctggctcttattctccatggcttttacacaacatgttttattcatttcaaagtatttaattataatgttgaggccaggtgtggtggctcatgtctgtaatcccagcactttgggaggccaaggcaggaagatcgcttgaggccaggtgttcaagaccagcctaggcaacatagtgagaccctgtctcaagaaaaaaaaaaaagaaaaaagaaaaatcaagaagaaaaaagaaagagtgagaaagaaagaaagaggccagacgcggtggctcacgcctgtaacaccaacactttgggaggccaaggcaggcggatcgcgaggtctggagttcaagacaagcctggccaacatagtgaaaccccgtctctactaaaatacaaaaaattagcccggcatggtggcgggcatctgtaatcccagctgcttggaaggctgaggcaggagaattgcttgaacccgggatgcggaaagaaaagaaaaaaaaagaaagaaaaggaaggagggaaagaaggaaggaaggaaggaaggaaagaaggaaggaaagaaggaaggaaggaaggaaggaaggaaggaaggaaggaaggaaggaaggaaggaaggaagacaaaatataacattgaatacacgttgtttttcaaactgcacatacaacccacattttgactcaggcctctggggcgagggggtacacacacacacacacatcccagtcactgtcctaggctctccagccatgagattttccggcccagccccaaccccgacctaagtaaccggctatcggccacccattggctgaagtccctgagcacctgttgggaggaaggctgctgcgtgcagccggaaagtcctgcgtccctccgctcttaccgcggcaggaaccacagcctccccgaacctcagggtttgtatggatttcgcccaggggaaagcgctccaacgcgcggtgcaaacggaagccactggctggttgggcggctgtgatgggagagctgcatccttccaacgcgtccagcttttcatgctgatgttggtgagaagggggtggatagcggggattctcaggattagggcctagggccattaaaggctgggaggtgggggcgtaaacctgtggccaccctgacccctgtcctcggggggcctcaccaccaggccgaggagacccaggcctggtcacctgctccaagcccaggcccggcgctcgaatgcgggccccagcggccctcccttcccggcccttctctcccctactttctcctcacctcccagctgcgcggagaacacgccccctccccgtgttcccaccaatcagcgtccggagcggcgcccgaggcgccggggggctctggtctgcagccaatgagcgccacggctcgaggcggcgcctcgcccgccccctcccggaatgaaggccgcccgacagctggcgaggctggcgcagcgcgcggggcgcgggagccgcgcgggctggagcggagcgcgcacacagccagcccgcctccgctccgcctccgtccggggcgcgggcgaggtggccggggcgggggaacgcagggggcagggccgcggcggcgaggccggggggcggggaggagtgggcccgataaaaggcggcgcggcggccccaccccgcggcaggccggcgggcaggctcggcgtgtcccttccgtccggcccgcgccggcggcggggaggcggcgcgcggcccgcagcccgcccatggaggctttcccctgggcgccccgctcgccccgccgcggccgcgcccccccgcccatggcgctcgtgcccagcgcccgctacgtgagcgccccgggcccggcgcacccgcag

SEQ ID NO: 6079 - DNA, 2300 bp, Homo sapien
atggttaccaatgtaatgcttctttttcactttgtcaatggaggactctcgttggggagatagagattcagaaggcacctggagaaaaggacctgaagcagattctgagtggagaagaggcccgccagagaagtaagtagagttgaggaaaataatgccgctccagttcctgttaatatcttatcagtggttttaaaatttggttcattttgtagaggcagggaaaggagagccatgaagaattgtgtgcatgtctgattgcgtgtgggtttgtattttgtttttttgggtctgctgcccaggctggggtgcagtggcgctatctcggctccctgcaacctctgcctcctgggttcaagtgcctcagcctctcgaatagctgggattacaggtgtgtgccaccacacctggctactttttgtatttttagtagagatggggttttgccatgttgcccaagctggctttgacctcttgacctcaagcgatctgactgtctcagcctctcaaattgctgggatgacaggcatgagccactgcacttggcctgtgttgttgtttttgttgttgttgttgttgttttgagatggcgtctcactctggagtgcagtggcgcgatctcggctcactacagcctcaacctccctgggcttaggtgatcctcctgcctcagcctcctgagtagctgggaccacaggtgcgctccaccatgcctggttaattttgtttgtttgtttctttgtttttgagacagaatctagctctgtcacccaggctggagtgcagtggcgcgttctcggctcactgcagcctccgcctcctgggttgaagcaattcttgtgcctcccaagtagctgggaggcacttgtaatcctcccaagtaggattacagacatgcaccaccacgcctggctaatttttgcatttttagtagacccgaggtttcactatgttggccaggctggtcttgaactcctgacctcaagaaatctgcctgcctcggcctcccaaagtgctgggattacaggtgtgggccactacgcctggtgaatttttatattctttatagtgatggggttttgacatgttgcccaggctagtctcaaactcctgggctcaagcaatcctcccgccttggccttccaaagtgctgggattacaggtgtgagcgactgtgcccagccgcatgtcttacaattaagtagagatgggttttgccaggccaggctggtcttgaactcctgacctcaggtgatctgcctgcctctgcttcccagagtgctgggattaaaggtgcgagccactgctccggcccatactgaagtttttaaaaagcatgtgaaaaaaaaaatccccaaaggatcatatgcttttttattttatatatttttaattgttcttgttgctgtgtagggagtggagacgtggagaagggcgagatgaggacaggtctcatagaagagatgaagagcggccccggcgtctgggggatgatgaagatagagagccctctcttagaccagacgatgatcgggttccccggcgtggcatggatgatgacagaggccctagacgtggtcctgaggaagataggttctctcgtcgtggggcagacgatgaccggccttcctggcgtaacacagatgatgacaggcctcccagacgaattgccgatgaagacaggggaaactggcgtcatgcggatgatgacagaccacctagacgaggactggatgaggacagaggaagctggcgaacagctgatgaggacagaggaccaagacgtgggatggatgatgaccgggggccgaggcgaggaggcgctgatgatgagcgatcatcctggcgtaatgctgatgatgaccggggtcccaggcgagggttggatgatgatcggggtcccaggcgaggcatggatgatgaccggggtcccaggcgaggcatggatgatgaccggggtcccaggcgaggcatggatgatgaccggggtcccaggcgagggttggatgatgatcgaggaccttggaggaacgccgatgatgacagaattcccaggcgtggtgcagaggatgacaggggcccttggagaaacatggatgatgatcgcctttcaagacgtgctgatgatgatcggtttcccagacggggtgatgactcaagacctggtccttggagaccattagtcaagccaggtaaaattctatttcctagaatatgcttaagtgttcacctgtaaaagtgaaattctgatggataaatatcagggctgtattgttattttccagataaactggtctttc

SEQ ID NO: 6080 - DNA, 2300 bp, Homo sapien
ggaggggtacatgagtagagtggagaaaataattgcagatgtggtgaaaacagcaagagaagtagagttagatgtataggctgggtggggtggctcacacctctaatcccagctctttgggaggctgaggtgggcagattgcatgagtccaggagtttgagaccagcctgggcaacatggtgaaaccctgtctctacaaaaaaacaggaaaattagccaggcatggtggagtgtgcctgcagttccagctacttgggaggctgactgaggtgggaggatgcagaggttgcagtgagctgagatggtgccattgcactccagtgcttgggtgacagagacagaccctgtcttaaaacacacacacacacacacacacacacacacaaaaccaaaaaagactataacctgaagatgtgactgaattgctgcaatctcatgataaagcttggatgggtgaggagttgcttcttatggatgagcaaagtaagtggtttcttgaaatctcctggtgaaaatgctacgaacattgttgacctgacaacaaaggatttagaatattccataagtgtagttgataaagcagcagcagggtttgagaggattggatcaaattgaaattctactcttgagttaaaaaccgtcaaccagtgccacatgctagatgaatcttttgtaagaggttgcaatcagtgtggcaaacttcattgttacctattttaagaaattataccatagtcaccccatcctttagtatctgccatgctgatcattcagcagtcgtcaacattgaagcaagactccactagcaaaaagattatgactcattgaaggctcaggtgatcattagcattttttagcaataaagtattttttgttttgttttctttgagaacaggagtctcaccatgttgtccaggctgatcttgcactcctgggctcaagtgattctcttgcctcagcgtactactgcatctgacttacagtattttaaaattaaggtttgtacattggtgttttagacatgctattgtatacttaatagactgcaaacttctatatgcatcggataaccaaaaaatctgcgttgcttgctttattgcaatattctttattgtggtggtctagaaccaaacctgcagtgcctccaaggtgtgtccgtgtatcataatttttcctttataaagttcctggtatcatggggctaaatgaaaactgtctctcctaaatgcctcaggattactttgtctacctcttgcccgtaattgccttctggggacctattgacatggatgtagttaacgttttcatttttatggcatgacagaaggggcagtggagcagcttctaatttttcaagagtatttctcagtaatttggggttaatgagtaaaaaaaaaagtgcattgaaatttcacaatatttgtacttgcagattactacaatgcagctagaacgtgaaaaggctcttgaacataagaatcgaatgtcacgaatgcttgaagacagagatttattcgtaatgcgactcaaagctgcacggcagtctgtttatgaggtgagcttgctgatttttgggaaatgtttattcatgagctttctagtattggcctaagggttctcccttaacaaattggtatattctttattgagttactatgtgtaacggtcattcaaataatagaaatttttggatgatatttcataagcaaaacaatcatcaaaattgttctaaaggtgaaagttgaatgcataatttaatacaagttttgtttactgtttttgttagaaatgaaaaaactagatcaaaatgtcctgggcttagattctaatttgaccattgaattattttgtataaagacaaacccactggaggtaggtaatatcaacaatttaaatgttttaaaatttggcctgctgacaagttaatggtcatttggaagttagagtttttgtgctgagaggttgctttcgatgattctgatacacttgagagtcttttgtaaacctaatagctttctgcgagtttgttgctcttgacaaagtgtgccctttttgggttgggggttacttcgattgcaggaaaaacttaaacagtttgaagagcgattagcagaagaaaggcataatcgattggaagaacggaaaaggcagcgtaaagaagaacgcaggataacatactatagagaaaaagaagaggaggagcagagaagggcagaagaacaaatgctaaaaggtacacaggtcaaacaggattggaggggtgctaatgcaaggttggtgttaagatctagtttttagtg

SEQ ID NO: 6081 - DNA, 2300 bp, Homo sapien
ttctggaggatgagctctctgaaattaattttaaaataaacttctttagaatttgtgattttttgggtccatgtctatacttcccaaatcttctttctttatagtgatcaatttagataaatagaaaaacctctcctgtagtagaacagttcatgttgaaaaataaaaaaacaaaacaaaaccatctttgtggaggcagaagtaatgagggggaaatgctttttgtgtgtatatcctgtggttttctcattctttttttttttttttctttttttgagacggagtctccctctgtcgcccaggctggagtgcagtggcctgatcttggctcactgcaacttttgcctcccgggttcaagcgattctcctgtctcagcctcccgagtagctgggattacaggcgcccaccacagcgcccggctaattttttttttttttgagacggagtctcgccctgtcacccaggctggagcgcagtggcacgatctaggctcactgcaacctctgcctcccgggttcaagcgattctcctgtctcagcctcccgagtagctgggattacaggcgttcgccaccacgtccagctaattttttgtaactttagtagagacgggggggggggtttcaccactttggtcaggctggtctcgaactcctgacctcgtgatccgcccgcctcggcctcccaaagcgcctggattacaggcgtgagccaccacgccaggcctaagttttgtatttttagtagagacggggtttcgccatgttggccaagctggtctcgaactcctgacctcaggtgatccacccgccccagccacccaaagtgctgggattacaggcgcgacccaccatgcccggccgatttcctcattcattaattcacatatctcgtctattaaatgtgtaatacattgacaataatctatttcactgctgccttctaaattttccttctgggctgggcgcggtggctcacgcctgtaatcccagcactttgggaggccgaggagggcggatcacgaggtcaggagatcgagaccacggcgaaaccccgtctctactaaaaatacaaaacattagctgggcgcagtggcgggcgcctgtagtcccagctactcgggaggctgaggcaggagaatggcgtgaatccagaaggcggagcttgcagtgagccgagatcgtgccactgcactccagcctgggcgacaaagcgagactccgtttcaaaaaaaaaaaaaatttttttccttctgagctcacctttatttcgtaccaagggcttgagaattagattcggttcaaatggttttcaaattctaggtaaagtacttcgtctgcgaacattaaaattgttaagcaacaataaaagggcctctcagattgatttttttcactaacactaatttttcttaatttgtttgtgacgtgcgctgtatgtaaaaagtgacgacactcctttccgtgtgttttcaaacaccaagcaagtctgctgtgctccagggcgtttcgccctttgccaggtcgctgtccccattcgccccctctgagagcctccatttctcaaggcaatccctgtgacacaaactttttactttaccaagatataaaagaaccttgcttgtttattttaggcgtcactcttccccatgattgtctctcacggttgagcggcgctgacctgatgacacctgctcactgcgttttcgttaaactcagcattttcacgtagccaagacaggcgattcccaggctggatgggaccttactgtaactgcacgactccgcacaagtcgctttgaaaaccaatctgcagacgtttgcttgttctccagacagaaactctgaccccacactcacccttcccaccctaattctcgctcgaagattgaagagcctgtgaactgtctccctaacgctatccaggacaggcccaagacgggaactggaccttgcgcgcctaggactccggcgccgccacgtctgtcggcgtgcgtgacgccagcgcgcttgcgcgcacggagacccgccccctacatccggggcctgggcggcagcagggccgccgcggggaggtcacgtggctccttcctttccgtctctggccggctgggcgcgggcgactgctggcgaggcgcgtgggaccttacgctggttccccttcgtctcctctcccggcccgggccactagagagttcgctgacgccgggtgagctgagcctgccgccaagatgccggcctattttcagaggccggaaaatgccctcaaacgcgccaacggtgagtagctgatcggggcgc

SEQ ID NO: 6082 - DNA, 2300 bp, Homo sapien
ctcttgggttcaagccagtctgcctcagcttcctgagtagctgggattacaggcacctgccaccatgcctagctaatttttgtgattttttgtttgtttgtttttgagatggagtctcgctctgtcgcccaggctggagtgcagtggcgtgatctcggctcactgcaagctccgcctcccgggttcacgccattctcctgcctcagcctcacaagtagctgggactacaggcacctgccaccacgcccggctaattttttgtatttttagtagagacagggtttcaccgttttagccgggttggtctcaatctcctgacctcgtgatccacccacctcagcctcccaaagtgctaggattacaggcgtgagccaccgtgccccacctagtgcaagtttctagttggcttccaaactgattccacatctgtgtcccactcctcagcctctaaacacctgcttcttttctgtgaaaactagacacattaacagttatactacaacaggaagcccagagaatagaagggcacgtagttcagggtgctgccttccaggggttcagtttagtgagagaaacaggaatgccatatacacacctaaatatactccaatgtataaattgcagcctgggcaacatagcgagaaactgtctccaaaaaaaaaagaaagaaaaaagaaaaaaacaggcgcagtggctcacgcctgtaatcccagctacgcaggaggctgaggcaggagaatcccttaaaaccgagaggcggaggttgcagtgagccgagatcgcgctattgcactccaggccgggcaactgaacaagactccatctcaaaaaaaaaaaaaaaaaaagaaaaaagaaaaaaagatgagggtgggattgtattcctgcagacaccaaggaccctccctaattagctctgtgtgacttggggttggggcagacagtagatccagaggaggaatcttggagccaaatcttccaatgtctgagtcgttactatcattcagatctcagttcaaatatccctttctcagagaagcctttcttgacacccattttagagcagcacacctccactctctaacacactgcctccagggcacatatcgttgcctccagggcacatatcattctgagcttttttactattatctatctatctgtcatctatttatctatttatttatttttgagacagggtctcactctgtcacccaggctggagtgagtggcaggatcacagctcactgcagcctcaaaatcctgggctcaaatgattttcctgcctcagcctgagagtagctgggactacaggtgcatgccactatgcctggctaatttttaaattttttttgtagagatgggtctcactatgttgccaaggctgatctcgaactcctgacctcaagtgatgctcctgccttggcctcccatcgtgttgggatcagaggcgtgagccacctcacctggcctggattatttattctactcgccaattgtctgtcttccccagtggactgctctgtcttgttcagccctataaggtatccccagtgccttattaggccctcaatttttgttttgttttgttttgggggtggctggatgaaggaatggatggagacccttcctccatcctcaggacgcctctttttaggaacaaggtgacctgttcttttgagcttgaccagagggcagaggtagaacaaggaaagcctacgacgggaagaaagattggagtggattgagaagaagaaggatgaacagctggattagagaaattgaggcaggctgcggagactcaaggaggtttccaagggcgaagggccacgggcagaagacgagtggagctgcactgagcaggtcctggcagggaggactggggctggaataggtgggcctgcgggtggggcggggccgacggggggggttgatggtcctgtgatggggcggggcgggagggaggcgggtcctacagcgggaggcggggcctgtgatggtccggggagggaggcggggcttatgatgggccggggagggaggcggggcctgtgatgggggcgggccctacggcgggcggggcggggttcgggtgcgaggccggtcctgcaggcggcagccagagctgcgcgccgcggcggcggaagatggctgcggccgaggtggcggacactcagctgatgcttggagtcgggctgatcggtgaggacgtaggcgccctgcctggaagcccgcaccctggttctgcctctgctccacctcggcccggggcagcccgggctcccgcggcccccggcgccgac

SEQ ID NO: 6083 - DNA, 2300 bp, Homo sapien
tgagaaagcaaagttcagccttgtgtctccccagcataatctttagtagcccttcacagactgtaaagacggcctttctcttttgctctgttgatacttctcttatttgggtaaatgatctaggggaagagaaggagcagttttatagctattgtagctcctgggtgttttgaatcacttcctacttttgatctgttacttctgttcacttccagtctagaattcccttagtaggttggataagttaagggccttatgacatggtaaactggttcgtatgtgtcaaggtctgtgtgtacagtcattttggggaaagaattatgccgaagcacaataacacatttcttagctggaatgctgagaagctagggaattctgattaactggttagtcacgattcagctagactcttttagtttcatctccattgttgaaaaatttatctaaaatataccagtctattttcttttctttttctttttctttttctttttttttttttttttgagacagggtctcactctgttgctcagactggagtgcagcggcttcatcatggctcactgcagtcttgacctcccaggactcaggtgatcctcccacctcagcctcccatgtagcaaggactgcaggtgcgcacttccatgcctagccaattttttatattttttgtagagacagggtttcaccatgttgcccaggctggtttcaaactcctgagctcaagtgatctgctcatgttggcctcccaaagtgctgggattataggcgtgatgaaactctttttttatgtgttaaagatattagctctttcttaatgatgaaggcttttgcagagttttatttattatgtttttttttttgagacagagtctccctttgttgcccaagctggagtgcagtggggcgatcttggctcactgcaacctctgcctcctgggttcaagcgattctcttgcctcagcctcccgagtaactgagattacaggtgggtgccaccacgcccagctaattttttgtatttttagtagagagggggttttgtcatgttggccaggctggtcttgaactcctgacctcaagtgatccgcccgccttggcctcccaaagtgctgggattataggcgtgagccaccgcaccctgccttgcagggttttagtcgtgattttttttttttttttctggttgttgtcttttttttagcgacacggtcttgctcttttgcctagcttggagtgcagtggcatgatcatagctcactgtaaccttgaactcctgggctgaagcagtcctctcacctcagcctcccaagtagttaggactacaggtgtgtgccactgctcctggctaattaaaaaatatatatatattttgtagaaaggtggtcttactatgttgcccaggctggtcttgaactcctggggtcaagtgatcctctgccttggcttttcaaagcgctgagattacaaacgtgagccactgcacctagccctttaaaaaaaaaaatgttgttactagatagaattataattctaggtgtcatgttaccgtcaggcttttccctaatacagagatttttgggggcactgagggtgaagggaattgtttttgttttataagcctaataaatggtaggcttttggctatttttgtgcgtgaatgtatatacacacaccaaaagaagcaaaaaaaaaaaaagagaaaaactctatcataagactatcttctcattacctaagggtttcagttagattatatcttggctaaatgagatttcaccatttttgcaaccagccagaataaaaaagcttcctactctcataagaaccaggtgaatgtctcactgtggataaacagttgtctgctaatgtggcacttacacaaagggagattattattgccagaaaagacgctatccagaagccataaactaaaaacactacagaggtatttttgaacaaacattggactcccatttcatttggttgagtcagggttatgttgctcaactgaattcactgggaaatattctggagtccaaaaggcaaggttgcttcagaccccacttcctgcccagaaggaggcccagagggtttctcagcttgtgcagtgcgtggcattgtagtatcctggatttcttctcccgtcacagtgcaagagaagtgaggactcggagctactgccagccgcctcctctgcttcctgccccttcatgcagcactatgctcactcttgcatgtatgcacatccaagtatttgcacacacacacacacacacacacacaggtctgtgtgtaca

SEQ ID NO: 6084 - DNA, 2300 bp, Homo sapien
ttacttgtcatctgtcacattttctcattcatgggtgggcctgggtctggctctcagtagtaggttttgtttttgttgttttttaaattattttgttttatcttattttattttatttttttgagacagagtctcgctctgttgcccaggctggagtgcagtggcgtgatcttggctcactgcaacttccatctcccaggttcaagcaattcttgtgcctcagcctcccgagtaacagggactacaggcatgtgccaccatgcccagctaatttttttttttattttatttttagtagagatggggtttcgccatgttgcccaggcaggcctcgaactcctgagctcaagcaatccacccgcctcagcctcccaaagggctaggattacaggcatgagccactgcgcctggccaccagctaatttttgtatttttagtagagacagggtttcatcatgttggccaggacagtctcaaactcctggcctcaagtgatcctcccacctcggctttccaaagtgctgggattacaggcaggagccactgcccccacctgttattttttaactgtccttgcttggtaaagtaaaactctaggaatgataaattggtcctgtattagtgtgttcttgcactgctataaagaaataactgaaggccgggtgggatggctcatgcctgtaatcccagcactttgggaggctaaggtgggtggatcacctgaggtcatgagttcaagaccagcctgaccaatatggtgaaaccctgtctttactaaacatacaaaacttagccaggtgtggtggcatatgcctgtagtcccagctactcagaaggctgagacaggaaaattgcttgaacccaggaggtgaaggttgcagtaagccaagatcgtgccactgccctccagcctgggcaacagagcaagactctgtctcaaaaacaaacaaaaaggccaggcacagtggctcacgcctgtaatcccagcgctttggaaggctgaggcaggcggatcacgaggtcaggagttcgacaccagtctagccaatatggtgaaaccccgtctctactcaaaatacaaaaattagccaggcgtggtggcgcacacctgtagtcccagctactcaggaggctggggcaggagaatctcttgaacctgggaggtggaggttgcggtgagccgagatcatgctactgcactctggcctgggtgacagagcgagactgtctcaaaaaaaaaaaacaaaaaaactgagactataatttataaagaaaagaagttgaattggctcacagttctgcaggctgtacagcaagaatagtggcttctgcttctgtggaggcctcaggaaacttacaatcatggcagagggtgaaggggaagcaggcacgtcttacatggctggagcaggagaaaggtgggggaaggtgccgtccacttttaaacaaccagattttgtgagaactcaatcacgagaaccacactaagaggatggtgctaaaccgctcataagaaatcacccccatgatccagtcacctccgacccggccccacctccaacattgaggattacagttcgacatgagatttgggtgggaacacagatccaaaccatatcagtctctcctcaaataatttttttttttggtaattgtattgctctgtgaaatcaaaaaaatctgggaatcattgttctaacaccaatcccagagatctgctaattcctgagttgccctgaacccttaaagatgatgccatttccactctgagaacccaggcatttgccattgatttcctgaaggcaaagacctgaagggggaacatcagtcaagagagtccttgctaccttctgccacagctgtcattcttgaccccaagagcaatgattggaaagtaaatgccctacttcagtcttgtccttgacactgatggataattttggaatatctggcgttgtgtgaatatcttcaggcaactgatagtaatgtagtcttactaactgccacagggtacagctaatgttcccgaatgaataaagcagtgaaagagagcagtcgatgagcttttagacccaattcttttgatgggttcaccatatttcttcctactccagtaaggttgctcatgtttgtgatgcaggttacgtcgctggatttgtagacttggaggtgagcaacagaccagacctctatgatgtgtttgtgaatctggcagagagtgagattaccattgctccccttgcaaaaggtttgttctctgttctgttcttgatacaagatataagccaaacagttgtaca

SEQ ID NO: 6085 - DNA, 2300 bp, Homo sapien
ttttgaaattataattattttctttgctgaagtattcattgtaaaacatacaaaataaacatattttaaaacatttgcattttaccaccagtaactgttggatcagcttattttgggctctcctttccttctcagattatcaacaaacatttattgagcatttacctcaggggccacaaagagaataagatgctggttccgcactcaaggaactcggtttaggggcaagacagatagggaaacattttctcgttgtttcagtaaatccttgagtgcctaccccgcaccaggtgctgttttccaggcacaagagcgaacaacggacaaacccctgcttttaagctcttacattctagaggggaaacacctcatacatgtagtaaaagtagagtgtttggaaggaaaataatgtggagtgaaactgctgaagcggagttgtaggtgttctagatggggttgtcaaggaaggccttaagggagagcctctctggatcaattttctcattgtaaaatgaggacaataattgtacttatctcagggttttgatgagcatcgagggagagaaaacgcgtagaaagtgagagtattacggggataagagacttctaggcagagggcagggaaaacacaaaggccgtgaggcaagagtgggctcagagcggatgcagatttactaggaggccggtgactatggctgtggtgggggtcccagagtgccttttggccaggccaaggactttaggttctgttctggggtggggaatgtcaggaaggatttgaaaagaagagtgacatcaacttgttctaagagaatcactctggctcctttgttaagacgacatagcagtccaaagtggggaagcaggccagcgggctggctttgtgacatcctggagggtagagacaacagaatagaacagcacgctacatactgcactggtgcttagatggatttctgcggcataagggtagaagtggagggggcaccttactcaactcggagggtcagggaaggcttcctggaagaggagataaacccctggaggttaagaaaagtgagctaggcaaactgagcaaatacagaagcagagtcatacaggcctgaaggacgccatgagccaatttcctgttcctggaggcgcagggcaagggaaggaattggcccgctggaggttaatggccaatactgagcacttctgagggctcagtgctgtgttagggatgttttatctcctttgatcagaaacaaaaccctgagataggtacaattgttatcctcattttgcggatgggaaaatagacttcgagatactgacttggcgagggtcacacaactagatgatgtgctgggtcccccagtcctggactccggaggccccctgaacgacctaggcacacttgtggcttccgtgaatttaagtgcacacagcccccgcctggccctgtgctggggaagggcaggtgggaggaggaagggaaggcaggtttttctttacaaatggtacctatttggtagtcaacaaaaggaactggatttgccccaacactggaagaaaaaaaaaaacaacctgttgggctgagggatagtgcactgtgcccagggccctatacttggtttgatgctctggtgttactctcttgaaattctcagtaacatgaataaggggcaccgcatttgacattttccctgggctgagaccatgatgcagccggcctgactgcgcaacaccatgcacactggaattcgtgggccatcggagggattttcgagggtaatgaccaggggtagggcgcggcagaagcgcagggtgaggttgcggacggcctcactcacaacctttccgggtcttcgcattaggtactgtgatgacgggttccgatagtgaccccttggggcctggagacggcccggctccccaaaggtgcggagcagggcaagcagggttgggaggacgtggcccgtgggagagctgcgctcgccggaacagtgggcgcgcaagggccccgaggcgctgtgacacgggacgtcgggcgcgcgggcctggggcgggaactgcgggtgcgcgcggcccggggcggggctcgccgcccggctcctcctccacgcgcggcctggcggcggcggccactctaaccagcgcaaaatgtccctggaacaggaggaggaaacgcaacctgggcggctcctaggacgcagagacgccgtccccgccttcattgagcccaacgtgcgcttctggatcaccgagcgccaagtacggcccgggcccggcgcgactaggggcagggagggggcggg

SEQ ID NO: 6086 - DNA, 2300 bp, Homo sapien
tcagtccccatgccagcttctcccagtccctaacaattgctgatttgctttctgtccctttggaattacctattttagatgtttcatataaaaggaaacacacactatttgttcttttgtgtctggcttctttcacttagctagtgttttcaaagttcatctgtgttgtagcatatatcagtatttcattccttttatggataaataatattccattgtgaactacagtatttttttttttttttttgagacggagtttcaatcttgttgctgaggctggagtgcactggttcaatttcggctcactgcaacctctgcctcccaggttaaagtgattctcctgcctcagcctcccaagtggctgagattacaggtatgcaccaccatgcccagctaattttgcaatttttagtagagaaagggtttcaccatgttggtcaggctggtcttgaactccttacctcaggtgatccactcacctcagcttcccaaagtgctgggattacagatgtgagccactgcgcccggcctacagtacgattttgagctccaaaatgattgtctccttttcaatcatctgctaaacacagacataattaaaaccaattaaacaaacacaaggaaggtgtgaggtgaaatagtcgaaacgtgtgtccccacacatccaaggcagtcctttccacatctggggactggtacccagggtggcgcctagtggtacctgagatgattttagaaaatatactgggctgggtgtggtggctcacgcctgtaatcccagcactttgggaggccaaggtgggaggatcacctgatgtcaggagttcaagaccagcctagccaatatggtgaaaccccatctctactaaaaatactaaaaaaattagccgggtttagtggtgcacgcctgtaatcccagctactcgagaggctgagccagaagaatcgctcgaaccaaggaggtagaggttgcagtgagccgagattgtgccactgcactctagcctggacgacagagtgagactctgtctcaaaaaagaaaaggaaaaaaaaaaaagaaagccaatttaaagaaaatagtaagtgatatttggtgataagaagacttgagaaacgaagttgctaattgaatgactagtgattggaaaataccaactcagaccgggtgcagtggctcatgcctatcatcccagcactttgggaggccgaggtgggcggatcacttgaggtcaggagtttgagaccagcctggccaacatggtgaaaccccatctctacttaaaatacaaaaacttaactgggcatggtggcaggcggctgtaatcccagctgctcaggaatcccaattactcatgaagctcaggcaggagaatcgcttgaacccgggaggcagaggttgcagtgagccaagatcatgccactgcactccagcctgggcgacagagcaagacccagtctcaaaaaaaaaaaaaaagaaaagaaaagaaaagagaaaagaaaataccagctccaagactgcaatttgtcacacttactgtaaggccacggtgtgatttttatctatgtttgatgtggttgcttcaagtactatgctcaccactgaacacttggcttcattaatagacaaaaaccaaattttaaatttgtcccagttttcccaattttgggaagagaggccaaatgttagaccacacacaattccagcggatttcaggccaacaaagccttgatgtgtctagcccacttagcttattaacggactaaaactgcatttgtaattaattccatttcatacagaagccggaagtctctacctgaggctgaaataagaaagggatcctgtcacagaaatactagacacagtaatccacacaaggttaacaaaacagtgggaaatatggaaacaaatacctaatgccccgcctggattcgttcttttaaggttggggcgacagtaggaaaaccacgtgtcacttgcccaagcattcagccttaaagggaatttctccctcagggtctccaggaggcggggaggcggtggctcctccggccccgcccccccaccagcagagggcccgctcaccaccccgtaggccccgcccctgcgtctctgcccgccccgtggcgcccgagtgcactgaagatggcggctgctgtaggacggttgctccgagcgtcggtgagtggctgtcggctggggacaggcgtggagacactggtggctccgggaacgtgcttctcagacaggaccccgcgcttctgggcatgagggccattcgcccttcttggagggtttccgc

SEQ ID NO: 6087 - DNA, 2300 bp, Homo sapien
ggctggagtgcagtggcgcgatctcggctcattgcaacctccgtctcccgggttcacgccattctcctgcctcagcctcctgaatagctgggactacaggagcccaacaccacgcccggctattttttttttgtatttttagtagagacagggtttcactgttagccaggatggtctcgatctcctgacctcgtgatcctcccgcctcggcctcccaaagtgctgggattacaggcgtaagccaccgcgcccggcccaagaaaattgttaaggtgcataagccatctaaaggcattcaaaaattttctttctttttttttttatgttagccgaataaacaaacttcgggcttcatcaggccctatgctgccagcaagtgaccagcgtggttggtggagggctctaggagctgccagctttaggggtctcgctgtctgagagagatcctttcattaaaggttagggctctaggcacgtgaatatgtagcaaagaccaagcctggattgcttagaacagtaattcctggagtggtaagtgcctgaaaagttacccgctgagccctccgccttctgacaggtaaactgttgttgcccccattttgcagacaagataaatgaggccctgggagactcactgacccaagtctagacaccaggaagtggtggtggtgggtatactcccccaggaaagcaggtaatcttgggttgttacaatcagtgaccagaccagtttccaaggcctggaaggtttattgatttctttatattctccaatgcataataactgttctctgtttctctcggcacctccctgcgacttcctggcagccctggggacagagggtttcctccttctggacagagaaggcccagagtcggcttctgaacggatatccggcccgcaggatgcagaggaggcaaaggcctcattgttctttggggcctgcctgccccgcccccagctgtaggacactcgtggcagatcccgggtgaccgaagacagcccatttccaggagtggggccttcggagcggagggagcaaggaaacggggctgagcacagacctggagtctgatgttctgagcataacactggaaggagctaagagccccaaaataaataagaccggaatttaaaaacgttaatcccacgccggcttggcgctggcctggctgttactcattaacgctccccacggcggagactccggcgactccgtctgcgtttttattacttaatctggctgggtttggctgcagggaggctcgtggatttgctggccgggtgtgctggaaggcagtttattcacagaataagcagcttcccacgctggaccctgagccccaggcgccgtccgcgtagaccccgcgccgcgcaccgcggccggcggggggcgctcgggtcgcaccgagagcagcgcgggcagccagcgccgggtcgcagccgacccgcagagcccttcgcgccctccgaggaaacaaagtgcatctttgtccgcggcccgaggcgccgcgtgggagacgctgggcaggggccaggccgggccggccgccgccgcgtgcggggaccctgggcgcgcgtcactgacccgggactcagaccctcgcgggcctggcgcggaccggaggaagcgggctgtggcgcgcggccgagctggcagccctcccactccgagcacggctcgggacccgcactggctcctgccgggccgcggcgcttcacgcgccgtcaccggggcccgtgcactccgctttccgggctggcgacggggcgggaagggggcaagcgggagcctgcgggggggtgctggggacttcggcttggctgggccgcctttgagtcgcctgtcggccgggcggtgcccgccttcgctttcggtgccgtcccggggcgggtcctcgctccgacagccgcgcgccagcccagctcagccccggcgccgcgcggccgggaggactccagctcccagcaggccccgcgccgcgagcaccgaggcaggaggcgcgcctgggccggcgcttgcgcagtgcggccgcccgagcctgctagtaccacacccccgggagggactgaggggaggcagaagcatccgaggcattaaagcatccgagggagccggaggggaggagaatggagtgacagagacacgcggagggtggggggtgggggggagcgtgttgagggaggggggaggggggacacagagggaggaagaagcggcggcggcggcggcggcggcggcggctcctctttgcagagggggaaactcttgggctgagagcaggaataatgcggtagg

SEQ ID NO: 6088 - DNA, 2300 bp, Homo sapien
aaatgacacttagagcctggccctgggtaagggttggtgtgggccaatggaggaaatgcgggggaagggcccccacctcaccccacaccatgaaggtggccaccatacaccccgtcttggcctggcccctgaggaagctgtggcccagtgtgcccgccctggagcctgggaggctccctcacctagttctgctccttcctcctctccacaaagagccagctccaggatggacacactcagccagtgataatataaaaatacaacgcttcaatgcttccatcaagtaaaacggaagttccagaaagaatgacctctccctcccctgatggccaggcatgctaagaacaccctgggtcctagaaaaagaaattaccatggagtctcacagacccgggttcaaacccagccctgagacttcttggttatgtggcaacttacggaacctctcccacctcagtttgcctgcctgaaacatcaggatagaaatgcccattgcctagagccacgggtggcggcccacatatgggcaccagcacctgtgaagcaaacgcttcttgcctccctcctcctcccctctgcaacatgaagggcccagcactcacgggatgcagagggaaggcctgagcaatgggaacgaccgcccatctctcccaggccggccctcgctagagccctttgcatatgaggccccattgtatcctcccagccaccctgtgcggaagctgctcttctcccgtgttacaggagaggaaactgggagatggaattgcatgcccaaggccactctgcgagggaggggaagactgagaattccagcccaggcagcgtaaccccatgcctgcaggcttaaccaaggtggatattataggaggggccgcctccaccctgattggaggttctgttaattccatagctcttcccaggtacctgtgcctccaggggtggcccttgtacctggctctgaggggagactgcaaaaggcaataaaaagcaagggttggagcaggcagaggcagccccgacccatccccagggctcccaggactgacttctgttctctccaccccgtctcccccaaccccaaccccagcatcagaacaattccaagagttcgcccagctccaagaccagttttaaccaccacataaactcaaaccatgtcagctcgaactccaccggaagcagctagtttcggctctggcctccaagtccacagtggaaccagcccagacccttctccttagaagtggaagtagtggagcccctgctctggtggggctgccaggggagaccccgggagccggggaaggaggccgtccatcccgtcgacgtagaacctcgaggtttctcaaagaaatttccactcaggtctgttttccgaggcggccccggccggggtggattggatttgtctttggtgaacattgcaatagaaatccaattggatacgacaacttgcacgtattttaatagcgtcataactagaactgaattttgtctttatgatttttaaagaaaagttttgtaaatttctctactgtctcagtttacattttgtatatttgtatttaaatgaaagtgagactttgagggtgtatattttctgtgcagccactgttaagccatgtgttccaaggcattttagcggggagggggttatcaaaaaaaaaaaaatgtgactcaagacttccagagcctcaaatgagaaaatgtctttattaaatgtagaaagtgatccatacttcacctttgaaggattggttgtatttacccacatctatctctggagccatttcctcacattggtgtcacccttctgtcggcttggaacaatctgaattaaatgttccagacacacgtgggacttccccctcccagccagaatgtcctctcctggggccctcggagtcgcctaggctgagcccttctcctcgaggggcacgccgagccactgtcgcacccacctctgtctgctcttccttcaggaaggcggctggcacgcggatctaggtgtttgcagcctggtgggcgatgggcctctttccttctaagcaggtcctgactgctaaagccagtcatttgcaagaggtttgcattgggggatttttgctctatttttaacagaagcataggaccgtaaagatgtgtcatgaaaccccaagtgtcccaaagcctcggggcccacaggagcatcgggaagtgaggcagtgcgctcatcctgacggagcagcgtcgtgtctgtagcggggagggaggctggcccaggggcccggcatgttcctgaagcgttcacagggttt

SEQ ID NO: 6089 - DNA, 2300 bp, Homo sapien
aggtccaccttgctgccccactgcctggtgggggaccccttatctgactgagtccttcccagccccatttttcctgctccctactctacccctggagggactggacaatactccctctgtgcctttgctcccccagctgtcctttgtcctgtcccaaagcctgggtccccctgctccaacagacccacccttctaggcctcgctgcctcccaccctccatgcttgacagagcagcttgtctgagcaggagggaaccatttcatttctccctcaagggctgcagaggccactaaggggcagggacttgtccggaggcacccatttctgaaggggcagagaactcaagtcttggacccaagtccacggccacctaaacacaacaaccatttagcgactttgctaaaatatatttagagaatgaatgtggagctgacaactttcctcccttcctccatccctctctcctccactccctccctcccttccttcttccctccctccttccctcccttccttcttttctgtagtcaggacattagaaacaaacaaagccatcatcaaacacctttatcatttcacacagaaaaggacattttaacacccccaatagtaggaaagatataatctcaggtaaagagctgtcctgatccacagaatcttgtagaggttgtcgctcctggggagagacactgggcacctgagggacagaggtgtgaggaagactattacaccacactcccttttgtatgtcctgcactgtgccccacgtaaagaaacatagtgatctatttcaaagcaaaagcaaaacaagcaacccaagactgtccttcctctaccagcacagttcacttggtaaatatttcctagtcttccttctcgtttatttgtggactagtgaagaaaaccgcctaccagcccgtggcactgtgggcaggcggccacctgggaacccctggcctcctctcctcaattcattttaagttctgtgagaaaatagcccccacctttcatttctggcatctttctctgtgtttttctctccagccagacaacctggggttgcatcccagctcatccacttccttgcttgcttctttgtagcaaattatttatcgtctctgtgcctcagtttcctgatctgtaaaatggggcccttgaggaaactagcttgcaaggattgttgcaaagtttcgatgggatatagtaagtgctcagtaaatgtcaacttttctttttcttttttttttttttgagacggagtttcactcttgttgcccacgctggagtgcaatggcgcaatctcggctcacggcaacctctacctccggggttcaagccattctcctgcctcagcctcctgagtagctgggattacacgcatgcaccaccacgcctggctaattttgtatttttaggtttctccacattggtcgggctggtctcaaactcccgacctcaggtgatctgcccgcctcggcctcccaaagtgctgggattacaggcgtgagccaccacgcctggcctcaactatttttaatagctatccgtcctcctttctgtgccctctacccttagcctggtgcctggcttggctcattccttagaaaatgtttatcactataaaatatatacttgagtgccagacatcatgctgaccctgaggaagactcagcccttgctttcaagaaatgcaccatccacctgactgaccctggaggaaaaagtcatttactttgcctcgagggagggtgcgggacagattgaggcagagtaggagggtgagggcagctttacgcagaaatgtcaggccccagaggacacacaggggcttctggaagtggagaaaatcgatgacagggtctttgttttcgggctagggctgctgggccattttcttttttctggactttgcctagaaagtggagagtctagggaggctacaaataacagtttggcgttcttatttccttccctctagtagaaactggaaaccagtggccatctgttgtttagtccacttaaaagaggatgttgaggcttgttttttcttcggacccaagggtgctcgggagccctccagtctctgcctttctcacacaaggcgtctctgggaaggcagtggattgttggtctgcgtggaacttctcaggtggacaccagagcatggaacgtaaggaatcgcccccacccctttccatgtccgcagtttgcctgtcgccttggccctgggcggggcaggggctgggaagagtgtgctgtgaggacacagaggtgcacaggtgactgtggaagggccagta

SEQ ID NO: 6090 - DNA, 2300 bp, Homo sapien
tgccaccaggcctggctaatttttgtatttttagtacagatggggcttcaccatgttagccaggctggtcttgaactcctgacctcaggtaatccgcctgcctctgcctcccaaagtgctgggattacagacgtgagccacagcgcctggccctaactatgcatcttaatttttgtacttactctctgatgtgctaacaggacagtaaaagtgatttaaggctgttatattttccctttatttaagagatgcctggggttcttagctcaggagggattcatagcatgtcttaagccacaccagtgtttttcaggacacgctagggtggacttggcaactagcaaaacactgagctgctgtgcctaacttttacccctgtgtgccagtgtgcttatttcctgtcttaggattacttgtaatttggtctcggggaagttttctgggtgagtgcgttgcaccaattcccttattgttttaagaacgcagtgacctcacttggatccaggactctgccagcatttaaaatcccgctcttacgaaaggtgaaactcttgcctatagttaagtatcacagcttgatcccattacaatgagatggaagtttgtctgggcccggagtaggccaacaacagcagttttaaaagcagaactccccgcgctgggtctaaccctgttcttggtcaccgcgttcgcttcaggagcctggaaatcctcttttggcagcagaagggggagagtgcttggaaatgctcggaggaaaacgacttttggagggggaatagcggggagggaaacaacaagcaaccaccggccacacttggggtgcaactggggctgtggggtgggtagagggagagggaaagtgagcagaactggaagctcagaatagaagatacaaaagaaagtgccaagtagtgaaaaaaactgcaaaaggacggggggatggggggagggcgactggggaacggtttggaaaaatagcaattagtacagctaaaaataaagaccaatttagagacaaagccagatacacaaggagaaaaataaaactcgccagaaagacaatttcttgcaaaccaaatgttcaagaaaatgggggctaatgacatcccctctggggctgctccatagaagaaatgaaataataggagaccgtagagcgcgcagcgcccagcaggtgacgccgtgggggcttgagtggtcccggtcgtggagcctgaaggccctgccagaggcagtgcccacgtgtccccaaagttagagaagtgtcccgagagcgcggtgtgcgggacagagcaccgcccggcgcaggaaccggggggttcctgcagaatcctctcagatctccccgagtcctggcgcccgcgcggcacggccggggagagggcgcccacccgcggcggctcggctagctcagcgcacgggccctggggacgccccacccgcattcgcggggcgggaaggcgcagcgcccacgaagtcgaggagcagccaggccccagcaggcggggatcctggtgacgaggaggcaaaggccacaggctgggccgcgcccggactctgcagaaccgcgaggcctaggcttcccagcctgtgacccgggaggggaccccgcccgccacctgcgaaggctcgctgagagccccgaagcgcggtgcgcccgcggcgccgtgccagtttctccggggctacagggagaaggcgggagaccgcgatgggcccgggagcttgaagctgggcggggcgggccggggcggcatctcaggcgagggccagggaccccgggacgcgctaaccgcctccgcggggctactaagttcccggcggcgcgggctccctctgggccagtgcaccttatcccaggcgcggggcacactctgggcgatcgggggtcacccggggctgccctgccctgccccgcccgggcaccccggagcggaaccgcgagtcctcaccagcgggggcgggcagggcgcactgagcgcgccacgcggcgcctggctaggaggagggcggcgggcggggacctagagctccggggcggtgctgagcccgctcctcctccttgccctcctcctcctcctcctcgccctcctcctcctcctcgccttcctccggctcagccgccgcgccgccgggctgctccttcttcctcctcgggcgcccgcggcgatgttcaaccgcgccgtgagccggctgagcaggaagcggccgccgtcaggtaagcggcttcgggggcccgcgggctcggggtcggggcgccgtttcgcccgcccggcctcctgccctccctcttgtgc

SEQ ID NO: 6091 - DNA, 2300 bp, Homo sapien
ttttctcctgtcttgctgttgctttttacctgaagctcaatctaatgaatgaattccatcttccaaccacttaattctggtttccttcctttccaatgaagagtgatgactcagcatttgcattcctttctgaatagtgtggcactccttttctctgcatctttttttttttttttaagtctgaatactttttaattaaatgtttaaattgggcaccctaatttcccggcctctccaggtctagcactcctaccttgagtaccaaggagtcagatcgctgctttgtttctcttgcctctcctggtattgataggatcatagtccacttggctctgctctctgatggggaaattgctttttagggaatagatgaaggtggaggggcactcgagaagtttgactagcttcacatctcttcactcctaccaaagaaaggatgctcagtaaagaagatagatgttcagtattgatagagatttttttggtgtggccttgtacaggaataaatgtgttctctaacgtctcactgaagtatccgtcccgttttgagaatctgaggcctactgaagcacatccaatgcttcaatgaaacgcctgcttaatagaacgtctttgtgttttgtgttgtcttccatttctgccttctctccctagaagaaagaattgggacacacttgaaatttgtccttcaggccgggcgcagtggctcacgcctgtaatcccagcactttgggaggccgaggtgggcggatcacgaggtcaagagatcgagaccttcctggccaacacggtgaaactccgtctctacaaaaaacacaaaaattagctgggcgtggtggcgcgcgcctgtagtccctgctacttgggaggctgaggcaggagaatcacttgaacccaggaggcagaggttgcagtgagccgagattgcaccactgcactccagactggtgacagagcgagagttcgtctaaacaattaaaaaaaaaattttatccttcaacatctgttgaagccaagacttggtgttgagttacaatgtgtactttgatataagcatctgggaaagctaggcttaaagactagctaacatgtatttaacaaagataaaagttacattgtatctaaaaatctgaagtatcatcacacactgaatgattgataaatactcatggcaggggtctcatttactgtatctgttccttaccaagaggaatctctggttttgtagtgctaaagaatgtgcttttttgatgtcttttatttatctttgcatctgccttgccttcatccctatcagagtttctccaggggaataataagctaacttctttgtcacttatttccttcctctaccttctctaatctcttgttctttctttgaaacagttaagttgtctatgtttacagttctctaaaactgtgacatgttcatatgaataaataaacatcttaactctgttgttttgtatgtcagtacgtgtttactattctgtcttcctttttccttctcccacccttttccatagggcctttttttttttttaagagaaggactactacatcttcctaggtcttacccccacagcacttagttcactgcctggaacataagaggtactcagaatttctacagtgattatacttctttcattaaattagtattaagttcttttttaaaagtcctggttgaactaagattgtaggcagacattactgtcacatgtggtgcagtctgttgacttttatatattttttaaaaccttcaaatgtaaaatcttgagataaaagcaaatgtttaacaattgggatttttattagagtttaatacaaataatgcatagtttttctaagtgtacgttttacatattctcaaagggttctattagatataagtaacatgatgaaaactgaacatgattttagacgttgatatctagtagggttttttgtttatggagatcttatattttacattgtgagctatggattaggtttttcaagtggccagtatgttttaaaagaatgtgttcttaacaaagcttatcttaaattgtttccttaagatgcctgtgtgttactagtgaggtttttttcctgcagacacacacaagctaagacatatggttctatcttcagaaaacaatatggtgtttagagcctaggtaggtctttaaatattcattacctacagtattactaatttatttgatggtatttaaagtggcaagaattgctttgatgttgagcctaaatttctatttgtcatatagttgctttaaaggtctgttttctgatgttct

SEQ ID NO: 6092 - DNA, 2300 bp, Homo sapien
ccaagagccaaggaatgcaggcagcctctagaagctggaaaaggcaaggaaccagccctgccgacaccttgattttagcccagtgtaactgattttggacttctgacttccagaattgtaagaaaataaattcgtgttgttttaagtatctaaatttgcagtaatttgttacagcatcaacaggaaactatcacagcgggccaggcatgggttaatgaattggattataattaaatccagttctacacctaggtccaattaaaaacatagacaaaacctttgagtggctcctcactgcctggaagagaaagctcaaattcctcagcatgaaatagattcttgacaacacggttctacaaggtcctctctagctttagttcccttccccccgctcccgcccgcatccccagcccatacattttagccatgggtcctggcgtctgagccttttgttgttcctacggactcttatggggctcaactcctttgccgtgtctctatgaagtctttcaggttgaaatttcctcccctgaaaatggacaacataagggcttgctgcatggttgattctgctttcaagattaatgttcagtggcacgcatacgcaccgccacttgcagaggtcgacatgcacttagtacatgtcggcagaagcaactcttaagccattactaaccggggcagttaagttctggcaatgggctgaaagatctttcttcatcgccactcttcactaagctacaagaccaagtactttctcctgaaggtacttagaggaggaaaaaagcacaccaggaactgttgtggggggtgagaagacaaattctacagggatgcagagctagtatgaacatggcttcccctatcttcatgcaaaactgcgtttctagcccacatgactgatgtctgtaaacgcaactttatgtttgtgcacgtctctgcccaaggatttttttttcttttaactccaagaatacggggggagttgggcaagtcattataatagggctcctcttcttaccccactatccgatgagacatttgatagggaaacctctgaaacttgtaaagcaatttacaagcaggccacctacttgtatttaacaaataggctagaaatacctatttgtgggaaatcgagtccccaaaacaccccaacccctccgggtccccgccagcacagcctctcttctgactgtcgcgcgaagcggcggttgactaacgcgagccagccgttctgatgaacacaggagggccggacggccctgctggctcggacaccacgcggagggagagtgctgcctgagccacagttgaagaaaccgctctcgggctggacgaaggcggagcagcagctcagactgggccaacagaagagccttacaatgcctggagcagtccgaggacagcccccggcgcgaggaactctgggacttgtagttcgctttcccagacagcgcttttccccacttggtctccccgcctttcaatgtcgcttttattcttccctttacctcccagcccgccgacttcctggtcgtcgcacgtcctcacgtatgactacactacccagaagtctcctcttcacgtcccagcgcgggtgggcgccggcggctcctcttaaccacaggttccagaagtcctctgcagaagtgcttccctctctcatttccaggaccacaattcccagagacttcggcttcacgacgtttctctttttgcccgatctctcccggagctggctgggcttcggccggccagaggcccacagcgacgacgtgatccgtcgtgagcgggtcccagggtttcctcggcggcccttttttctctcccctcggtcgtcccccttgcaggctgtcgcggctggcctgagcggtgacctggcgggtcgcgcctgcgctctgccctgtttcctgcctggctggtggcggcggccattttgttcatcctcctcctcctcctgctcctcctggttggagcgcagtgtccggagcgggctggggggagagagcccgagagcagggttcggtgccttttcctctgtccccagccggtgcccagagcccccctccccttcctccccaccccctcccctccccaaccctgccctcccccttgtcccgggatcgctccgtcgcacccaccatgatggaagacgacgggcagccccggactctgtgagtacccgagacgaggggtgccaggcgccaagaggcccgggcaccgcgggacgctaagggagggagcaggagagactgggccgaagccgggactctaggcggctccctgaccagggcggc

SEQ ID NO: 6093 - DNA, 2300 bp, Homo sapien
agtgggcatattctttttactaagttaaaaaaaaactcaaatatacatgtatatacatatgatttttaggactatgtacatgtggaataaaaccttgtagaaggaaagcaataaatagtaaagacaggattcagaaagatggttaccccaagcgaaggcaggggtgtgtgttattgtgtgtaggaggtatagcatagatacagatataaactcgtgtcattataactttttagtgtggtgggtttgtggctataatcaaaactaaagtaataaaggtgggtgcggtaaactgaataatggtccaccaaagatttctatgtcctaattcccagaatttgggaatgttatgctaaaagggactttgcagatgtgattaagaatcttgagataatcttcgcccaaagtaatcacaaaaggttctcgtaaatgaaaaggggtggcaggagaatcacgatgtacgtacagaggcagagaagaaagaagatactatgcttcttttcttgaagatggaggatggggccaagagccaaggaatgcaggcagcctctagaagctggaaaaggcaaggaaccagccctgccgacaccttgattttagcccagtgtaactgattttggacttctgacttccagaattgtaagaaaataaattcgtgttgttttaagtatctaaatttgcagtaatttgttacagcatcaacaggaaactatcacagcgggccaggcatgggttaatgaattggattataattaaatccagttctacacctaggtccaattaaaaacatagacaaaacctttgagtggctcctcactgcctggaagagaaagctcaaattcctcagcatgaaatagattcttgacaacacggttctacaaggtcctctctagctttagttcccttccccccgctcccgcccgcatccccagcccatacattttagccatgggtcctggcgtctgagccttttgttgttcctacggactcttatggggctcaactcctttgccgtgtctctatgaagtctttcaggttgaaatttcctcccctgaaaatggacaacataagggcttgctgcatggttgattctgctttcaagattaatgttcagtggcacgcatacgcaccgccacttgcagaggtcgacatgcacttagtacatgtcggcagaagcaactcttaagccattactaaccggggcagttaagttctggcaatgggctgaaagatctttcttcatcgccactcttcactaagctacaagaccaagtactttctcctgaaggtacttagaggaggaaaaaagcacaccaggaactgttgtggggggtgagaagacaaattctacagggatgcagagctagtatgaacatggcttcccctatcttcatgcaaaactgcgtttctagcccacatgactgatgtctgtaaacgcaactttatgtttgtgcacgtctctgcccaaggatttttttttcttttaactccaagaatacggggggagttgggcaagtcattataatagggctcctcttcttaccccactatccgatgagacatttgatagggaaacctctgaaacttgtaaagcaatttacaagcaggccacctacttgtatttaacaaataggctagaaatacctatttgtgggaaatcgagtccccaaaacaccccaacccctccgggtccccgccagcacagcctctcttctgactgtcgcgcgaagcggcggttgactaacgcgagccagccgttctgatgaacacaggagggccggacggccctgctggctcggacaccacgcggagggagagtgctgcctgagccacagttgaagaaaccgctctcgggctggacgaaggcggagcagcagctcagactgggccaacagaagagccttacaatgcctggagcagtccgaggacagcccccggcgcgaggaactctgggacttgtagttcgctttcccagacagcgcttttccccacttggtctccccgcctttcaatgtcgcttttattcttccctttacctcccagcccgccgacttcctggtcgtcgcacgtcctcacgtatgactacactacccagaagtctcctcttcacgtcccagcgcgggtgggcgccggcggctcctcttaaccacaggttccagaagtcctctgcagaagtgcttccctctctcatttccaggaccacaattcccagagacttcggcttcacgacgtttctctttttgcccgatctctcccggagctggctgggcttcggccggccagaggcccacagcgacgacgtg

SEQ ID NO: 6094 - DNA, 2300 bp, Homo sapien
ttgtttgtttgtttttgaactggagtctggctctgtcgcccaggctggagtgcagtggcatgatcttggctcactgcaacctccgcctcctgggttcaagcagttctgcctcggcctcccgagtagctggattacaggcatgtgccacacgtccagctaatttttgtatttttagtagagttggggtttcaccatgttggccaggctggtctcaaatttctgatctcaagtgatccgccgcttggcctcccaaagtgctgggattacaggcgtgagccaccatgccccgcccctgcatactttgaatctcccaaaactaccaatagcctactcttgacggaaagccttgccaataacatgaacagtcaattaacacatatgttgtatatgtattatatgtattcgtgcaataaagtaagctagagaaaagaacatgttaagaaaatcataaggaagagattttacatttacataaggaagagtagtacacttactactcatttagtggacgtgatcatcataaacgtcatcatcctcattatcttcacgtggaggctgaggaggggaaggaagaggaagggttgattctcctgtcaaggggtggcagagacagaagaggtggaggaggtggaaggggagactggagaggcaagcacatcggtgtaacttttattgaaaaaaaatccatgtacaagtggacctgctcaattcaaacccatgttaagggtcaactgtacagtaatctgaagtatgtaacctgatgttacatttctctcaatcatttctctctttctttctctctctttcttttaaagagatagggtcttgctctgtcgcttaggttggcatgaagagcaaaatcatagctcatggcagcttcaaactcctgggctcaaatgagcctcccacctcagcctcctgagtagctgggactacaggcataagccactgcacctggcttattttttgtttatgcagagatgggggtcttactgtgttgtccaggctggtctcaaactcctggactcaagaggtcctccagtcttgactttccaaagtgctggcattataggcatgagccatggtggcaagccctcatcagttatttttctatgattctgtctctctgtcccctccttacaaggaaagtaattttgaaacaaccaatccagtcttggttctttgtttctgctttcttcagcccttctctgtctataaaaccaacctcttctgctcagctcatgggagcacttattctaatttaatggagatgttgcccaatttctagaatcacaaataagatctttaacaataaaagttaaaaaatgaaaatcaacaacaacaacaacaaaaaagatctttaaatgtgttgtaattttctcctttgacaggttacaagtgcaattgaataaaccaaacaaaaaatgtcatggttattcggtctttacttcccaaatcagggtcaagatataagatagcaagaaccaatctctaccataaaaaagatccagacccaagaaaatgtgatttatctttaaagctgcaacgaaactttctttttagtctaggagactaaaagccatcagttgatacaatctctttttttcttgaagtttccaaaggaaggcaggtgagtttgcactgacttccattttctccctggcttccttccggtgtcagatgagagtccccgcgctcctcccggacagccctcagggtcctcggctatcatatatgggggagggggtggaggtgggcgagatggttttgtttgtacaggaaggacgggcggcaggcacggggagcacgggctccggccccgggaacactcactcggcgcaaaggagagggagagagcgactatgaaagccgaaacccgcccggggcgcacggaggacggccccagtccagctcgtccggcttcccacccgcaggcggaccccgaagccgcgcccgcgcccgcccgcggcgactccggcccgggcacgcgcacgagtcggaagggggaggggcgggaggaggtgggggaggggcgagcgggccgaggccccgcccccgctcctctgccccgcccgccgcgattatagccgatgactcagggcggagctccgcatccaaccccgggccgcggccaacttctctggactggaccagaagtttctagccggccagttgctacctccctttatctcctccttcccctctggcagcgaggaggctatttccagacacttccacccctctctggccacgtcacccccgcctttaattcataaaggtgcccggcgccggcttcccgg

SEQ ID NO: 6095 - DNA, 2300 bp, Homo sapien
gaagcatctcccctccatgttttcctctctcctaaagactttgcttgttaactctgcatttacaggtaaccaagcccatatgatggcattagttaatgactgactgctgtttttttccaagctgctgtcaggcagattttactaattaatttcacttaaaatagtggtgttcaagcctgactgcatagtaaagtcatctggggagcttagaaaaaataaacaaactgatgccagagccccaccccaattaaattctgatttaattggtctaaggtccaagcattgatatgtttgaaaaattccccaggtgattctaataggcagccagggttggaaccatggatctaaaacatcaggaaaagtttcaatgaactaattaattgttttaaaacagttacaacagcattgttttcttcacatctggcaatgtaattcataaaacaataatgaaataatttgcaggatacaatgtcttcataggattttctcattctcatttttgctaagtcaacacatggctgaattaaacaatcaatctgaaaccgatggttccactgaagcttcttatagcttcattaccttctttctccaaatcacatcacaaagatttgatagagtaaccacctccctcgacctttatgttgaggtgtctggacagcacagaggcatggtacttagaaaagattccaggacgctttgttatcattggactttctgtgctatggaaattcaacactgtgggctggaataactagtcatgtggaactccttcctgcttttgtaccctctcacttttacttgagcagaaggttaaaagtattgctttctgagaagtcccattcggtcactcctctctctcgcaagagagacagctgttctcccttttcttttgcctataaacttccgctcctaaactaaaaaaaaaaaaaaaaaaagtattgccttatttttctcatctcctacttcttgtctttttctcttgtttccgattcaggcattagagaaggcaaggagttaggagtaggaagactcaatgatttatagaactgggggtgtcataaaaggtcattagttcaaccaccatctgagaccaagagacttccccaagatcacacagctagatagtcctcgaactggccccggaagtgggggcctcattctccagacccattctgttcaggatatcaactggtttttcaagacagactgagctcaaggatgtttgggggagactcctccttccccgagagggtctccattcatcttatcctcgccaaacgatattccttccgcttgcttcattaactggctccatttgtgaagtcttctccaaaccgccctgcttaattcgggacacagcagcacctgtacattcctcccttcctcctcgctctttagccgcgtgctgctaatgcttgtgtgttttctattgttacatgctttccctcgttgatgtgcatttattgaatgcctcctgttgtcaaacttctaatagggaatacgaaaacagaagacgcctccgcttggctgtgggcctggctggggatgaacccctgtagccaggccccggggtctcgcctggtttcggtacgggcaggcagcgcaggcccgcggggaacgtaccccgcaccgctccgggagagcgggtgtggggttggattcaggtctcggcctggcgaagcgtgagcgcctccctgcacggaggggaggccccagcggtgggcgcctgtccccaaggccgcgcggagggaggcggtcagtccagaccgactcggccgagctcccgagctgccaccggtgaccacgacaggaaggctggcgcgccgggggaggggcctgggcaagagcgggaggggcgggcggaaggacgagagggaggaggaaagacccgcggggaggagctgggaggagacacccgggagaaggcggaggaaagggcaggaagcgggagggagctgaaaggaggaggaggctgaggggcggagccgggcgctcggggagagtagccagcagagggggtggagccgggcctggggcggagccagggaaggggaggagcgggggggagaggcctctacggccgccgctgccgccgccgctgccggggcgcgttctcctcctaccggtcgggtgccccggggcgttccctctgccgctgcttctcggcgcggttcctacccggccgctccccgaggcgcgggctctggcggcctcgaccgactaggacgccccgtgcgccgcccgcgggccgccgcctccctgggcgcgcggggccagcatggagctcttccaagccaagg

SEQ ID NO: 6096 - DNA, 2300 bp, Homo sapien
ctatttttactatgattattacattactttctattacatttttcaaatacaagttatcgttttgaaagaagtatctggcaaagcaaatccaaacctaacaggtaactaatttcttaaaaactattctctctgaaatcatcatttgcaaacccaataattgacctgcttacttctgtccagccgcggtcttgggttatatcgatacccaacctggctccaaaagacaggcacagagcctcgtgtttgaacaaatgacagggtatgattatgaacatgaatcaactgctcagtctccacataattggcaacatttccatttttatccactcctcttcgtttatagcgcattcctgaaagaaaattaaaacagaaaacagcaacattttaaaaaatttatttagtctggctagattatgcttcctaatcaaatgtatgtcttccaggatagccttggggattcagtgtgcaactgccaagcagaacagtatcaacttacccaaaatcgtaactgtatgcatcattgtttttaacaagttgaagctcagttcctctgaactgaaagagaaaggtcttcccaaaggcactagcacataggaaggatttatcacggtgatacaggctgtcagtggagtgccagtattctgaagcacatctcaagtgactttttcccttctctctatatatgtacctccttttccttctcattttgctaactctctcttattcacccctcttcaaaaatttgtccccaattacatcacagtatttagagtccccaagcactttgaagccaactgtgttcccaaatccattattgtcattagcatttcaacacatctgcagcttttccattctcgcctggatttgatttgaatgctattacagccctccactcacctgctctgtgcctacttcggcgtgaaatgagagccactagaaatcgtgggtgaatatcatctacacaggtggactcctgagggggggtctctgggctgcttttctcatcatcagatgattcggtataattaaccacaagttcttcaatctgcacaaaaccttggatcatggggataatccaaaagtccacatctggagtctgaaaacaaaatgaacatgatatcgtttctattctgtacagcactgctactttcttaaacccaaacagtagtcagcacatatttctcagtttattagaagcagaaaccttccattattcaaccatattttctgcttattgaagaacaccacgtaaggaacggacagaggaggtctttccttttctttatggtgaacacagcctaagagccaggctgcctgggtacaaatccaagctcaccatttattaactcactgaggggagtcacccttgccgtcgctgtccttctccgtgaaatagtaacaactacttcatgaattgtgaaaattaaatggataatacacgtagtgtttagcacagtgcctgccatatgggaagtatttaacaaatgtttatgattatgattctcaactcccaattgtattaaggctttaataaaatacaaccaactctgatcactttattataaaacacataggtcggctttattttctggcttagaaaaaaaaagtctcaattcctgaagctaaaatctaagtaataaatgaaaccaaaaagaaaaaacccatttcataaatgtcttattttaaaatgtcatccagctctccctctccctctccccctccccctccccctctccctctccccacggtctccctctgatgcccagccgaagctggacggtactgctgccatctcggctcactgcaacctccctgcctgattctcctgcctcagcctgccgagtgcctgcgattgcaggcgcgcgccgccacgcctgactggttttcatatttttttggtggagacggggtttccccgtgttggccgggctggtctccagctcctaaccgcgagtgatccgccagccttggcctcccgaggtgccaggattgcagacggagtctcgttcactcagtgctcaatggtgcccaggctggagtgcagtggcatgatctcggctggctacaacctccacctcccagcagcctgccttggcctcccaaagtgccgagattgcagcctctgcccggccgccaccccgtctgggaagtgaggagcgtctccgcctggccacccatcgtctgggatgtgaggagcccctctgcctggctgcccagtctggaaagtgaggagcgtctctgcccggccgccatcccatctaggaagtgaggagcgcctcttcccagccgccatcacatct

SEQ ID NO: 6097 - DNA, 2300 bp, Homo sapien
tgctatagaacctctgtacagtccatcagctcagctggagatgttgacccagaacagaggctcctggtggaggacaagaggtggccctggaagtggaagtggggttgcgggtctctggagagccaggcagcggaaggctcagctcccagacttggggacttgctctcactgcctgcctgaaccatccactcctggaatatgtgtgtgtgtttaaacagttttattgagacatataattcatataccatataattcacctatttaaaatatataattcagtggtttgtagtatattcagagttgtgcagccatcaccatggtcaattttaggacattttcatcaccacaaagagaagccccgtactttttagctgtcacttccttaccctccacactaccatccctaagcaaccactaatctacttcgtctctgcatttgcgtattctagacatttcattcaagtggaataatataatacgtggccttttgtgactggctgctttcagttagcataatgttttccaggttaatccatgttgtggcatgtgtcagaacttcattcctttttgtagctgaatagtatttcattatagaccacattttgttcattcttctcttgatgggcatttgggttatttccacattttaaccattgtaagtagtgctgctatgaacatttgtgtacaggttttcatttgaacacctgtctctattaaatagttcttttgggtggaaatggccagattatctgataatcctgtttaacttttgagaaactgccaaactattttctacagtggccacgccgttttacgtttccaccagcaatgtatttcagtacattccagtttggagggttccaatatctccaatctttgccaacacttattttcctttttttctaaatgcagtcatcctacttagtgtgaagtggtatctcattgtggttttgatttgcatttccctgatgacaaacgatgttaaggattttttttttgtacttgttggctatttctgtgtcttagttggaaaaacatgtattcaaacgctttgccaagtttttaattgggttgttgatttgtaaataaagttttgttgggaacagggttgggattagggtcaagtgagtgaggtacgattatgcaactacagggatgtattctatcttaaatgtttgatgctttgtccatcatatttatcatatttttgcattaattttgattttaaaaaatattgcaccaattgtcttgttgacaaaattaatgacaccctttaaaatctgtaccagagaccagtacctcactcacctcactgcagtcccagctgcgtttaaatatctggtggaaaaacaggcaagcattctggaaatgcgcagtcccagcagggaagtaggcctggctgcggggtcgcggcctagggcattggtcgccggatacagagaactagaaaccgggaactgtccagcacgcccgtgcctgtcctggcccttctcccatgcaaggctgagcgcagctctgtccgggctaccttagacagactccatcgtggccagggccgacctctctgcctttcttgtcctttcccgcccgttatcgcaggaaacccccgactctatcgacagcgggaaagaggctctgagactggagaggaaaccacggacctgcagggcccgcctcgcctctccgctaagccaagtggtgttcccaacttgcttcgacttgcttccgtgcgctcaggtcgcctgcccggtccagcagtggtaatggagtggccaggcacgcggcagccactgtctcttaggcatgcgatggcctaggggccagacgctcggtgcagtaccctcgcccggcccgccagcgcccccctccagccgcaggcactgtccctgacgaaggcgaaggcgccagcgaactctcgcgggagtggccaccctggcgcccctcccccgccgggccggggtctgtgccctcgttggtaggcgtaggatgcgcaggatggagcgcgcatgcgcactggccgccagccgaggacggaagtgggcgtccggaagctagacgtgtcccctgggcgtgacttggcactgccgcgtcgcagttgccgcattcgccgcattcgctgcaggcgcgaggttgggtgcaggcagctgtttgagcctcgaggcatcgacggacggacagacggacggactgactgacgatgccgcgctctcacaggcctccgcctaccgcgcagcgggctgccactgccgcagcagccgagcccaagtctgagggcgttgtggctatgactttcaagattt

SEQ ID NO: 6098 - DNA, 2300 bp, Homo sapien
cattcctttttgtagctgaatagtatttcattatagaccacattttgttcattcttctcttgatgggcatttgggttatttccacattttaaccattgtaagtagtgctgctatgaacatttgtgtacaggttttcatttgaacacctgtctctattaaatagttcttttgggtggaaatggccagattatctgataatcctgtttaacttttgagaaactgccaaactattttctacagtggccacgccgttttacgtttccaccagcaatgtatttcagtacattccagtttggagggttccaatatctccaatctttgccaacacttattttcctttttttctaaatgcagtcatcctacttagtgtgaagtggtatctcattgtggttttgatttgcatttccctgatgacaaacgatgttaaggattttttttttgtacttgttggctatttctgtgtcttagttggaaaaacatgtattcaaacgctttgccaagtttttaattgggttgttgatttgtaaataaagttttgttgggaacagggttgggattagggtcaagtgagtgaggtacgattatgcaactacagggatgtattctatcttaaatgtttgatgctttgtccatcatatttatcatatttttgcattaattttgattttaaaaaatattgcaccaattgtcttgttgacaaaattaatgacaccctttaaaatctgtaccagagaccagtacctcactcacctcactgcagtcccagctgcgtttaaatatctggtggaaaaacaggcaagcattctggaaatgcgcagtcccagcagggaagtaggcctggctgcggggtcgcggcctagggcattggtcgccggatacagagaactagaaaccgggaactgtccagcacgcccgtgcctgtcctggcccttctcccatgcaaggctgagcgcagctctgtccgggctaccttagacagactccatcgtggccagggccgacctctctgcctttcttgtcctttcccgcccgttatcgcaggaaacccccgactctatcgacagcgggaaagaggctctgagactggagaggaaaccacggacctgcagggcccgcctcgcctctccgctaagccaagtggtgttcccaacttgcttcgacttgcttccgtgcgctcaggtcgcctgcccggtccagcagtggtaatggagtggccaggcacgcggcagccactgtctcttaggcatgcgatggcctaggggccagacgctcggtgcagtaccctcgcccggcccgccagcgcccccctccagccgcaggcactgtccctgacgaaggcgaaggcgccagcgaactctcgcgggagtggccaccctggcgcccctcccccgccgggccggggtctgtgccctcgttggtaggcgtaggatgcgcaggatggagcgcgcatgcgcactggccgccagccgaggacggaagtgggcgtccggaagctagacgtgtcccctgggcgtgacttggcactgccgcgtcgcagttgccgcattcgccgcattcgctgcaggcgcgaggttgggtgcaggcagctgtttgagcctcgaggcatcgacggacggacagacggacggactgactgacgatgccgcgctctcacaggcctccgcctaccgcgcagcgggctgccactgccgcagcagccgagcccaagtctgagggcgttgtggctatgactttcaagatttttctcctttttgcagggcttatggttaaagttcctgtggggttatatttttcctgcaaattacttcttttccaaagtctgatgttgatgtcccctgaagacagcggcttttatgcgaccattgttgcagtggtcgggcttcatgtggtgctggcaattttcgtcttcatagtgtggaaggagggcttgccccagtggcgggaaaacaaaaacgaatagagcagcttcttcagagctgcagacgtggggggtggggaaatacctaaagggtttttgtcttgtttcttgttcgtattgaacgtgctttttttttttttttttttttttttaaaggggaagggtgggtggggagggaattaaatatttactgcagctaagacttcagtaaaattgggggtggggggagggttgacattttccgactgcctgttacgtgccaagtgctttttgttaaggacataatgtttttgactggggatcatgtttggctgatgtaaatattaatgccaaaataggagctaggatgaaagtaacactgtaattagtagtagaatttatt

SEQ ID NO: 6099 - DNA, 2300 bp, Homo sapien
cagcccgctgactcaaatgttaatctcctttggcaacaccctcacagacacatccaggaacaataattttcatccttcaatccagtcagattgacaaagtattaaccatcacagaggttaagagcacagacaggcaggcagcctgggttggagtcctgacttggccacttactagctatgtcaccttgggcttggtttcctcattgtaaataagggtagatgtgaggttttggtgaatttgtacgtgtaaggcattgaacgttgtctgtcacatggtacgtactatggaaaaggttattatgcttgtattaaaaaatacaggagtatgaatttattacttcagtgtctatagattctataaagtcaagatctaaaagattagctatttgttttggtcgtctcacaaatctatcatctgcagatttatttagcaagtctgaaaaattcatactttcattgcttgtctactcagtcttcgagggatcatgtaagaattaaatttaggaaaaacaattagcaagataagagatgaatggattctccacacgctgaataatagataccagatggcttttgagaaaaagaccccagtttttgagatctgctgtcaagtattcgatgtcccggccaatagttcaaggagtacctgtgttttgaaatagccttatgagtgacatcctacattccatttattgaagtgctgaataacaaatattattgtttctggccaggcatggtggctcacgcctgtaatcccagcactttgagaggccaaggcaggcagatcacttgaggtcaggagttcgagaccagcctggccaacatagtgaaaccctgtctctactaaaaatacaaaaattagccaggcatggtggtgtgcacctgtaatctcagctactcaggaggctgaggcatgagaatcgcttgaacccaggaggcagaggttgcaatgagccaagatcgcatcactgcactccagcctgggcaacacagtgagactccatccaaaaaaaaaataaaaataaaaataccgttcttgaaaaattgaataaatgcattatttcatgatatgtcttaacaagcctgaagtctgtgtgatgtaacactttagaatgagaggccactttctgttctttaaggagatgtacaggtggaaatattcttggctttaactctaattttgttttccaagatgcacattatttttgcatctgtgcaattgatgtctctctaaattgaaactttatcacctctccacagggatgcctctgcactgctggatccgatggagtgcacagacacagcagaggagcagagagtacacagtcctcctgcttcattagtgccgagaattcatgtgatcttagcccagaagttgcaacacatcaacccattattgcctgcctgccttaacaaagaggagagcaaaacctgtaagtgtaagtgttacagcctagtcaactatcgactgttagcctcagtgtgtccagagctgcctgtaacgtgctcatagtggaattgagagtcaggtcttcattcctcacaataagtgttttcagtaatctctctctcgttgccccatttttctcttacattaattctcttcactgaaatgaggacaaaagagtatacaaggctgggtgcagtggctcacgcctgtaatcttagcactttaggaggccaaggtgggtggatcacctgaggtcaggagttcgagactagcctggccaatatagtgaaaccctggctctactaaaaatacaaaattagccaggtgtggtggcgtgtgcctgtaatcccagctactcgggaggctgaggcaggagaactggaggcagaggttgcggtgagctgagatggcaccattgcactccaggctaggcaaaaagagcaaaacttggtctcaaaaaaaaaaaaaaggaggatgcaaactgccttatttttaagattagcatcacttactgacggatatgttaagctttacctactgtcgactgaattgtgctttgctcacgtagttatttttttacctaagacacttgagaggaactggagtgtgtgtcctgactcaggtcttcctttctccttcagttgtttcaagtttcatgtccgaattgtctccagtcagagcagaacttcttgggttccttactcatgcccttctgggggatagtttggctgctgaataccttatattacatctcatctccacagtgtaagtgctgtatcctggtgggaattaggggagtttggtgtgtgtggaagtggaagagcgggaagattgctggtgtcatttgtgt

SEQ ID NO: 6100 - DNA, 2300 bp, Homo sapien
tggaattattcccaaatgaagttataaacaaaaaaacttaggctctttatttcaggatagttgtaaagataaaaaaactacataaaaatgtattgaaagaacagaatgctttacaagcagtgcttcatatgctgctgaatctaggtggccttgtagcacattctgtaggtgtccccagctacactgtgggtgctagagagcctgcaggaggtcagcatcctcctgatttgtaactgccccttcccctgctcagtacagcttcttgaatgtgtcttgtgcagtacttcagacacactgaagcataaaatacaccctatctaaaaattcattctatcatagtagctaattttagtttgttttttgctgactaaactattgtgtgactcacctgatcatagtcttttattatatattgcatgtacattagctttgaaaagtatatttctctttcagcccaaaatggagttaatcctgactgggagaagaaagtaattgagtattttaaggaaaagctgaaggaaaataatgctcctaagtgggtaagcttattgctattttcgagggagagggttggacagactatacagtttctcttagtagagtaactaagtaacccacatgtaatttaaaaatatgtaaattaatgtacttctgcttcaagtacatttgtattaaaagattttggtcttttgctaattaagtttaagcatgtaaatacttatacattatgcctctaggtggcagtaactgactgttacttcctgagacaaatctttagttgcaagagtgtcagttacctttgttttattaccttcattttaaaagaattggcatgtgctagttttaagagaagagctcaacaaagtaaatgcctttttgatcattgaaaagtgttctgaatgaaaagcattttttagcattcttttacattgtggtcaaatgttatctaaaacttgaaagaaatggaagagaacttgggttccagcaattatattgaccattgagatcatttggctctctgatgtggcatgggtgtgtgtgtgtgtgtgtgtgtgtgtgtgtaacagtttgagtctggatataaagtttgtgtatatatgcttaatgttgtatagacaggatatttagttgactgacttgattattttcctttaaggtaccatcactgaacgaagttccccttcattatttgaaacctaatagttttgtgaaatttcgttgcatgattcaggatatgtttgaccctgagttttacatgggagtttatgaaacggttaaccaaaacacaaaagcacatgtaagtattgctgttttcatgaatttgtggtattaattttgtccttttactgttggtggtagttttggttcagatatattgatataattctgtttttctatgtttggggtcataggttcttcattttggaaaatatagagatgtagcagagtgtggggtatgtatctttaatatatatgaaacatttttagtaagaattttttcctaaacagagaatttgtttagctaatcttaaatttatttatcttgtgtataagttacaagaaatcatgtgaaatgttttccttatttggttttatttaggagtttgatgtgacttttttttaatcctctaaagatcttttgaaggggaaatactgttaatgccaaaattaattcctctctccaatatctgtatataatatatgtaaaacaaagaaccctaggttgcaaaattaaatcctttttaattccttcaaagacaaagccaatggtaatctcactgtttctttcatagaaagctgtcagaatcagcctataatacagaaatttaatgaaatattcattcctaggtagctcggagatgagattcaaaagtcatatattattccctaggaaaggcatgttctctttcagatatacttagaaaactctaagaagtggaaaggacccaggagacatcaaatttgagcctaatacatacaagcaaggatttttttgtttgcctttctttctaggcctaaggtacctttctcctagaatgagtcttttatttatgactcttgagcaacatgtgtaccaactctctgttagcctttggtagtgtcacacatggacagcctcatctattttattgacccatttccagatgctgggattaccgagttacattaatacacagctttttatggtatacagtaatgtaatatattagcctaatgtgttaggactccttaaacaagggatactgtaatcattaatacagttgatccattaggcttggcacagtgtttattttatggaa

SEQ ID NO: 6101 - DNA, 2300 bp, Homo sapien
agcaacacccattcagtagaaaccatacttcaattacccacacagccattctgtttttaaatttcagtacagtattcaataaattgcatgagatattcaacattttattataaaacgggctttgtgttagatgcttttgcccaaccgtaggctaatgtaagtgttctgagcatgtttgcagtagcctactgatgtttgataggttccgtgtattaaacacattttcaactaatgacattttatttttttgagacggagtctcgctctgtcaccaggccggagtgcagtggcatgatcttggctcactgcaacctccgcctcccgggttcaagtgattctcctgcctcagcctccagagtagctgggactacaggcgtgcgccaccaggcccagctaatttttgtatttttagtagagatggggattcaccatgttggccaggatggtctccatttcttgacctcatgatccgcccgccttggcctcccagagtattgggattacaggagtgaggctccacgctgggcctcaactaatgatattttcaatttacaatgggtttattgggatgtaactccatcctaagtagagtaagtagaggagcatctgtacaaaacaagctccctacccttccactatgtacctaagagcaggacatacattttcaaaggtgtcccacctcctctttctaccagggacaaaagttagtcaccagagacaactttagacccttatcagccagcgatggcgctagaagaacctacataacacactttactcactacctgtaactaccattagtttctcgtatctctgccttcccactctgctgtttttggaaacttcaaactgctttcgccatttctccccagttattgttctttattgtaaatgctacgtaattcccccattctaagccacctgtttgagttactcttccttgagttttgcccatataagatgtacatgttactaaatttttcttttgccaatccgagctttgtgataagggccgcagtggagaacctagaaaggtagaaagattttccccccttcctacagccccaaggagggtttgagacacgggttccgtttttttccttcagctcctcactttgtagattccattcaggtcattccccttccgtcaccatgcccttttttcattgagtagatatatctgatgggcctggggttttcttaggtacatttcaggcccaggggagacacagtttcattctttttttcttttttatcggacagcctcctgaaccagaagaggttcagagcgactcccacagtttcactcttgaacttgggtattttccaaattgcctcagcaaaaggctgctgtagtcggtcttcgtagcttccttctccagggtatcctagcggcgcgcagtgcaggagcctcgcaccgctccccgacggcggctgccagcttccagacagacgccgacccggtgttcgcaaccagggcgcaggccgggcccggagcgtttagagcgcccgcccctcggtaaggaaccgtccctgagccacagggcctgacgcgactgcagaaggagcgtggggtcctccgaggttccccttctctaaatgtgcaccttcctcagggagaccttgtgcagctgagggaaaagtcaccactcagggtttcgggccggggacccaaataaaagtgctgccatcagcaaaaaaagaaaaaaaaggcacgaagaggaggtgggcggattcccaaggcggtttcgcccactaattttgcccagagatgactctgaggtctctgagcttaatgcttttcagctgttgtgcagactcgctttgccctcttataagcccactatgggagttcccgctacacgccggcccaggggtacaaacgacaacgcgccgcccttggagcgcgtcgccgggccccgcgctgcgcagcctccagcggcgctgcgtgcccttccttttgcccgtctccaagatggcggcgccgccgccgcccctcctcctcgccgcgcagagccgcgctgcgccgcgcgctcccgccgcccctccccacgcgagctccacccaggtcgcaggcagcgcggtcggcggcggctatttcccgccattgtgcgaagtgaaggctaggggcccgtacgcgcccgcctgactgtcgccagcagctcctcggcggccccaccgcagccgccgctccctgaggcgcgggaggcccgcgccccgcggctcgctgtgcgtgggagggcgcgagcgaacgcgggcgaggagcggccgagccgctgaagaggagctgggcgccggcc

SEQ ID NO: 6102 - DNA, 2300 bp, Homo sapien
aatctaatgcacaggccttgctaaatttcccctagtttgctggacttagctcacaacctttgtcctatcacattcttctatgactctcttcatcaaacctagcataaaaacacttggttttaacgcttctttggatcttcatttccttatgaaggctcccatttcttgtaaaacgtgtatgaaataaagtgcatgcttttctcttgttaatctatcttttgttacagggggtccaacgtagaatctagaagggtagacggaaaagatatttttcctcccttacactagccactgctgaattggtatcaagctgcaatttagataaagtaaatttgaatttacagggatttaagagcagacatttccatatcatacatttaatttgcctgttactggccatgaagcgaaaatatgggatttccccttttgatgccagggtcttggcaaccctgtctcttaaatgaatgaatggaatggtggtaatgacctggatttgaaactcaagttttctcaacgtacccaaactcacaggaaccagatgtacaattgagtgtgtcaattaattaccttacactaagaaatacaaactattcgtttttgccctgaagtaaaccagaatgtcaccccaaaatgtgccactttggcataaggattattttcatattattaatttaattataatattattatcttggtaactgaaaagtagatccagacagtccccaacttaacggtggtttgacaagattttttgactttatgatggtgtgaaagcaacacccattcagtagaaaccatacttcaattacccacacagccattctgtttttaaatttcagtacagtattcaataaattgcatgagatattcaacattttattataaaacgggctttgtgttagatgcttttgcccaaccgtaggctaatgtaagtgttctgagcatgtttgcagtagcctactgatgtttgataggttccgtgtattaaacacattttcaactaatgacattttatttttttgagacggagtctcgctctgtcaccaggccggagtgcagtggcatgatcttggctcactgcaacctccgcctcccgggttcaagtgattctcctgcctcagcctccagagtagctgggactacaggcgtgcgccaccaggcccagctaatttttgtatttttagtagagatggggattcaccatgttggccaggatggtctccatttcttgacctcatgatccgcccgccttggcctcccagagtattgggattacaggagtgaggctccacgctgggcctcaactaatgatattttcaatttacaatgggtttattgggatgtaactccatcctaagtagagtaagtagaggagcatctgtacaaaacaagctccctacccttccactatgtacctaagagcaggacatacattttcaaaggtgtcccacctcctctttctaccagggacaaaagttagtcaccagagacaactttagacccttatcagccagcgatggcgctagaagaacctacataacacactttactcactacctgtaactaccattagtttctcgtatctctgccttcccactctgctgtttttggaaacttcaaactgctttcgccatttctccccagttattgttctttattgtaaatgctacgtaattcccccattctaagccacctgtttgagttactcttccttgagttttgcccatataagatgtacatgttactaaatttttcttttgccaatccgagctttgtgataagggccgcagtggagaacctagaaaggtagaaagattttccccccttcctacagccccaaggagggtttgagacacgggttccgtttttttccttcagctcctcactttgtagattccattcaggtcattccccttccgtcaccatgcccttttttcattgagtagatatatctgatgggcctggggttttcttaggtacatttcaggcccaggggagacacagtttcattctttttttcttttttatcggacagcctcctgaaccagaagaggttcagagcgactcccacagtttcactcttgaacttgggtattttccaaattgcctcagcaaaaggctgctgtagtcggtcttcgtagcttccttctccagggtatcctagcggcgcgcagtgcaggagcctcgcaccgctccccgacggcggctgccagcttccagacagacgccgacccggtgttcgcaaccagggcgcaggccgggcccggagcgtttagagcgcccgcccctcggtaaggaac

SEQ ID NO: 6103 - DNA, 2300 bp, Homo sapien
gcaggatgagggcagtgacaaataaataaataaaagctggccacccgagccagcagcagcaacccagtcaggtccccttccacgctacggaagctttgttctttcgctcttcacaataaatcttgctgctgctcactctgggtctgtgccaccttgaagagctgtaacactcaccacaaaggtccgcggcttcattcttgaagtcagtgaggccaagaacccaccggaaggaaccaactccggacacatgaccactgagaactgtcttctcaaggacctgggggtttgtctcttgaattgcaagccttcaaggaggtggttctcattctcattcccagtccctgtggctaccttgctctcttacaccactgcttgtcatgaagacagaaaaattatgtctcctctggataagcatggattaacacacccagatggcctagttgcaggacgaaccaacccttcacactcctcagcacctttcccttagcacaccacagcctctaaaaagcctccaaatttttgtttcagcaaagttgtgttcagttcatgctggacccaattccctagcaatagttttcattaaataaaatctaatttactgctttaacgagtgtcccacttaaaaaatttttcttgacagtaagcacatgaaatcgttattgaattaataaacttaggttctatatatgtgtaaacagctgagcagagtttcattattttgagcgttcttttggtatctcctctcccaacctccaagaagctgaaatatggcttaagttatattttccttcaaaatctctaactatgaaagatgacaattatgtccaagttatccacagtacctcctggattgaagtaagtcagcttactgtggatatagaaagctatctaaaatgtcagatctctaatttcaatgccctggtttctttttttttcttttttttttttttaaggagacagggtctcgctgcacagtgagtggcaagatcagggttaatttggcctcaagcaatattcccgcctcagcctcctgagtagctggcaatataggtgctatgccaccaagcccggctaatttttgtatttttagtagagacggggtttcaccatgttggccaggttggtctcaaccttctgggctcaagctatcctcccgctctgcctcacaaagtgctgggattgcaggcctgcgccatggcgtctggtttgatttctcttttaaatattttttttggccaggcgtggtggttcatgcctataatcccagcagtttgggaggccaaggcgggcagatcacgaggtcaggagattgagaccatcctggccaacccggtgaaacctcgtctttactaaaaatacaaaaaattagccaggcgtggtggcggacgcctgtagtcccagctactcggaggctgaggcaggagaatcgcttgaacccgggaggcggagattgcaatgagcccagactgcaccgctgcactccagcctgggcgacacagcagacttgtctcaaaacaaaaaacaaaaccaaccaaaaaaacaaaaaacaaatgcaaaacaaaaaacaacaaaaataaaacgaaatatttttttctccctatggattaaacacttaaaaaatgttttaccacttctatttctgggtcaaccacaatgttcggttccatccagaaagacaagtgggttttggagagggtgtttggttccgcctagcatgcgaattcccattcccgcacaacgctcttcctcccttcctccttccggtagcgtccagcaggattccgctgttcctccaaaatctttgtcaggagagccatcctgacggtacctttaggaagcccatagatacccgccacaacctgtgactttcagggtcaattgcgtctcaattcgcacgtctatccagaacctgcggggaccacgtccccatcctcccgcccggcctccgcctccgagggtgtcacgtgctagacgcgggcgtgaagacagtgtcgccatgttgatatctggcgtcgccgtgtaggggaagggagagggcggctgactagctacccgtaatttcggctcctgtgcgcaagtgcggaagtgcgctggccaggagcgtgatcggtttccggtcagtggtgtggtaccgggtacccggagacgtgtatcggacggtgggccgcagccatggccgagagaaaacctaacggtggcagcggcggcgcctccacttcctcatcgggcactaacttacttttctcctcctcggccacggagttcagcttcaatgtgcccttcatcccagtcacccaggc

SEQ ID NO: 6104 - DNA, 2300 bp, Homo sapien
tttttttttttttaaatcgaagaggagggtcagaagtacaaaagactaggctgggcatggtgactcacgcctgtaatcccagcactttggaggccgaggcgggctgattgcttgagattaggatttcgagaccagtctggccaacgtggtaaaaccctgtctctactaaaaatacaaaattagccaggtatggttatgcacgcctgtaatcccagctactcaggaggctgaggcaggagtatctcttgaacctgggaggcggaggttgcggtgagctgagatcacgccattgcactccaacctgggtgacagagtgagactccatctcaaaaaaaaaaagtacggaagactgatgaagaggaattgttactgttactcaatgattgtccaagaaacagaaggaaatacttctattttcacgtgattgtcaaatactcactgttactagttttaaaaaaaagactttgtaacaatttttacttgtcaattaaaaaaataaatgaacaaaaaaaaggacttgtggatatgccagaggctccctcttactttgtgttgaatctctccccaagaggtcctcacgcttgttctttatagaaactagaatagtacgatcggccctccgtatccacaggttccgtatctgcagattcaaccaaatactctgaaaatatttagaaaaccacaacaataaaaataacacaggctgggcaccgtagctcacgcctgtaatcccagcactttgggaggctgaggtggacggatcatctgaggtcaggagttcgagaccagcgtggccaatatggtgataccttgtctctactaaaaatagaaaaattagccagatgtagtggctcattgcctgtagtgccagttactcgggaggctgaggcaggagaatcgcctgaacctgggaggcggaggttgcggtgagcagagattgcaccactgtactccagactgggcaacagagcaagactctgtctcaagaaaataaaaaataaaaattacagtttaactattgatatcacatctacatttcatgaggtattataagtaatctagagaagatttaaagtataagggaggatgtatgtaggttttatgcaaaaataatgctattttatataaaggacttgaacaccagggattttggtatctttgaggggtcttggatccagtgccctgcagaaaccaaagaaagactatatctggaggaagagtaagaagatggttggacagtgaagattttggagtcagaaagtcctgggtgatattactccagcccacatgaaaaaaaagaaaaagtcagtcctgggtggcaatgaactacagttctcccattgctgcttcccagttgtgtcatcttgtgcaactgtatacagtacttaaaatgtctattatgggttgaattgtgtctccccatcccccaaatatgttgaattactaatccccagtgtctcagaatgtgaccttatttggaaatagggtcattgcagatgtaattagttaaggtgaggttttactggaataggatgggccccaaagccaatataacttgtgatgtgaagacagacacacagaaagaatcccatatgatgatggaggcaaaggctggagttacactgcaagccaaggaaagccagagattgccagccaccaccagaagctaggaagagggaaggaggatttctttatagctttcagaggaacggtggcctgccttcctggcacctaattttctacttggagcctccagaactatgggatgatacattttttttctaagtcactctgtttgtgatactttgttaatgcagccctaggaaatgaacagaccatctaaaacttggttttcttcattatataatggggatcctgttacttaggcgtgattgagagtaattacttcaatggtatgtgtaaggtgataaaaaatatgttaaccagtcaggaaatgagaactgctattactgttatttttatcaccattatagtgaccgttttcctccatactttctctccatgtggtataaatttgtcatgttggaatatatgttgtttcccccattataggctgaatataaaaaagctgtaaccactaatcagtggcaccgaagattagagtttccaagtggagagacaattgttatgcacaatccaaaggtaatgatggtgttcaaaattttaaggtattaagttcattttaatatttttctgtgtatgtttgataaattgttcatttttagtaacttctacagtgggaatgtttttgtaacaagtgcattgcttttaaaatactt

SEQ ID NO: 6105 - DNA, 2300 bp, Homo sapien
ctcttgtcaggacaattctttgctgtcgcagtgcagaccacttaacttccttagtgtaaaggccactcagtactagcagtgctcaccaggcactgtgacaattaaaaatactctgctcaattttgaatgctcccaattgagaatcataaatacaggtaatagttatgctggcacatgtctagattttagtgaacaccgtaatgtttcagggtacatagtttaataaaactatttctacaaacagcgttttgtctatgttaggccctattgtaagggtgttttctttctctgtgtgtattcctaaacttcattttggtcattctcaaattagggaagatttttcattccatgtagccctgttttttctgtttgatattctctttagtccttttgacccacaagttttgtcaggtgtccagatttgcagttaactggaagaaaaatggaagagtaatcttccctctttaaaaataaaatagaaatctttgcatatgacttatatagcaactaactcttcagagaatcccaaaattcatagtatagttataggcacaaataactttaaaaaaaaaactgaattgtttttgagacagcatctcactgtcacccaggctctggagtgcgctggcatgatcatggctcactgtagacttggcctcctgggctcaagtgatcctcccacctcagtctcccaagtagctgggactataggtgcaagccgccatgcctggctaatttttaaattttctgtagagatggggtctcactgtgttgctcaagctggtcttgatctcccgggctcaagcggtcctcctgccctagcctctcaaagtgctaggatcacaggcatgagccaccacatgtggcagcacaaatttttttggtttacctttatttatacttttaattttttttttgatgtggagtctcgctctgtcacccaggctggagtgtggtggcacaatctcggctcactgcaacctccacctcctgggttcaagcgattctcatgcctcaacctcccaaatagctgggtgtacaggtgtgtgccatgacttgtggctaacttttgatttaaatttttttttttttttttgaggtggaatcttgctctgtcgcccagactggaatgcagtggtgcagtctcagctcactgcaacctctgcctttcaggttcaagcagttctcctgcctcaccctcctgagtagctgggattacaggtgtacaccaccacactcggctaatttgtgtatttttagtaaagacggggtttcgccatgttggcctggttggtcttgaactcctgacctcaagtgatccacccacttcagcctcccaaagtgctgggattacaggtgtgagccaccgcatctggcctatcttgatttatttataatgactatctacagaaacaactcatagtctgtggggttttcttagtgtattttcaggagtcaaaaatctaaactttaaaaaaatctgtaaatttaaggtagatgctgactgaatgtgctgtatttttctttttaaacaggaatattaagaaaatcactttgccaagtattggtcgatttcgtcactttaccaatgaaactttgctagatattttattttataacagccccacctactgtcagacaattgtggaaaaagtaggaatggagataaaccatctgcatgcactctttatgagtcggaacccagacttcaaaggaggtgtctctgttgctggtcacagtttaggtaaaactgtcaaatattcacattttaaatacaatttttgttgagtcataactgctttcagtgtaggtgatattgttagtgcaaaattaagaattacagattttaagtttcagaaaaggtagaaatgaatgctctgagtttagattctgccttttctatattcacctctagtattacctagggaatgctatgtattttactttattctgctgtttgataaaataattaattatcaggtcttgaataacatgtaacttctgtatgacttttgactatagacagtgaaaaaagaattagtgttataaaagtacctactacattataaggcaaaatgtttctttttcataggttctttaatattgtttgacatcctgtctaatcaaaaagatttgaatttatcaaagtgccctggacctcttgctgttgctaatggagttgtgaagcagctacattttcaggaaaagcaggtacgtctgtacgtggccaattaacatttcgatttagagtctatggagctgaacaattttcaaaagtctgaactgtttcttgaaacttt

SEQ ID NO: 6106 - DNA, 2300 bp, Homo sapien
tttaactttcattccaactctgtaaggtgtgtctattttagagatgaagaaactgaggctcagaaaatgttaaatgactcattatgtgccacatagccagagcttggatttgaacgttgctggacctgactctagagcctgtcctgcagtggctggaagagttgttaatgagaagagttaaattacaggatgtcctgtccttggatccaagggtttgggacccttaggtatcatttagttcaatgctggggactcctggcccatcagggccacctaggggagtgttttaaaatccacattaccagacaatgttcacttggagtcttaggtctgtggtagggtgttttctagaaggttctgacccttctcaaattgaagtctctgatttagttcagcctcccccattgcagaggccctgggtggggaagcagcttgctccacagcatggagtagctcagttggtgagctggggcagagagcagaggggcagagagcagctggggcagagaccagggcagagagctgatgcccagagagggtgctcctccatgctgctctagaggaattttggagggctgatagcagaagtgacttgcaccccagtgaggggatgcaatagggattctgtaatagaagtgctccagatttagggctggtgaagggttgactgggttctgtgatgatggcactgcaggagtccattcagtcatctggcaaatagctacaagcgatgcctgtgtaccaggcagaggcgctgggggcccagtgctgagcagaacagtcatgggtaccactgctttttgaaattacataaatacacagacttttaggacttaaaacctcagagttaggggaggcagggagagaagggggaagagaaggagggagggagagacagggagagagacacagcagatgggtggattttaggtctcttagatatgcaatagaattgagagtcaggctgatcaaagtgagaatagtttcagtgtcacctgttcaaagtcccaaatagatgttaacttctgtggtctctgagtgcctacagtggcccagcagtgctactgggctctggagtgtctcctgccctccagagtgacactctacagtgacagccctggagtggctcctgccctcacaccctcacaggggagctgaagctgcaaacagcacatgctcatacaacgtcccaaatctgggatagaaagcggggctgtgggactcctgattctgtctggagactgggacggctttagggtgaccaactgttctggtttgctcaagactgaggggtttcctgggatataggacttttggtgctaaaactggaaaagttatggacaaaccaagacagctggccaccttagagggtttcctaggagaagctcagctttctcctcctctcccgctcccctgcgctcctcatcttggatcatggaactccttttcccagaagcccaaaccagaagcctaggaatcagcttcagccactcctgcccacaggttctccatgccatccatttcctccccaatctgctagtctctcttgtagggacagctgccgcaaccccagcacctcccactttgccttctcttctctcctctgagtcccatcctcaccatggccagggccgccattttgaattggaattctcattccatgctcctctgccaaacctctccttggctcaaaatcaaagtcctctagcctggcactcacagccccaaatgacttggcttcttttgccctctccaactgcatctgaagtggtgctgaacttagttcctcaggtaaagattggctggagagctgggaggtggcctgatggctgagatctgaaaaagcaaacccctgcatctctgcccctttcttccccccagtttttctcttggcagtgactgcttttcattgaccaaccgatgaagacagcacacgggcagctgtgccagttactccctcccttatgttccacctcaaacccattttgttttcaagagaccatgctgctgccctggccttgccctattctgacttcagtttccagtttactttggaaccccaagtccttggagtctttgtacacacaaagctactcccttatgcatggaattggtccttctggcaggtagtgatggaagagtctgcaaagtctcagtgattctttcagtccttcccaagcctttgaaccagctgagaactgacagcagggcctgtctctttccccttccccagcaggctggattcccaccctgagggtgcatagaaggggggcctccttgggaacttcccacagcaacag

SEQ ID NO: 6107 - DNA, 2300 bp, Homo sapien
gtccctcatatacgaatactaatcccattaattagagtcctacccttatgacctaatgccctcccaaaggcccccacctcttaataccataacattggaagttgggattttgacatatgaatttgggaggagacataaacactcagtctgtagcatctctgaagagtaaatagcaattctgatacaagcaggagaatttcactggcaacactgttatggtaatcaggtattaaaaccctaattgaattataatccctctaatcgctgctgccaccagtaggtaatgatacaatttatcctcttagggaaccagattccccctataagaaggttgaattaataatacagcaaaattcactatgttgatttttagaaacattaatatgtctgaggggtattcaacctaagtcagatgttgctccaggcaccagctatttgggagaaaaaggcccatctgagccaaagccaggacaagacaagcagctttaggggtgctaaggagtgagaagcctccatacaccagggctcactccttaggaggcctcctgaaagaaggggagcaggagaggggcagggagaacctgcatctatccaaggaagggggtgagctaagctgatggatacttgaattattggagaaaagtgtgaaattagaaaaacccatgaaaagacccagaggcttgtgagcctcttagggattgcagaatgttttcgttcacatggaaaccaattgcacaaaaagtgctcatacctgtattccaggagccagcaaggatagtgtgtatgcaaagagagcttcagtgaaaggggagtttcaggaaatgatggacccagccttccttaaaaagaggagtcagatacctccttgcacgcatgtgcacacatgtgtgtacacacatgcagacacacacacaatagagattgtctaaaggtgggtagtttatatagctctccctggatcatataaactgtgtttcacttggacttgccattgactgaagcagactttgcagaacattccaatcttcagctggttatcctggactcccagtcagccccatatctacaccctggagctctagaaagatcccttcctggcacagtggttcacattgtaatcctagcactttaggaggtggaggcacgaggatcacttgaggccaggagttcaagaccagcctggacaacatagtgaggccccatctctacaacaaatttaaaaaaaaaatagctgagcatggtggtgcacacctgtaatcccagctacctctgaggatcacttgagatcagaagcttgaggctgcagtgagctatgatcatgtcaccacacttgagccctaggcgacagagagggaccctgtctctaaaaacaaatagaaaagaatgatctttgaagtcacactcactgctgataacttgagggtgaacccccaaggcaaagcaggggctgccttttggggttgatctgatgaatatcatcaaaatagagtgattttccaccctcataatggacaagagcaaactcagccatgcttgggatcaaatccagctcagatactttcttgagcaaattacgaacctttcaaagattcagtgtcctcatgtgtaagatgggtttttttgtgaggattaaatgaagaaagcatgtatagaaagtgcttagtacagggcttggtacacggtaagtgctcaataaatgttagctcttgtgattggtcaatgtgagctgtcactgtgttgtgaggcacgggctgttctacatgaatgcatttcccagaagagtcgtgtcttgagcctctctcacatgctgaccattttgtttaaaatatttgatagatgaattctacactccctggccttccttgtccagaggcttcttcctaagaactcagtgccaggattttgagtagcactggatattctgtgcaatgggttcgttcatccaatttccaccactttacagatgaactggggatcagagaaggcaagccacctccccaaggtcacacagcttgtgagagcaagacaacagcatcgaggcctatgtaatagcagagccattgcttctttggctctgcggaagcttgtattgtggtatatctgtggtgtagctttgctgtctcctgtgtcaatgtcaggaggacaggctgagctcctgggaccagaacccctcagattccaggaggagcagagaaagcacagatggcctggagagtcccaggggtgaggccagcaagtactttcttcccccaggtgctcagagcatcctctgagttgccaaacagactcccagaggggtc

SEQ ID NO: 6108 - DNA, 2300 bp, Homo sapien
acactcgagatgcggtgtgtatattatagcacctctcaatgtgttctagtcacatttcggttgtttaacagccacatgtgagtggctgccatactggactgtacaggtgtagacattaagaatcagactttttccaatttcaacacttgtcattttctattcctatgaactattatcataggattgtgaactattatacaatattctttatttaatgccgatctatcatttcccttattatatttccaaagaagctccaagagggttgtatttcagctatgaccaaacacttcatcaatccacattcctccactggtagggtagtcagggacttgcagtgagtagaagggctttttacgtgaccctacatgatgaggaagcattagagtaaccaaaggctagttgcccaggaatgctctggttttgctgcctaattcaaagaggtgactggtgcttgtaatcccagcactttgggaggccgaggtgggggatcacctgaggtcaggagttcaagaccagcctggccaacgtggtgaaaccccgtctctaataaaaatacaaaaaattagctgggcatggttgtgggtgcctgtaatcctagctacctgggaggctgaggcaggagaatcacttgaacctgggaggtggaggttgcagtgagccgagatcatgccattgcactccagcctgggcaacaagagcgaaattccgtctcaaaaaaaaaaaaaagtgactggtattttggaacaagatcggggagggaaacacacattgggcagatgctaggtgccttattgctggaaactgaccccctctgagagtctccagctgcttcccagaggtccctagggagctgctttctcatccatgtgcaggaagctgagttccagcccagtggtgtcctggaactggttgtaccaaccccatggtgtatatttctcccaagtctgtgttcagcgtcacctagtttgtagcttgaaattggccacaatgagagtatttataccatggaaattagcaaatgctgcaaagcagggcttttcccctccccagaggactggcttattcacacaccacttgttccagcctctattttgctcccacacaaaacactttctgctgcccataactgctctggggccttggctctgctgtctcagctgcttccatgaagggcagcctcactggcattgcacagacccagcagaggagagggacctgctctccccacacctcctccactctttcatctgcctaccacaaaacaacctcggttgtaacgttagccaataaaatagtggtgtgaagatccagagtttttcctaataaaggtttcaaagtggcccaagatctaagtttgaaacaaacaactcaaatatccatcaattaatgaatgagtaaataaattgtggtctctccacacaagggaatattatttagccataaaaaggaatgaagtactcatacatgctccaatgtggatgaacctcaagtatattaacctaagtgaaacacgccggacaccaaaggccacttatcctaggattccattagtatgaaatgtccagaataggcaaacccttagagacagaaagtaggttagtgattgccaaggcctggagagatcaggagatgggaagcgagtgttaatggctttggggtttctttctggggtgatgaaaatgttctgaaatcagatggttgtgatggttgcacgaccttgtgaatgtcctaaaacccactgaactgtacacttaaaaatcatggatcttatggaacgtgaattatacctcaatagaaaaataaccaacagcaaaattagtgagctgtgggcagttcagctccctttggagcttatggggaggtggcttttcagtagcatgccctctgtctccaaggatgcctggagcaagggggtgcagcttcctctgctttgtggagaggataaggagggcctcgcttggcttcctgctgctcccctgattagaagcccttctaaggggatcaaggctgtgactggctatgagaagagaaaactaatgctccatttcccactcagtccctgggctgctgaactcttccccaccacttgaggaggagctacgctgggaagagatgagctgatgcccagctcagtatgtgtgggggaggggggtgagctgatgtccagcccagtgtgtgtgtgggggggagggggatgagctgatgtccagcccagtgtgtgtgggggcagggcaatgagctgatgtccattccagtgtgtgtgttgtgggaggggggtgagctgatgtccagtccag

SEQ ID NO: 6109 - DNA, 2300 bp, Homo sapien
gtcaggaaactaaaatacctcttagtccaaatagacacttccactgaataagtaaaggcctttcctacagcgtctgagaaggccaccacagtcatttctttccttctgtcagacataattcctcagtttagccttccacctctatacagtctgataacagaccagcctttattagtcaaatcagccaagcagtttttcaggctcttagtaggtgtcagtgaaacctttatatcccttacaggcctccgtcttcaagaaaagtagaacggactaaaggtcttttaaaaagacagctcaccaagctcagccaccaacttaaaaaggactggacaatacttttaccactttcgcttctcagaattcaggcctgtcctcagaatgctacaaggtacatcccatttaagctcctgtatagacgctcctttttattaggccccagtctcatttgacaccagaccaacttagactgtgccccaaaaaacttgtcatccctatcttttgtagtcatactcctattcaccattctcaactactcatacatgccctgctcttgtttacactgccggtttacactgtttctccaagccatcacagctgatatctcctggtgctatccccaaactgccactctaaactcttgaagtaaataaataatctttgctggcaggactatgctgaatctccttaggcactctctaatcagatgtcctatgtcctcccaattcttagaccttttatacctgtttttctccttctcttattccatttagtttctcaattcatccaaaaccgtatccaggccgtcaccaatcattctatacgacaaatgtttcttcttacatccccacaatatcaccccttaccacaagacctcccttcagcttaatctctcccactgtaggttcccacgccacccctaatcccacttgaagcagccctgagaaacatcacccattctctctccataccaccccccaaaaattttcgccgcctcaacacttcaacactattttgttttgtcttattaatataagaaggcaggaatgtcacgcctctgagcccaggccaggccatcgcatcccgtgacttgcatgtatacatccagatggcctaaagtaactgaagatccacaaaagaagtacaaacagccttaactgatgacattcaaccactgtgatttgttcctgccccaccctaactgatcaatgtactttgtaatctcccccacccttaagaaggttctttgtaattctccccacccttgagaatgtactttgtgagatccacccctgcccaccagagaacaaccccctttgactaattttccattaccttcccaaatcctataaaacagccccacccctatctcccttcgctgactcttttcggacttagcccacctgcacccatgtgaaataaacagctttattgctcacataaagcctgtttggtggtctcttcacacggacgcgcatgaaactaacaatgtattggggagagaaacacacatctgcaaatatcattgctgaaaagaaatcattgcattaagtgctatagttaaagcgtataaacccaacactgaacacaaaggagggaaggactgggtctgacctggagagcagcagaggagaaagtgcgaaatgaaaggtacccagcaacagacaaagggtcacacttggccccagacatagtgcttcttcctcaagtgcgaagggagtattgcaaacaccagatatgcagtgttatctgtatttggaaattgtttatattcaggccattcacttcattcagtctggcaatttcattcaattaatctcattcatttcttaattaatctcattcattattctctgtaaactccacgagagcggagactttgtgtcttcttcatcggtagatcccccatgcctactggcactagtagttgccctaaattcacttatcaaaggcagcaagaataactgggactcttctctcttgcttttcacgatttccagcagggcacaaaggcctacagtccccacctgaaaaaaacagacttgactggaggcagcgcctcttcttccaaatacagccccagctgacgcagattagcacaaccgcctaagcggcggaactctggagagtgcggaacctaggatcctaggaaactgaaggcaacggaacctgggggcgatggaatccgggagcggtggaacccggagcctgtagaacttgaatctagaggaacctgacagcggcgccgagggggccacccggactctgtttggaacggaagcacagtgtccgccgcttcctgg

SEQ ID NO: 6110 - DNA, 2300 bp, Homo sapien
aaaaaaaaatccaaactccttcgtaatcttacaaaacttcaggacagacagctgaatctctctggctgcctcttatttcatcactcctacaagtgtcccatctttagccatctttatggcacgctacttacttctgtgtatattcttgcttttccctgcaatgctccttgtcaattttttacttggctaactactgtctactagtcttgaaactgtagacttctgtgactctcctcacaaccaggcaatatgcagctcctctgttttctcacagcgtgttacgcaagtctcacttatcacactatcacgctgtgagtcttccttataagatggagaattatctgagggctttcatctccatatccatagcatatggtaagtgctcaaaactaaggaatgactgagtggtcttgtaaatggtagaactttcatctgccttaaaatgatctaacaactagcatttaataactcaccctgtattgacattaagtcatatatatgaaaattctaggctaccccaaataggttgttatatttaaaagctattcaacacttacacgtaagacttaatgagagcttagtgatacacagtattaaactttagactagacaacatgttagcgtcaaagtgggattttacttacctttacaacatcagctttatgcttttctaaaacttgaagagtttgggcagtaatggaatcaatcactaccacaagtgaatgacatccataagcaattaaaccttgccagcccctagcaaaacagtaatgttaaagtttaagtacagaacaaagcaggacgacttctttcttgccaagcctaaataaatgataagtctaattcatatgtaccaccattaataaaatcatttaaacccaaaggccagtatttatcattatcccacttaaataaaagatctggctaagcttaaaatgcttgttgaaattcacttttcattcggataaaaaaagttctaaaagatatgaaaatagagacccgaggacataaaaaggaacttgtgccctctgactgttcttgtaggcatacgtctttcgcttatccgatttctaatccttagtatccacaatgtgcctggggatactgcgactaatcctagtccttccaactaaataaaacgacaaacactgcacaagacgtttcagtcctcctaacaacatcccacagccacagaattttgctttacatttgtctaatgagtagttttcagagctgcagtagtaatttatagtgaaaggagagagtaataaagacgacctgttgaaggcaggaatgttctacacaggaggagcccgaaaagaggtgaaaaggacaggtgaaagaacaggcgcctagcacagggtctggcacattgttgaaagacaacaggaatacaagacaacgaaaaagaaaagacaggatgggaaagagaaagtgcacagggaattaatggtggagagagagaagcctggaagctggaggagaggaaaagagagaggaatggaacggcaaaagggcgaggtgcagagaaaacagcagagaaatacgcgagaaagaggggaaatgtatttgcatgggggaatttcccacacggggctattatcacttttgtaacaacaaaaatccaccaactgaaagcaagctcattgcgtgagggcggctccctgccttagcgaggccaaactaaccagggggtgaaacctcttgtccttcccccttccccctcacacattcctggccgatcctggcgacctggaagctcggcgtcctcaccagtccaccgccgccttgttgtgggcgttgagggcccccgtgagggtgcgcgccgacaccttgaagttcactgtgtagggcaacatcccggcggccagcccaggacctgggcgctgacccgcaaccaggaagcggcggacactgtgcttccgttccaaacagagtccgggtggccccctcggcgccgctgtcaggttcctctagattcaagttctacaggctccgggttccaccgctcccggattccatcgcccccaggttccgttgccttcagtttcctaggatcctaggttccgcactctccagagttccgccgcttaggcggttgtgctaatctgcgtcagctggggctgtatttggaagaagaggcgctgcctccagtcaagtctgtttttttcaggtggggactgtaggcctttgtgccctgctggaaatcgtgaaaagcaagagagaagagtcccagttattcttgctgcctttgataagtgaatttagggcaactactagtgccagtaggcatgggggat

SEQ ID NO: 6111 - DNA, 2300 bp, Homo sapien
gaggagattcagcatttaacattgcctttgtttccactagctgtgctaaacttccccactgacttttatagattaaaatttttgaattctgatttttacttgtgaaaatcgcaatgatcctaaagttcaggcaattgaatgcattaaaaatttgggcacaaaagctggatactcattttaaatacattttcctgacttaggtgctgtgcattctcattcagcagtaaaatcggagtgtttttcttatgcaggtgaagatgtctcccatcctggttaagagccaaggctccgggggaagctttagctatgagactgagaaacttctttaatcttactcaaatttctctctcccagtctctaaaataaggctttaaagtatttcatagggttgttttaaagatcaatagatccaataatgtaagtaaagcatgtaatgtcattgatacatagtaatttatttagaagatgtcggctgttattaagaaattacaactgaataaaagtttattttaagtaatttgatgtattcaaaataggtttctttctttttcctatagcaataatctgtatattattgctttggcaggcttttttgtttgttttggcattcattttcagatagcctttatttttaatatgccaagattactctctctaggcttggtgagtaactacttgaaaaatatgtggtaaaaatataaattgctctacaaatacattttgcacttgtgtgtaagtatcacttctatatattaagccataggctggttaagttcactagttaatttatctctcaccctgtgccaaaatgacttaagattacttcttaagtatcttaagagaactttctattttttatgtattccctctcataaacaagaaattatttggcagtctgaatagttttataagttatgttttatatttcttaagttttctctcatatgaattatatgtatatcttgagtattggggaaatacattatttcttcaagtagaaccgctctgggtgctttcacatctattaattcctggactcttactacaattctggcagtagtaatattcccattttacaaataaggaaaactgagtcccacaccaatttaaataaagttactcaagctcacccaactaggacatggcagtcgggattttaatgcaataaaaattcctctttctagtcttgtgaactaactttattttaaatttcaaagccttttaataaaattatgtttgtaaaatgaaatgtaaaatgaaaatagtacataattgtatgtctattcctattgaaatatatttaatatagaaaaggtcattgaatgtatgcaacaatcacaaattattaaaatgatttttcagaccctaacaatctcttaaaatccttatagtttcacctgttttatttacacacaagaaaatgctgcaatataagtgaaactttgtttcaaaaaagatttaagacagcttaaaagtgaatgaaggcagccaaggggaagttacttgcccaaagccatacagatagtccagtaactcctggtccaggggccctaattaccctaaatgttgatgtttttcatcctgagtcttgattttaacagtttgcctagtacttttaatgacaaagtaaaagtaaaataaaactgtcttatgcatgccagctattattatattatcatttaccatgtcttgtgtaatattaataacttaatattctactacttaatatttcaaaaacttagaaacactgacatttctacccatcctatacaatattattagcatttggattttggtacatagtagagatctaagttttggatgccaacccatgttggtcacttcagggaatagttgtacatttttattgtcaatttttatgtgtaaagtacaaaattaaatcttttattaggtctgatataaatgaagtctttgacccaagtgaatgtttacttttttcagtgctgaattcataactctcaatgattgccttcagttggcatacctgccttcaaaaaggaatcacatgttgttgctctatcctcgagagattttaatccttgaccttgaggtgaatcagacggtgggtgtgattgcaatagaacgcacaggagttccatttttacaggtatctacaattcataaattatattccccaaaattattaagaatgttatattaaaagaaggccataatcttgcataagtcttgtcttcagttctccactttctcttttcaatttatcaaaagactagcaacactattttagattgttttttttgtctgcacttttgattggt

SEQ ID NO: 6112 - DNA, 2300 bp, Homo sapien
tgaactcttcacttatacttacagtgcatgtgctgcatctcctgctaaaatacgcacataggttagtaggaatcatgttggcagtaaaattaaaatgttggctgagccaagatttgtgctaagaatttcacacatgcttctgaaaaatcaaacatgttgtcttttcaaacacagaaagttttaatagctaattaatcagagaggtattaattttaagtaaggtttattatcctggattagtcaggttatagatgtcactaaatacttgacttatacatgttaagataatatttatggttgagtaacattgaaattgattataagtgttacttgggatactaactctgagggatatactacttatcagataaatgtgaatgatcatacaaagatactccatttttatatgaatttttcctcttcattgccattttgaaaataatttgtattttatattcagagatactgcccaagagaacactaaaatcctgctttgtgtttcagttaatgcaattttagtattataatcaaaagccattaagaaaatttcacagaaatacaaaaattagctgggcgtggtagcatacacctgtaggctcagccatttgggagcctgaggtgggaggatctcttgaacctgggaggcagaggttgcagtaagttgagattgtgtcactgcactccagcttgggtgacagtgagaccctgtctcaaaaaacacaaaacaaaacaaaacaaaactttcacgatgtattataaaaatgtctgaatttattagcagtaaactcaaaacattttagattttcatgtccaaataaggttaacttttagaaagttgtttttctaccttttattaagtgtgtttttaaaaaatcataatctaaagcacttgaaggttgtatatactgtgccggggactcatgacagcagatagcacaaagtgtgtgtgtttttaaaaccatgatgttttaacttgtgatgctttatgaatatctgttgaatatcttctctatgcttataaacagagaaagcctttgaagcttataatgcaatggaagatacttagaagtaaacaaaatagagaggtatatgtagattttcttaggtcattagtttgtgtctttgtctggtaggctgaaactactgtcatatgactctctccctggccagattttaatagtcatactaatactgatgtgaatcctgataattaaactatcttgtcattacatttgtagataaagttttggttagaaatgattttgtatgtgttaggtatggtaatacagtctcaaataaaaggtcatgttaagataaaaggtcatgcttactttttaattaatttgtgtaataaaatttaggtctttggaaaacttatttttcaaataaatgaacctttcaaataaaaaagagaattagtttaacctttatctcatttcctattataggggtattgaatggacaagtttgactagttttctttcttttgctacctcaacaccaaacaatatgggattagtgagaaatgaacttcaactggttgatcttccaacaggtttgtttttaaagatccaaataggtttgtcatattgaataaacatgttgccatttataaaacatgtttgaaagtacttctttcaccttggaatttttttttatatttcatgcttatatatttattcttttattctctaataattgccctagaaaggcctcatcattgtttacatggaaatgttgttggcacaaatacatggtaaaatggaggaccattagcctgaacagacagattcattaaaaaataggataccggttctacttttaagtgcattgttatatgtaaccaactttaaaagatcgatttaaaaataactctgtcaatggactttattagagtctgtgctggaaattttggcttttataggaaacacttagaaaatttataggttaaggattgtttttaaatgctcaaatttaaaacttgtaatagtctctggctgaatgaatagagaaacttaatttgggattttgaagattctacagtaggaaacgtcccaataaggtaactttttcagaattgaaagcctaaacccagtgaatttcaaaataaagaatttgaaaatataataaggaaagagtttcaaattattttctggtgtatgcagtagtttcaaagaggtttttttaaaaataaaattgtgatgagtttctttaaaatggtatagcaacacgaatcatatgtagatgatcttaaccaatgagagcatgtgtatgtatgtgtaaaatgaattaaatcaaat

SEQ ID NO: 6113 - DNA, 2300 bp, Homo sapien
agctatgggatgttaggacttgtacccttcttagagagatgtccaaaaacttccctacaataactgctttggtaagttacaatttaagaatttaatagcttatttaggtatatatgtatgtggtgaatgttttgcttaagcttgaatcaaaatcattactgccaatgtcatttttttggttaaaaatgtgtgttcagagaagatgatctaaataaatggagataattcttattttcttggataaatcaacctaatatcatattagtgcaattccaattcaagtttcatttggatattttgaggaatatggtaaacatattcaaaaatgtttatgaaagaataaaggtcctaaatagctaagtcatccttgaataaagaggagtaaatgtgggaggtgtgggtggggttggcccttcctacctgatattagtacatcttacaaaaccatggaaataaaatcagtattgtattggcacaagaatagaaagtgagtcaacctaataaagagctcaggaacagacccatgaatatttggggacttaatatacagtaaagtagcacaaatcaaagaggatggacagactgtgtagtagacggtgttgggaaaactgtctcactttatggagaaaaatacttgatctctacttaataccgtatagagaagtgagtgtcacaggactaaagacctaaatgtaaaaatgtaaagctataaaattgaatataacaaaatacaaaatattgctgtgacctagaggcaggaggagacatcagaagctcaaaccaaaaggcaaaaaaaaaaaagaaacaatgcatttaattaatcaagattaatgctttttgtttgatgaagatgtcaaagttaaatacagaagacattttgggaaaacaaattttccagtgtctaaatttaactagaaactcctgcaagtcaacagtgaaaaaaagcgggaaccctagtgagaaaatgaacaaagtctgtgaagagctaatgagaggcagagaaacctaaaaggccaacaagccatataaaggaatgttcaaactcatcagttttcagagatgttcaaaccatgatatggatctaccgtttagactaacaaaaactggacagccatatagtgttaagtacgggtggaacatagggtatgggaatccttgtgcattgctggtaggaatgtagaccaatgcagccattctgtaaagcacgctggcagcacttgggcaaacacagacatcttctgtgtccgctgagctcttggtcgtaaatgaacttttgcaaggatattgactggtgtgttttgtcatgatgtgagtttggagaccatctgtgtgtttttactgagagaggagacagattaacaattggctgatgcacccatggagtattacgtagcatgcagaaacaggaggaagaggacttaaatacagtggaaagagtaagaaacaggatgaagtatatatatatatatacacacacacacacacacacacacatataaacacaatactatttaggtaaattagataataactacatgttaagaacttatacatatgcgaggatattggactaaaaggctttacaataggtggaatataaaagaatatataaataaaacaagtgattttggaggaatctatggatgataaaggaccctggttcgagaactgtgattgtcttatcgtgtgcacataagagatgggggaggagacgaggaataggcaatactatcattgaattcattattttcattttgtaagtattttataaaaacatcaaaaggtcagaccttttggaagtttgccataaaagctccaattaaaatgcattcatttagcctttctctaagtaggtaaaatctaaagaacaaatgtggattcatgtgtagtaataataaatgatactgggcagtggtgtgtgtgcccagctcttctggacgattctttgacagaaggaaacctagcacttctaggtttgtctgcatttgctttacaggagtggtcaccatctcacaacttgaagagcctgagaaagaagcaacttgcaactcgagaggccatggcccgccagaccgtagtctcagacacagagctgagtattgttgaatcatctgtgatcaggtacagtacagtgtttcttgacactgtcatttgtgccattagcatcatgtctgggaagttgacaagtatcatcggaaggtgtctatggtagcaagttggactctgcttttgaacatacttagtttcatctttcagtacatacccagattactaaaaagataattttatcatttttagta

SEQ ID NO: 6114 - DNA, 2300 bp, Homo sapien
ttatgacctggtttcagaagtctcttcaaaggcaacttcttaattaaacattctattttatggctaggaaagtagatatcttaaaatgttgcttcatattatatacagaatttcatttctttaatatttttttttattaatggactttattataatattgatttttaaatccagtttttgttttgtttcttgactattaccagagtttttacggtattcagtgtgtgtgctagtccactaatggtcaattattcaaaccactagagttttcttactttttaccatggataccatttgaatttttatgttgtacaataaatgcaaaaataaaatttcttttaataaatagagaagtaattgagcagtaatattatttaatagctaacatgtattgactatttactgcatggcaggcattgctttaaggcctttgcctttataaatttattaatactagcaacaactcaagtttcatgaacttaccctactttatggacaataaatccaagacagaaaggttaagtaaacatgcctcaaatcacataccagtttcaagctgggattcaagcccaggcagtgtgactgcagagcccaggctgctgagccctccatgataccacctctgagcatctattagaactgcaagttcctttcttcctccaagttagattgactacagcagcatttcattcttatgttgtgcttctatatgtaacttctgagcaaagctttctgtgaatttaaactgcatatgcctttagtaaacagcatctcttcaccttcatgattccacaatgttccaaaacgtgtcagtgaagctctggatccttttttcaatagaaaaatcacggcacaattagttataaaagagctttaagtttcccttggaatggatttagttatccttttgcagtgagagataagtttgagttggctctctggaaaaccttccctttacttctctgtttttcttactttaatttcccccttttttttttgaggtatttgttcctcaaaagacatcccctctctttaaatctagttccagtaactacttaatgtctatgaagttgaaatctcctatttcttcatagttgaaattgataggcaatgtagctctttgttagtgtctaaagtctgttttaggatttgatgactaaaagcatactaaagcacagccctttaaattaagttttattaaaatatttattataatgtcttatacagcatagtgaaatttatatttgtttgttgctgttgttttctagggaagtatgggtagtattacctgcatcgcttggaaaggtgatacattagtgcttggagatatggatggaaatttaaatttctgggacttgaaaggcagagtatccaggtataagccaagaatgaaatcttgttatttcattaaaaaaaagaaatgaaatctttttgttttgttttgttgagatggtgtcttgctctgtcgcccaggctggagtgcagtggtgcaatctcggctcactgcaagctctgactcccgggttcatgccattctcctgcctcagccacccgagtagctgggactacaggcacccaccaccacgcccggctaatttttttgtatttttttagtagagacgggatttcaccatgttagccaggatggtctcgatctcctgacctcgtgatccgcccacctcggcctcccaaagtgctgggattacaggcaggagccagcacacccggccaaaaaatgacatcttgatatggttccattagaggcttgtgacttggcaagaaggatcagtaaactcgtggaggtgtagcttggacccttgggtcccttcacctaaacttgggaggatgggccttgagccaagcattcttaggagatagttatctgcaagtggcccctgcagaagtcttagctgaccttaaagggcaggccctttctgtcagatgtggcccccagtcccagcaagtaaagggttctcccatcatcagacctgttagaaatggaaatagtgagagatgttagacatagcttctggtgaccagatctcactctacattgtattgatgtttttgtttctttgtcttcagaggaatacccacacaccgaagttgggtgaggaagattcgttttgctcctggtaaaggaaatcaaaaattaatagcaatgtacaatgatggagctgaagtgtgggatactaaagaggtaggccctctccatgaggataaaacgtaaataaattgttagccataggaactgtgctttgttaaaaaacttctttctgatttagaaatgaaaagtactt

SEQ ID NO: 6115 - DNA, 2300 bp, Homo sapien
tatgaaaagtaaatttcaaaatctgctagaatcaccctttcaggatcaactcccagataagttgtgtttatttcacttttttaaacaattatgatgataataaggtgagctgtactatagatacctgaatatatatatatatacacacttacacacacaactttttttttttttttttttttgagacggagtcttgctctgtcacccaggctggagtgcagtggtgcaatctcggttccctgcaacctccacttactgtgttcaagtgattctcctgcctcagcctcccaagtagctgggattacaggtgcctgccaccacgcccagctaatttttgtatttctagtagagacgaggtttcgccatgttgtccaggctggtcttgaactcctgacctaaagtgatccatcctcctcagcctcccaaagtgctgggattgcacatgtgagccacagcacccagccttgaatatatattttttaagtcaaagttcagctatccttcaaggaaatttgaaagtccaaatgtatttttgatgatgatgaattatacttggataaaacctaccctctacttttaactttttattatggaagatttaaatgtctacaaaaataggaagagtagcttagtgaacgtggaggtactgtatcaagcttcagaaattatcaatttacagccaatcctgtttacctatactccacatagctctctcccctactcatattttgaagtaaatcacagatattatatcaattcatctataagccaggtgcagtggctcaagcctctaatctcagctacttggtaggctgaggtagaaggatcacttcaggccaggagtttgagaccagtttgggcaacatagtaagaccctgtctctaataaataaataaaataaaattttaaaaaattagctgggcatggtggcatgtgcctgtagtcccagccacccaggaggctgaagcaggaggatcgcttgagcccaggaggtcaagaatgcagtgagctatgatcacaccactgaactccatcctgaagggcaaactctatctctaaaacaacaacagcaaaaggattctgcacaacaatttatctataaatatctatatatttatatgtagatattatcgataatatctacatatttatatatagataatatctacatatttatatatagatatcgataatatctatatatttatatatatttatatatagatattatcgataatatctctctatatatatttttatatagatattatcgataatatctatatatttatatatatttatatatagatattatcgataatatctatatatttatatatattttatatagatttatagataatatctatatatttatatatattttatatagatttatagataatatctatatatttatatatagatattatcgataatatctatatatttatatatagatattatcgataatatctatatattcatatatatttatatatagatattatagataaatatagatatttatagatatttatagataaatatagatataaatttataaatatatatatttttatatatctatagatataattatagatctataaatatagatatagcaatttatctataaatatcccaatatgtatatctacaatataaggatactaaaaaatacctcaataatactaccacacctaattcttatatggttaagaattaacaattcattagtatcttaatattgccaagtatctagaccatattccagtgttcacatttccttgattatctcaaacatttttaaattgtttgttcaaaggtggtttcaaattaggtccatacaatgagactaaattggtcggtagtctgtaaaggctttttaaaatatatatgctcctccttatctctcttttttatatcttcgtaactttttttgttgaagaaactgggtcacttatcgtgtagaatttcccatagtctgcacttcgctgattccatccctgaggaattaacctgttcctctggaccctgtacttcccgtagttggcagttggatctaggctctggatcagattcaagtctgattgctttgtaagaccacctcatgagtagagctgtgttcttccatcagtcaggttgcttctctgtttgtgatgtttgcagccattgatgatcactgcctagatccattaattcattaaggtctgcaaaaggaccctctcttctccactctgtctcccaggtaggaacctctgaagctgaggacgtattcttgctggcttcattattgt

SEQ ID NO: 6116 - DNA, 2300 bp, Homo sapien
ccctgagcccagccagcactttactctcttcttcacttcatcgagcaagcacaaaggcattagtggtgttttgcttctagcatttcacagggtgcagcctccataagtcactttgtgactttagtgctggagggaggacacttcatttttacccaaacaagtttgttccgcagacttcactctctctgcaaagagacgtgtgtgttttagaggaagtgggagccccagccgattctgcaagacttccgagagtcagatatccagacagaagatgcggacacctgggtgaccagacagcgaagaggaaagaacaaaacgagcatgtgccaagcctgtgagggagaaagggcaacaaaccagtgaccttccacagaaatgtgtttaaacaaaacaaaacaggtgattctgggtgcccagcatcccagcccactcatctattctaggaggtgacaagccaagatactggctgtgggcacctgggctctttctgaaggtggtcttcctggccgtcatagcgttccctttttctgctaatcatttttagttctgaccttcctttgtgctgatcttcagaagctggagaaagcttcgtatttctgggaaaacaaaacaaaactcagaacccaacgagatttagcctgtcaggcttgagtgcgttaggtggagtcttgacaaggcaatgaactcattctactaattgtaattagcgtggggcctttagcaagttctgggctcctcagacttcagagagctttgatcggcctcctcctcctcctaataaccatgcctcatgctaactggtttagtgcgtttttatgcaacaaaagcaaccaccgcctactctttagaaaaaagctaggcaggctttagaaaaagaattctcagttgttttcacttgtcctccaaatcgcagaatgttctttcccttttcagctctttggcgttgctaagagactgccattttggaggaaaggtaattaaattttgattttaatttaaagacagagcaagcgaggttatccacgctccttacatgaatgggggcctgagagcaggagactggctgtttccagatcaatactgggaactccgtgtgattcgagtctcttggtgtgtgactgccggagagaggtggctttgaaatggctctttgtggcaagtactgcctaacttttggggagaaatgctcaggagaccagtgtgagctgggaaaccagccactctgtgcttgattaatttataggtgtaatttaagagcctggttctccttctgatccccgggatgcatgtttactgagcctgtagacatgaggcctctcggctcggtggacattttttatggcctttgctatgtcagagcaaaagttgtagatctcttatgagcaaacatattactatgtccagaggaggactggcatgttataaaatttcaatggtcaattaacaaagatttattctttgtcactcaggtatttttttcctctctctctctctctctctctccctcaataatgacctcttggaaggaagcaggctgtgctttcctgctgcagtctttaggtgggttatggctcccagctacagagcagggcttgacagagcccatcctgatatttcaattcttagcagctgggctttctgctttagtagagtggacacttgaagaaagggggcgagaccgagagtgagagagagagaacgctgggagagaatgtattttttaaagcacttcagcctgtgtttactacgcgtttatttggtggaacctcattccagcagtgcagccaactgtcccggcagcagtggccgcaccctttggactgctttccattccgtcttaatttggaattcacacagccaccttccaatcactcttttgaaggttctcatcttgttccaggtccatgcactgtgcatttgcaacctgctgaacctcagaacgtctattcttatatgtgtatatatgtaattaaaattacagtaaacagaggagctactcatcagcctattttccatgtgtttatctcactccctttgtaaaaaggaaaatctgttttatataatatctgagagttaaacatgctagaagagaatcttgcctaaaactgtaaatccttcctgtccttcctggtggagaagatgtgatttttgttatcacatagaagaagagatgaactagcactgggctttagtctctcgcccagagataatacatcaggggattctttttatatcagtttgttgcaaaaaagttgcaaacttgaggggtttggtttgcccagggaccggggaggttcctg

SEQ ID NO: 6117 - DNA, 2300 bp, Homo sapien
ctctccactccttgtgttttttgagacagagtcttgctttgttgcccaggctggagtacagtggcatgatcttggctcattgaaacctctgcctcccaggttcaagtgattctcctgcctctgtctcctgaatagttgggattataggcatgtgccaccatgcccagctagtttttgtagtttttagtagagatggggtttcaccatgttggccaggctggtctcgaacacctggcctggagtgatccgcccgcctcggcctcccaaagtgccaagattacaggcatgagccaccgtgcccggtcttttatcagtttaactttccagaaatttgttccccctgcctgtccgcatcccttcaaatgaaagctgtaagcagcaggcagttgttgtttgggggcccatcagaggccgcatgtcacttctggatgggtcaggcatcactaccagccctgacttgatggcggcagatcagcatggcactgtcaactagcccttgacataaatctgttgtaactcagccccagacatgataggacacagcctgaaagcgcacaggaatccgtaccagagcgaagtcccccctcaggtgtgtgttcaagaatgaagcgtcttttattccaagcactgactgataagctcgaatgtggagttgacacctggaagggagttttgggagcttttggcagcccatccccagtggaagaaggaggaatggctgaaattgttgactgcttggggcagcctctgtcccaggaagacaaaggctccagtgtgatagctgagctggggccaggggacggaggcacggcggagtccctcaaaccacagctggagtgtgaagtttggactgtctcctgggttgggaacaaagtagtggttaagtaaatgaagaagcggtggcctagttaattaattaacctgttaattcattactgaagctgtcaagattcagtcattcctgctcacttgctcgtgatggaaggctgcatctcagtctcggcttccatcacactgtggcttctggatggaatttttgtttctgtgtgtgataaggagtggctgtggtggcatcatttaaatgacatgattctgcacgtccagagacgttaggatattgaaagcctgaccattaccttttaggttgtcatgcttgtacctgttcctggcacaaggtctcggctccgtagagccctgtggggttctgaacttgaagcctcttgacttagaggcttcctggccagggctcatttgattttccatactcctgactttgctgccagtgaattcttttccatttcttgctctgagtgtaagacttggtgtcctaccctgacacgggctctgcatgccagctctagagttgcgaaatctcaccggaggggggcagaaagcccctctgttgagaagggattggggtggcgtgccaggtaatgggtcacagcgacagcctttctaagtgggcttatttagttgacagatcacggaaccggagcggagttgaggaggaagcaccttccttttgccgctttcgtgtccccagcagccatctcatcctgttcttataaaccatcgctgtcacagacaacccctaagggtctctactctgtgccagatgccctctctggaggttcaggtggaaattacgtggagaggggtgtcaagttctgtttccacccttgctaactctatggccttagaaaaggcatggaacctctgagcctcagtttccttgcctgtaaaatggggtgatgactgtttccttgtagcactatggggaggaggaggtggtaggagaggcagcgcttttaaataatagtaccatgcaactgttagtcgttattgtgcgttggtcccatacttcctcttgcatctccagacagagccgtgcaccctgagcccatcctgatgaaaggaggggtcagtcctgtcctttcctccaggatagagatttcaaaacttcctttggtagctactgtttaatgagcttttgattgctacaaagcagcttttcattcctgtttcacaacagggatcccggggggcaaaggctggttagtggcagctagatcactccaaacgtactgactggcaaatacagactctcccgcagaactgaccccagcaagaagcctttgggagcaggtggtattctgcgggtgccagctccctggggtgggagcaggcacacgccagcctggatggggcatggtagaactctgcgatgtcagcttttttgtcacattctctgcaggctacccgttgtcctttgccccaccattgaggaaggaagccttatt

SEQ ID NO: 6118 - DNA, 2300 bp, Homo sapien
gcctcagtggtgtgaaggttttcctggatggtctgaggtcacttgaagactaaatatggggacataattgattttttaaaaataattctaaacatacttcccccccctcctcaaaactgaagagtttcctgttgtggtcttgtgggtttcagtcccttatatatgagccctctttagggaataaggagcttttgatagattggtgtcttttcatttctataaaaaatacattctgcaaactgtgcctggacatgaaagtaggtgttcttatttgtcattttcagcggaaagcttcctttccattcaacatgcataaagctattgatgaatgggggatagggacagcggcttcctgcaccattaatttatgtgagaatgtgttaacagcattttcaatggctgatggatgcggtgtaggatgggaaaggaactgtcctgagacactcgagtttcccattggtggggaatataaagatgtaagtggcaacctgcgagcaggcagacacgttcagctgcatcccttttctgagaacttgaaaacatactgctatcagaacaacccgtgtgggagtgaatggctaagtgtcaacctgggctgaggtgtccgttaatgtataggctctggggctaatccaggttagaggacttgaccaaaaacataccctcccaccaagcatatagagggataattttgcttaagaaccagtttttattttgttgctatcaaatttccaaaatacaatgttatagccttttgcctgaggcagttaaatggatttcttacttgtgtggcttttaaataacttgcataaacgttttctgtgctatatttgtgaataaaaatgattttctaatcatgtagcaccttgaaaaatatttttgtaaatgttatgaagggtgcaatgttagtgacacaggtgcaaatatgtttctaaatccaggaaaagtctgttttccaagtcaggtttgttctcaatgcttcatctatcttcaggcctcaaaaggattctaaagcatttctgggtttagtgaccttttctaaagaaaaataattaaggttttaatctatatggtcttgaacttaagcacggctgctcaggagctggatgaataaggagggagaaaaagcatatttaaaataaattattccgaagacacggcttagtgaaaaggtaaatggacataggaactttaaccagttacagcttggtgtgcagttgaagaatcagattttgcatttatgatttttaatctaagattcagagggaggaattactttgttcaaggtctatttatggtagagttgtctttagactcctttgaatttctttttattaatccaaacatatattattaaacactttttttttttgatgcaattttggctttttctgagagagccacattcaaagtcaggctgtcctagtagccagctgtgtggtcctaggcaaattacttaacctctctgatcctgtttccttatcagaaactgggaatagtactctgcagggtggttgggcagatgaaatagaatcacctatgtagtgtgaccctcccatagtagggcctccattaatattcagttttttcctctcatttctattgtttagaaggacagaaacatgcaatgtcctgcgaacatttccaagtggcttcctctcctccaaaagcttcagctgcctggcaaccctccccgcagtatcaagcaggcgcattttaaagtctctttagcgggagggcagggttagagccttcggtcatttgttttctaacttgacataaaacaacgtaacgcagtcgctcagcgagccgttggccagcctcgctcgcccggggaggagggaggaggtggcgcggggcgcgggaccaggccttattcggaggctgtcgctgcatccctacggccgcatcgcggccgagccctcgcctcccgggccggtgtctccggctgctcggaggcgtcgggagccgcgcgggactcggggcggcccgggcgcgcggcgctgattggcagagagggcgccgccgtccaggaaacggctcgggtttcagtgggggcgtgacccgccgcgaggaggcgggggcggcggcggcggcgcgggcggcggctggaggagagcgcggtggagagccgagcgggcgggcggcgggtgcggagcgggcgagggagcgcgcgcggccgccacaaagctcgggcgccgcggggctgcatgcggcgtacctggcccggcgcggcgactgctctccgggctggcgggggccggccgcgagccccgggggccccgaggccgcagcttgcc

SEQ ID NO: 6119 - DNA, 2300 bp, Homo sapien
gagatggtagagatagtgatcaataaatactgagggaactcagagaccagtgctggcgcgggtcctccgtatgctgagccctggtcctctgggcccactgttctctacactttgtctctgtgtcttactttttttctcagtctctcgtcccacctgacgagaaacacccacaggtgtggaggggctggcccccttcaacaagtcaccaggccaccaagaaacctccttcagctaggtacatatctaacacaggcccttggggtcaagaatgtcaaaactcacctcaaaaatttatttctatttctctgagtttcatttcacttttttaaacacacttaaaacaatattgtatcatcagctttattgttgactgggaaaactatgaggacagacaggcttaaattatctgtgcacgcagagggaaagataaggcatattaccttgttggaactctttttttttttttttgagatggagtctcgctctttcgcccaggctggagtgcagtgacgcgatctctgctcactgcaagctctgcctcccgggttcacgccattctcctgcctcagcctcccgagtagctgggactacaggcgcgtgccaccacgtcccgctaattttttgtattttttagtagagaaggggtttcaccatgttagccaggatggtctcttatctcctgacctcgtgatccacccgcctcggcctcccaaagtgctgggattacaggcgtgagccaccgcgcccgcccctggaactcattttttaaaaaatttttttgagatggagtcttgctctgtcacacaggctggagtgcagcggcgtgatctcggctcactgcaagctccgcctcccgggttcacaccattctcctgcctcagcctcccgactagctgggactacaggcgcccaccaccacgccaggctgattttttgtatttttagtagagacggggtttcacgtgttagccaggatggtctcaatctcctgacctcatgatacgcccgcctcggcctcccaaagtgctgggattacaggcatgagcctcaattttatattttgccctagactcttattccttaaatcttccttaaaatagtggttgcaaaatggaggcccatgggctggattcagcctgtaaaactgttttgtttggactgtagagttaaaaaaaacaaacaaaccctgtatttccagcatctcattaaaaatcgtatgaggcaccggacttatagtggtacaagacagcaactgtctctagctgacagttgtttcctttaaaagccgttaagagttctttaatttgcgaaccctcgccattcacggaatacctgcttgtgttcttgtattcagggcactggagtgcgtgccagctggtctggaagcagctccagcaagtcacttacacggtggccaggggcggcctgactttcaatccgagacccgccgggaatgactttgggataatcacaacctccggtcctcagtttccttacctgtgaaatggggctgataacgcacagctgtgggaagcaccggcccaaacgcagggcttggggacacgaccaccatccccgcccacgggtccccgcgccaggcttcgctctccacccctcccgccgcgggccccagcgcttcgccgaggtcggccccgggcgccaagaggcgtggtcggcccgagcggaccctcgcggcggccatggcgtcggtggtggaatacaagggcctcagggccggctaccactgcggctactgcgattccaaggagggcaaagcgtcctgcggtgagtgttcccgacgccggagttggcgcggccgccgcgccccgcacaggccctcggcgggggaaagggcaggctcgcaccccgactcccgcttcccttcccctcttgactctccccatcctgtttcccttcccgctctgtctctccgcctcaccctcactgacgacggcggccccttatggagaaggaacggaaatagtggaaagctgccctcggtcaagatggcgcgggcggcgtcagctccaagaggcgccgggccggccgggcctgcgggcgcccgagtggcttcgcgcgagcctcgggaggctcccgggcggcgcgctgcattgtggggtggcggcggcggccgcgctagcgacgcggggccgggcggctgagcgttcgcggggccgaggccatggctttctgggcggggggttcgcccagcgtcgtggactatttccctagcgaggacttctaccgctgcggctactgcaagaacgagtcgggcagccgctccaatggtgagcgagccg

SEQ ID NO: 6120 - DNA, 2300 bp, Homo sapien
ggaaaacaaagagagatcagactgttactgtgtcttcgtagaaagaagtagacataagaaactccattttgttctgtactaagagaaattcttctgccttgagatgctgttaatctgtaaccctagccccaaccctgtgcctgcacagacatgtgctgtgttgactcaaggtttaatggatttagggctgtgcaggatgtgctttgttaaaaatgtgtttgaagacagtatgcttggtaaaagtcattgatattctctaatctcgagtatccagggacacaatgcactgtggaaggccacagggacctctgcccaggaaagccaggtattgtccaaggtttctccccatgtgatagcctgagatatggcctcgtgggaagggaaagacctgaccgtcccccagcccataaagggtctgtgctgaggaggattagtgaaagaggaaggcctctttgcagttgaggtaagaggaaggcatctctctcctgcttttccttgggaatggaatgtctcagtgtaaaactcgatcatacgttctatttactgagataggagaaaaccgccttatggctggaggtgagacatgctggcggcaatattgctctttactgcactaaaatgtttgtgtaaagccagacataaatctggcctacgtgcacattgaggcatagcacctttccttaaacttatgacacagagatctttgctcacgttttcctgctgaccctctccccaccattactctatagtcctgccacatccccctcaccgagatggtagagatagtgatcaataaatactgagggaactcagagaccagtgctggcgcgggtcctccgtatgctgagccctggtcctctgggcccactgttctctacactttgtctctgtgtcttactttttttctcagtctctcgtcccacctgacgagaaacacccacaggtgtggaggggctggcccccttcaacaagtcaccaggccaccaagaaacctccttcagctaggtacatatctaacacaggcccttggggtcaagaatgtcaaaactcacctcaaaaatttatttctatttctctgagtttcatttcacttttttaaacacacttaaaacaatattgtatcatcagctttattgttgactgggaaaactatgaggacagacaggcttaaattatctgtgcacgcagagggaaagataaggcatattaccttgttggaactctttttttttttttttgagatggagtctcgctctttcgcccaggctggagtgcagtgacgcgatctctgctcactgcaagctctgcctcccgggttcacgccattctcctgcctcagcctcccgagtagctgggactacaggcgcgtgccaccacgtcccgctaattttttgtattttttagtagagaaggggtttcaccatgttagccaggatggtctcttatctcctgacctcgtgatccacccgcctcggcctcccaaagtgctgggattacaggcgtgagccaccgcgcccgcccctggaactcattttttaaaaaatttttttgagatggagtcttgctctgtcacacaggctggagtgcagcggcgtgatctcggctcactgcaagctccgcctcccgggttcacaccattctcctgcctcagcctcccgactagctgggactacaggcgcccaccaccacgccaggctgattttttgtatttttagtagagacggggtttcacgtgttagccaggatggtctcaatctcctgacctcatgatacgcccgcctcggcctcccaaagtgctgggattacaggcatgagcctcaattttatattttgccctagactcttattccttaaatcttccttaaaatagtggttgcaaaatggaggcccatgggctggattcagcctgtaaaactgttttgtttggactgtagagttaaaaaaaacaaacaaaccctgtatttccagcatctcattaaaaatcgtatgaggcaccggacttatagtggtacaagacagcaactgtctctagctgacagttgtttcctttaaaagccgttaagagttctttaatttgcgaaccctcgccattcacggaatacctgcttgtgttcttgtattcagggcactggagtgcgtgccagctggtctggaagcagctccagcaagtcacttacacggtggccaggggcggcctgactttcaatccgagacccgccgggaatgactttgggataatcacaacctccggtcctcagtttccttacctgtgaaatggggctgataacgcacagctgtgg

SEQ ID NO: 6121 - DNA, 2300 bp, Homo sapien
gaaacaatgacctggtttaaaccatgatttatggcttactttacagggagtctggaggcatgtggttgattcagcaattcagccatgtccatctttgctctccagtgtctccagcactctagtctttcctcatgcttgtcacctcgtgagtaccagatgctgccaatatggcaggctccacattttttctttcagacgttgtttcattcttgtcacccaggctggagtgcaatggcgcgatctctgctcactgcaacctccacctcccagcttcaagcagttctcttgcctcagcctcccgattagctgggattacagacacgcaccattatgcccgctaattggcaggttccccatttcttatgccagccatctcaaagggggtagggggtcaagggttttcttttcaggaaggtttgtattccatccagttgggaaaccctttcacatctcacggacccaggttgcatcacatgacccttgaccagtcactggggaaggggaatgacattaccgtgacctggttagagtgatcacgtttcatctaaggaagtaggcacacacgtccccttcaggaaatacagataagcagggatgggtgaggtagtagctgttggacagcaatgaacagtgcctaacttaagtttagtagacatgatgcacaaaatggaatatttgtaggttgtgtaataacccaacttataatattggtcttttgagaaaatgtgttcttagcaccaaagacaacttttgggaaacaatactcgaatacaatccaaaatgcacggagtgaaattcatacatttatctttcaaagtatacttaacataattccatctttcttgggcccttcaggaggtattcttagaatcttctagtttgagaatcagaatcaggctgtgcctggtggcccatgcttgtaatcccagtacttagggaggccgaggtgggcggatcacttgaggtcaggagatggggttgcagtgagccaagatagtgccactgtactccagcctcggcagagcaaggtcttaaaaaaaaaaaaaaaatcaaatgtgaacatagactgtcattaaaatcaacccaacaatcccatagactgtttactatttttttaataaacttagaaattatcatttctagtcttaaggttgaaacttacctttgttttatctgagttccttcctcaggaaaggacctccagagcctctcaaaaagtatcaaaaaactgaaactcgccatatcaccgcattccagacaatgagatgccaagcccctcatgcatccccatagcttccttccccctcccgagttcctcttttcccatacattgttacattgcttccctgcaactgtataaacccttaattttagttggtcagggcaatggatttgagactgagcttccaactccctgagtgcagcaccctactaaagccttcttccttggtaataatggttttctcagtgatttctgtgagggggcagcgggtcctagaacaaaaccctggtgctctggtgacattctgttgtagatatttagaaggatgtttacctgttaatttgttctgctatcctcacaaaaaatggtattgccagctgcacataaatatttgattcatccacccacccctgttccccacccccccgaccccagccatgatggcacagggaaactgaggtcgcaggtgagcagcagaccgcgtctggactccacatcccgcgctcatcctgctccacagcaggaagctcgttcaacacacatggactgcgtgcccatgtgggtgccaggctgcggctgtgtcctgggcaggcaaagggacctagggaagatgcaggtccaggagggtgggaaagtaggggcagaaaaccaagattctcacagccctgcagtgtggagtaagagctcattacacctcttgtcaagggaacaaaggatccccgccaggcccctcttgtgcacccagcggtccccccaggcgccttggagacccggccgggcccgtcgccggcctccagccacaggcgtcgctgtgcgctcgcgcgggcccgggagccgcgttccgccgggagcaggcgctggcgcagagcaggggtttcagtttctggcgcgaacttccgccgttccgaagttgcacggtgaattggcgctatgtctggggacagcagcggccgcgggccagagggccggggccggggccgcgacccgcatcgggatcgcacccgctcccgctcccgctcgcggtcccctttgtcgcccaggtcccgccgcggctctgcgcgggagcgcagagaggccc

SEQ ID NO: 6122 - DNA, 2300 bp, Homo sapien
gaatactgtactgaatttgaaaaacagaatagttgtttgaatactcaaagtacagtttctgctgaatgcattctctcttttgagccatcttatgataaatctacatcaaattattgttatgttagggaaggaaactgcctttgcagaactgacagtaacagaaatgtgacatggttgacttcatcttgcttctgacctccaagctgtccttggttattcctgggcataggccaagctaactttgggaggaattcaatttatagtttaatttgaaagtaaagattataatagtccctccctaaaactaaccccctcctttctcagggaccaaaatcgcctttgtaagactaatgaaaggccacaggaataggataatgggagaaggcagaactctgctaaaatgtaggcatagtttctatagtcccttaatgcccaggggtcatgtggccagagttcacaagatctgtgactttcccaattgctcctgtaagtaacatcactattgtagaacttaagattggggtgtttgtttgtttgtttgtttttgtatttttagtagagacggggtttcaccatcttggccaggctggtctcgaactcctgatcttgtgatccacccacctgggcctcccaaagtgctgggattacaggcgtgagccaccgcgcccagccaagattgagttttttaagatgtttttcagactgacctcactcagactcatgactcatgactcaacaggtcctggggccccacccagaggcagactcagtgcatgaggactgctttccacaccggtatgatttcatccccaaccaatcagcggcactatccccctaccccctgacaaccaaattgtccataaaaacccttgttccgagcctacagggagactgatctgagggataactccagttctcccacgtgggctcagcctcgcggcagttaaactctttctctattgcaatgccatggtctcagtgaattgatttttgtctgtgcagtggggaagaagaacttgttgggtggctccagaaccatctgtataatgatgaataagacaaagtccctactctcatggaggagacagataataaagaaaagaaaaaaaaaggatttggtcattgtaagtgctatgaagaatttaaataggctaaagggataggtggagaatagaagttgcattttttctttccctccagatagagtctcactctgtcacccaggctggagtgcagtggtgcgatcttggctcactgcaacctccacctctgggttcaggcagttctcctgccttagcctcctaaatagctgggatagcaggcacctgccaccacgcccggctaatttttgtctttttagtagagagggggttttaccatgttcgccaggctggtcttgaactcctaacctcaagtaatccacccacctcggcctcccaaagtgctgggatcacaggcatgagtcactgtgcccgacctgaaagttgctattttaggtgtgatgagcagcacaacatctttcctgaggaggtgacatttgagatgtgacttgaattgtgaggagtaatgtgtcatgcaaaaatacagggaagtcatattgtagtcaaaggcaatagcaaaaaaaagtctttggggttaaaataagtctgacacattcaagaaagttcagaaaggcatacatacctgtgttagagtaggtagctaggggaacatgagaagggcagcagagggcattccacccccacccccaaccaggaatgtcaggcgaccatcatgtgatggtcaggtggttgttacactgtttctctaaaatcatcattggttgcagccagcaccagggaaaggccggctcccaatagatagaaaacacctgaagctagtgtcagccgcttcctgataagatctcaggagttgggcaagtgggctcaagcatgggccctaaggggcaaaatgtcagagtttaactaatatatgaccttcctctaggaattctcgactggcaagggaaaaatgcctcaaatgagcacgcgcacaacttcagtaaacacactgtgagtgcggccactcccaagtgctggcagaccactgcataagtggacagcctgctccaagggaaggatcaggagagaagaaacgcaaatcccagaaccgtgccaacatataaaaccccacattaagggttgtacagtgcactgggatttctcaagtcacccgcttggtcctcttccaagtatactttacttcctttcattcctctctaaaacttttttaaaaactttcactcctgctctaaaagttat

SEQ ID NO: 6123 - DNA, 2300 bp, Homo sapien
gcttttatgtacatcatcatgattaagtcatgctgggcctatgaagaaggtggagtgtgggatcattctctttttctgcctgatgaaatggaagtgcttagtgcttgggcaattgatccaagtcactgctagaaaataggtgaattggttgggcatggtggcttacgcctgtaatcctagcattttaggaggccaaggagggtggattgcctgagctcaggagtttgagaccagcctgggcaacacggcgaaaccccgtctctactaaaatacaaaaaattagccaggcgtggcagtgggcacctgtagtcccagctactccagaggctgaggcaggagaattgctagaacctgggaggcagaggttgcagtgagccaagatcgtgccactgcactccagcctgggcaacagagtgagactgtctctaaaaaaaaaaaaaaagaaagaaaaaatagctgaatcgagacttagcatccagccttcagaaccctcattcaaaactctctgggaagctaggcatggtagctcacacctgtaatcccagcactttgggaggccaaggcggaaggatcccttgagccaagagttcaagaacagactgggcaatgttgcaagacccctgcctcaacaacaaacaaacaaaacaaaactctctgggaggtcctttggtattacagcattttagttattataaaactcagtcttcttaaggaagacaactcaactaacttttaaatgtgtgaaaaaaaggagttgtagtcacttgaatttgcactctgaatactagaataattttgaaaattaaatatttccgatgaaaattagattaccttttaaattttctctgaaaaattatacattcacatgagataaaatccctagactagaaaagaaatatgagagggaagtcttcctctttccctgctcccgagtccacccactgtcactagtttcttatgtgagtttccagaaagaattatttatatattataatgtagcacattgtatggttaggtttagatcattgcctttataatgtagtatttacacataaatgtatatcctcctttcggggcttttgtttgtttgttttttgttttttgtttgtttgttttggagacaggttctcaatttgtcacccaggctacagtgcagtggcaccatcacagctcaccgcaacctcaaccgccctggctcaagcgatactcccacctcagtatcccaagtatgtgggactacaggcgtgcgccaccatgcctgcctaatttttttgttgtacttttagtagactctacaaggtccctctgtgttgcccaggctgttctcaaactcctgagctcaagtgatttgccctctttggcctccccaagtgctgagattatatagacgtaagccaccacacccagcccctttcttttttctttacataaacaatagtatatcatacacactgttctgtatcttaatatttttcacttgatgtatcttggagagttttcagtgacggtatataaagagctcctcaccctttctccagccgcttcgtttcccattgtatgattgcatctttaattccctggctactgatgaaactgtaggtgacatgctgtttagaactcgcctaactaactgctcattctccctttctaaaggaggcatattgacatgtttgaaaaggactgcttgatactgtcagctgaggctggtgatgacctgtccctatttactagaagcactgctaattttatgccttgtttttttcttcttttatggttgctttgttttgaaaagtggcttgtcccagccaaaatataagtcaagtaaatcaaattgcagcccaaggtagttgacactggcttcggatcccaaataaatgtgtagtgagaagcacagagagctggaggctggcggcacctgcaggctccctgctccttattaccctctccctctgggctgcagagccttctggaaagccgctgcctggcctgggtcagattgcttacacgccactgcctcccaggccggcgttcccaaccttaagccaatgcacatttatagaacaattccatgtgatcctggggaagacagactgcgggtggagggcagtgctgaaaaggagcctctggaagagagggccttctcccgcttctctcctcctcctctccacgctggggggatcctgggtgagtgagtctcagactgagggcttcttcctttgagcaacctgtggctttaaaccggtttgactactgagattagagggataaaagcattgcttgtttgctttccttataaagtg

SEQ ID NO: 6124 - DNA, 2300 bp, Homo sapien
cattcgtgctttttccagcttctagaagccactcacattccctggctcgtggtcccttccttcatcttcaaagtcagcatcttctaatctctcgctcactgtgcttccatagccacatctctttctctgactctcttcttcctcctccttccaattaaaggaccttcatgatgacattgggtccacctggatactccaggatagcctccctactttaaagtcaggtgattagcaactttaattccatctacaaccttcattccccttgtcatgtaacttaacatattcacaactccagggatgaagatgtggccatcttgccggggccttccttttgccaaccatacagacctaccagtagatttcgaaacagagtggcaccttcctctgtcttgaaggatgtgcatctgtcaactgggaggggctgtttcacatgaacgggatggcacctcaagttcatcttagctcgttgcccagttgaggtgctggagcttacatggtggtgagtggtgtatgtttttaccacaaatggatatgacccacagggcacaagaaccttttgtttttgtttgagacggagtctcgctctgtcgccaggctggagtgcggtggtgcaacctcggctcactgcaacctccgactccctggtttaagctattctcctgcctcagcctcccgagtagctgggattacaggcacacaccatcatgcccagctatttttttttttgtatttttagtagagacggggtttcaccatgttggccaggatggtctcaatctcctgacctcgtgatctgtccacctcggcctcccaaagtgctgggattatagggcacaagaaccttgaagactgggcatttccattctctcttcaccgacagcagatggtatacatttaaactagcctatttgggtctcagttatcatacttgtaaaatggacacattaatacgatacgaggaaacctgtgataagcatgtgaacaaggaatctatttaagtttccataaaaaatgtgactcttagaagcactgcgttatttaaaaaacaatattttcgcagaaggcagtaacagtctatttctttattctacagagaatcctcattaggggctcgtaagatctgtttctttaagaggaggaaaggaagtgctgagtaatttctgagtctcatgccctttggtccctgagtatataatctatagcagtgctttctgtgacactaaaaatgggaagcctgctgtctatatatagtcacgggctcttcatgattggggcctagctgcagaaatttctagagaaaaggtgatatgccatggtgttggcaggtaagcaccacttctgggtgtgaggtccatgtcagtgaaggagttagttaggcccttaaaggaaaacagacctcacatgccaatagatacataactcctagaaatatggcagctggaattggtttggatttagcctctgccgacttcagagtgtgcaacagccaaatagaacgcacgtcaagttttgcaaactgtccagcacagcccgcgctgtttctgtggttaagcgccattaataccacacaggtgaagaaaaaagggccggaatttggctccaggaacaagcgaggcaccatttcacccccagcttctttctgaggctcctgggtagcctcaggcgggcaacggccccgcagaggaagcgcgggccgcctggccggtacttgaccttcccagtccgttctcacgccacagccttcccggcgttgccatgcgtagtgggaaggccgtggacaaactaagaacagtaacaagttgtcatgactcagagactcctggaagtctgcagcgcctccaggagcagcggccgggctgtgcgtccatcggtccgtgcgtctctcgcctgccgctctgcggccgcgggcccctcggtgcgtctgggcgcgcccggccccgcgcattcctggccggggaggagagcgcggcgggcgccctgcgcgagcagctggccgagcgctgccccgggtcggagagcccagagctgggggaggagcctggcccggcagccgccgctcgcccagtcattggccttttgtgctgcaacttttcccgagcctttcggggagccacgccggccctgcgccgttgtcccgggaaactttgcgtcccagggccgcaccggaccgtggtgaccccacgcgccgcgccgccaccgggctcggaaaacccagcgcccccgggctctttggcagttgcgactccgaacgaaggcggctccgtgcgggccatcccctatctccccgggcgggtaag

SEQ ID NO: 6125 - DNA, 2300 bp, Homo sapien
atcacgctgtgtcctccagacccaaacggagctccatgtgtgctggggagtggctgtttgcctgcacgcctttgcccaagaagttcttatttgtttgtcctgagtacaattcctgatttacagaaaagttgtaagaatactacaaaaaacttccatgttccctttccccgattccgcagtcattgacattttatcacatgtgctgtgacgttcatcctctctctatatgagtaatataaatgtatatgtacctatatatccatcattgctactttttctgaatcatttgagagcaagtttcagacatgaagtcgccaccctccagcaaaacaaaaacaacccccgccccctcccagccccccagtgtgcctttcttgcaaacactctccagcacgaagccagcgcagccctgcagctgggaaatcgccatccagtcttcagaacctgctcaaattcaccagcagtgtacctttttccgtctgaaccagaatccagtcaaaaagcatgtgccatgctctatgtcatgcccccagactctccttccatctggagtaattcctcagtctctccctgtcttttatgactttttgagtttttttgagacagggtctcacttttgttgctcaggctggagtgcagtggctcagtcacagctcactgcagccttgaactcctgggctcaggtgatcctcccacctcagcctcccaagtagctgagacttcaggtgtgtgccaccatgcccagataatttcttgtatttttttttagtagagattgggttttgctatgttgctcaggctggtctcgaactcctggacccaagggatcctcctgcttcagcctcccaaatgccaggattacaggcatgagccaccatgcccgtcccatgacctttatgagtacagctccttcacgctggaagaagtccctcaatctgtgtcacctagtttcttcatggctagaccctgggtgtctgctttgggcagggattccacagaagtgaagctctgccaccccagggcacagagcatggaatgttttgccacagaggatggccagattggtgcctgccaggtttattggctgtaaagtcatcattttcacctttgtaatcagtcagcatttggtgggaagatactcaaaggctacacaatatccttccttttttttttttttttttgagagggagtctggctctgttgtccaggctggagtgcagtggtgcaatctcagttcactgcaacttctgcctcccaggttcaagcgattctcctgcctcagcctcccgagtagctgggactacaggtgcgcgccaccgcacccaactaatttttttgtatttttagtagagatggggtttcaccatgttggccaggatgatctcgatctcctgacctcgtgatccacccacctcagcctcccaaagtactgggattacaggcgtgagccaccatgcctggcctagcctttccttcttcacactccccaccgcctgccttggcatcctttgatggctcttccttgaattgagtgccaccattaaggtttcttccatggcagttttctgtcctacatggactaactagctggcattgtactgtaagggggggctttcccttcttccccatttgttcatgactttatttaggtctaaatggattcatagattattacttttattccatgggttataatccagaactgtgtgtgtgtgtgtgtgtgtgtgtgtgtgtttgatgttcaaatagtcccagatttgacagtggcagccccttttaggtggttcttatgtcctttgacgcgactcccccagctgggaagtaggtacgtgtatgtacacatgcatgtgtgcacacagccctccacaactagttctggatttgtctgattcctctgattgcagccctgccctgagggatctctggagtccaaccaccttctgtatatgcaagctcctctctgattgtgagaacctggctcctattatccttgatactggatactattctttgtaataaataacaaggggaagggaacagaagcctttctgacagaaccatcctggagagagggagggagaagctttttttttttcatctggaaagccctttgcacacatcggcctattgaagcactttgcttgattcagctattctcctctcaggacctgcctggatcatcccagcctgtagaatcctgggtttctgtggcagtttgttcttctggtatcacctgctatgctctgaatgtttgtatccctctcagccccgaaattcctgtgttgaaatcctaaccccta

SEQ ID NO: 6126 - DNA, 2300 bp, Homo sapien
agttgttgggattctacgtaaaagcacttcactttaatgctgccttaatttcctttatggtactatacttggggggaaattttttcttataaataagaatcctggtcctgggcattcatagatggtatttaatttactttttccaatgcccttgcaaaatagatgcttttcctcttttgccagctgaggaaataaggttcagtatggttaaacagtcggctcaggccacacagctaacgagggagaagtcaggatttgaactcgagtctcatttcaaaccctatcttgttatcgcagcagaacctttacctattaaggctaaggacgtttagatggctttgtgcttttgcacctcatctgaaaaatgtttttaaaagttggcagatgagttctaattgtggttcctcatttttttcctcatgtattttctgagtacgaggcttggctgaaggccagttcctaggtgcccagggaaagggccactttcttcaaaacagtagtagcccaggttagagcttacagatgtttcagctccacgtggtaagcttctttgggccctcacctgcatatggagccgaagaggtctgttttctgacagagaaacaaacccccagggtgctgagaatggtgacaggatgaacaggttgcaggatccttgccaccaagtgacatccaatgctgacagtgagtgacggcttccccgggaggtgctttccagagcacacctcgtcacaccaccccgacagccaccttccccgcaagattgacataatcattagctattttcatataaatgcaaaagtaaaccttctcagtgtttctgggaaatttcatgctgttacatcccagaaaacgatgttgatcctctggcattctgtttgacactgatactgaataagagcagtggaaagtcagtccccgtgaagctctggaactactgtgacctcgagtgtcagtatcaaaagagcccatccaaacatccttggccacgtcgctagaaaacagtgtattggaggcaattttaaaatgctttgaacaattttgtttttattttcttttgcttttggccacagtttagatacattttaggctcactgccctgtgggtgaagacaagctgggaaatgtggaagagtcttccacttacccatcagaggttccatttgaattcagttgtgagtctgggctgggagcgcaggaagcggttgtgttgaatgtacagcatgaggggatggtggggttcccaggtgtgccccaaacctcctgtacctatacagagatgaactctttctgcagcagcctccagtgaggaggctcaggatctcaagtcttgagggtttctgagcctgccataggccagggacagggatttggctgctgatgggtgacatgctgccagctacagaatggggctgactgggcactgggagcttggtgatggggtgtcacggacattcctacaggcccagcccgtgtttagaatcacagagctgagccgatgcatgtcacggagaactgcctttgccctgtacacgcatgctgcattaggggcctgccttgggcggctcagctggccgcgcctctgcttgtttagggtgagcctttgcacagggcttggctttgtggagctcatttggtggccaaagatggtgttgcagccccagcccgctcgcaggcccagtaccttttgctccctagcttgccccaggccctcagactgtgcggtgcaaaggtccttggaggctagccccgggctggctgtgaggggagagccaggtgccgcagctctccctggtacagacttcagctgcctccaggacccggggcctgaaggaggcagaagccggcggtggaaaagggcgcacgtctctcccagcgtcgctcccgctgcccgctgcccactgcagcctatttacctgttcctccagccatccccttagtcctgggccgggagagaccatttcctccttcctggagggatgagccaacagggctgagccccctactctctcggtggtcagcccgcccgaccaccacgcccctcctttctagggccccagctcccgggccgcggctcgtttgcatttcaaagctacacaatgcgggcggtcccggcgaggcgggaggggccggggcagagggagggtcttcgcctccccacccccagccccgtttccggagcccgcgatggagctttgtgaagatgcaggcgttggggctgctcggcgatgatgacatcatcgtgtcacacacaggagccggctgccggggggtttaagagaagagcctttcggaccacac

SEQ ID NO: 6127 - DNA, 2300 bp, Homo sapien
attctgcatctcccagtacttaggcctgcagaccgctttatcgtgtttgccctcttgtccaatgacacacttttagttttctggcatccttgactgcctggagcagctgtgacctcagaaatgcatgaaagatgccgctgggtgccagcagaacctagagtagccaagccaaagctggggctggccggatccccatgggcagtagggtggtggcacctttgagcatcatttggccaacatttgcagcatctgcagcatgtttgggaaataggagcaacctccttgactggcaggggctgatgaggtagaaaagctgagaggaggcagctgggagagcagtgagactaggcaagaggcagggccaaggataggcaggcaggactgaaggagaggttacaggtgatggctggagcggcaggtggcagacagcaagtgctactacaggtgccgggggcctccgtgtacaggctcccctgatcttcacagtggctctgaggagtcaagaacaggcttgctggtggccgtggctagtatgaatatttatggaagcctccgtatgccttcctgcaggatttctctgtcttcctgtcccactcttgacccttgctttagccacactggcctcctcgctgtttctgtaacgcaccaggtgctcctgccgcagagcctttactcgcactattccttctacccaggatgcttcctccccaggagtcctcctgtttcatgcacttaccttgattctggcctttgcttagatgtctcctcagaagatcttgcctgactaccttattttaaaagtgaaactctcctatcccggctttatttttctccttagcatgtatcaccctctgaaattctgtacattgtttgtttgtttttgagacagagtctcactcactctgtcacccaggctagagtacagtggcgcaatctcggctctctgcaacctctggctcccaggctcaagcgattctcctgcctcaggctccggaatagctgggattacaggcgctcaccaccatgcctggctaatttttgtgtttttttagtagagactgggtttcaccatgatgaccaggctggtctcaaactcctgacctcaagtgatctgcctgcctcggcctcccaaagtgctgggattacaggtgtgagacaccatgcccggccctggtggtttattcgctatcttcccctgaagaatgtgacttccaggaagggaaaggttttgtctatttctgttccttgttgaatctctagtacctagaaccatgtctggtcctgattaggcacttggtgaatgtttttgaatgaatactctgagctgttctttaatcggtcctcatgatcctcattgtacagatgagggaactctgggcgaacctggcctgggtcttgagctaattacgggtaggtcaggttctgtacccaagtagtacacacagtgatgggcggggtggcctggggccgtggtttgtcaacccctacgctggagggtgatgttttggtacaagaggagaggtgccccaatgcgtcctgtgtctgtaattgatggcgttgtctgtgtttccccaggatgtggttctgagacagtccctgtccctgatggcccacggagcgactcggtggaaggaagtcccttccgtcccccgtcacactccttctctgccgtcttcgatgaagacaagccgatagccagcagtgggacttacaacttggactttgacaacattgagcttgtggatacctttcagaccttggagcctcgtgcctcagacgctaagaatcaggagggcaaagtgaacacacggaggaagtccacggattccgtccccatctctaagtctacactgtcccggtcgctcagcctgcaagccagtgactttgatggtgcttcttcctcaggcaatcccgaggccgtggcccttgccccagatgcatatagcacgggttccagcagtgcttctagtacccttaagcgaactaaaaaaccgaggccgccttccttaaaaaagaaacagaccaccaagaaacccacagagacccccccagtgaaggagacgcaacaggagccagatgaagagagccttgtccccagtggggagaatctagcatctgagacgaaaacggaatctgccaagacggaaggtcctagcccagccttattggaggagacgccccttgagcccgctgtggggcccaaagctgcctgccctctggactcagagagtgcagaaggggttgtccccccggcttctggaggtggcagagtgcagaactcaccccctgtcgggaggaaa

SEQ ID NO: 6128 - DNA, 2300 bp, Homo sapien
caccaggtgctcctgccgcagagcctttactcgcactattccttctacccaggatgcttcctccccaggagtcctcctgtttcatgcacttaccttgattctggcctttgcttagatgtctcctcagaagatcttgcctgactaccttattttaaaagtgaaactctcctatcccggctttatttttctccttagcatgtatcaccctctgaaattctgtacattgtttgtttgtttttgagacagagtctcactcactctgtcacccaggctagagtacagtggcgcaatctcggctctctgcaacctctggctcccaggctcaagcgattctcctgcctcaggctccggaatagctgggattacaggcgctcaccaccatgcctggctaatttttgtgtttttttagtagagactgggtttcaccatgatgaccaggctggtctcaaactcctgacctcaagtgatctgcctgcctcggcctcccaaagtgctgggattacaggtgtgagacaccatgcccggccctggtggtttattcgctatcttcccctgaagaatgtgacttccaggaagggaaaggttttgtctatttctgttccttgttgaatctctagtacctagaaccatgtctggtcctgattaggcacttggtgaatgtttttgaatgaatactctgagctgttctttaatcggtcctcatgatcctcattgtacagatgagggaactctgggcgaacctggcctgggtcttgagctaattacgggtaggtcaggttctgtacccaagtagtacacacagtgatgggcggggtggcctggggccgtggtttgtcaacccctacgctggagggtgatgttttggtacaagaggagaggtgccccaatgcgtcctgtgtctgtaattgatggcgttgtctgtgtttccccaggatgtggttctgagacagtccctgtccctgatggcccacggagcgactcggtggaaggaagtcccttccgtcccccgtcacactccttctctgccgtcttcgatgaagacaagccgatagccagcagtgggacttacaacttggactttgacaacattgagcttgtggatacctttcagaccttggagcctcgtgcctcagacgctaagaatcaggagggcaaagtgaacacacggaggaagtccacggattccgtccccatctctaagtctacactgtcccggtcgctcagcctgcaagccagtgactttgatggtgcttcttcctcaggcaatcccgaggccgtggcccttgccccagatgcatatagcacgggttccagcagtgcttctagtacccttaagcgaactaaaaaaccgaggccgccttccttaaaaaagaaacagaccaccaagaaacccacagagacccccccagtgaaggagacgcaacaggagccagatgaagagagccttgtccccagtggggagaatctagcatctgagacgaaaacggaatctgccaagacggaaggtcctagcccagccttattggaggagacgccccttgagcccgctgtggggcccaaagctgcctgccctctggactcagagagtgcagaaggggttgtccccccggcttctggaggtggcagagtgcagaactcaccccctgtcgggaggaaaacgctgcctcttaccacggccccggaggcaggggaggtaaccccatcggatagcggggggcaagaggactctccagccaaagggctctccgtaaggctggagtttgactattctgaggacaagagtagttgggacaaccagcaggaaaacccccctcctaccaaaaagataggcaaaaagccagttgccaaaatgcccctgaggaggccaaagatgaaaaagacacccgagaaacttgacaacactcctgcctcacctcccagatcccctgctgaacccaatgacatccccattgctaaaggtacttacacctttgatattgacaagtgggatgaccccaattttaaccctttttcttccacctcaaaaatgcaggagtctcccaaactgccccaacaatcatacaactttgacccagacacctgtgatgagtccgttgacccctttaagacatcctctaagacccccagctcaccttctaaatccccagcctcctttgagatcccagccagtgctatggaagccaatggagtggacggggatgggctaaacaagcccgccaagaagaagaagacgcccctaaagacgtaagttcaggggtggaggtggtaaggatcagaggcgggggtgcgcattggctgtg

SEQ ID NO: 6129 - DNA, 2300 bp, Homo sapien
ttgaaggggactgtgtacttccatctctggccagtggatcatttgggtcctgcttcagggtcaccccaagtatgcaaggccaggcaggggccaagaaacccaggcaacagacgttcaatcttccaggacaaccgaaactatatagtttcaccctgcatgtatacagctaactaaccggtcctaactcagtcatctccggtcctatccattaaacttcttgagttttccaagctgtctcccttctcgggttcattttccctgatgctgtcgtagggtaggcacgcctgttctggtggtggaagagacaaattctgcacaggtacctttaggtcctcccccttcccagttaatgttggctctttaatcttacctgctgtccttgataagccctcattattctttccccaaatctctctctctctactacactgtggtagccttccaccattcaatttcttctcataatttcccaagggaagaagcagcctactctgcctgttagagcactctagtattgataactagggtagaggttcgctgggcagccatgacagcgccacgaggttaatgcataggactgagagtgtggttggtttgatgtttcttttgcagtagaagtagactgacaacccggctgtgctggtcagtgatgctgctaacaccgcatttcaactgtgttgcaaattgccgagcattttgtgcaaagggaaaaagaataaccacagattcctcctcctcacctgtgggaggccagtatctgtcctccacaaaaggctgtaaagcctcaaccaacatcagttgggtgggttggggtggtggatcatgccacttgttcagggtctaatcagcagatgtggatattgtcattgacccagtttttaattttcccattaacgtaacagacttcatggcaacagaactcttacataactctaacataactccaacataactcttacatccagagactctacctagccaaaggtgatattggttgacaactacagtaggctttaagctttgcgtgactcacatcctttcaaacagagctaaacaaatgcccccaaaatggaaatgtaaacagtcttacaaaagtgatcaaatctgtggttattcaaaactaggaaaacatagactagaattcaacattattcaccattgagatctcattttggaagtggaggctgctgaatagtgccctgggttctcaggcgctgtgcctaagtggctcagtgagtgataaatggcagagataagcaggtaccagacatgctggactccaaggcctcggagcttaaggggcctctgccattagcccctttgtctgcctgcccaggtgcagaatgatagatctccatccatagactggactcggcatttccctgttcatcagtctttgcactttctcatacttttgatgttctttgtttcaaaaccatacaattggcccattcatgagagggtgagtgtaatcctctttgtcgtatgattaatgctaactgttttttttttaattaaaaacgattccacagagagaggctgctcacccaacagacgtctccatctccaaaacagccttgtactcccgcatcgggaccgctgaggtggagaaacctgcaggccttctgttccagcagcccgacctggactctgccctccagatcgccagagcagaggtatcgtggcatgtggtgtaattaccctcttcctgccacttataaatacgtatgctcgtggtccacaaagccagagtctttggagacagactttgtcctctgaacgctgcaggcaaagatgtgtggcacaccatgcgttttgatcttcctagacgctatcgtgtaatgggccttttggccttgttgaatttacaacaaaaagcatgcccctttcagttgctccccagtgggcactgtgaaagtctgatatctggctgctttcttttttatgctcggggaagttctctgaatgtaattatggtttgttgtaggaagttttcattccacatttattcaccgtctccttttcttgatctatgaattgctcagagctgaattcactcatttggggctaacctttctcttcttctctctgaaactagatcataaccaaggagagagaggtctcagaatggaaagataaatatgaagaaagcaggcgggaagtgatggaaatgaggtcagttggggagctgggccttcctcgtgcctgagggatacttacctgtggtttaataatgaccggagctggtgtggtccacagaagagtgtcttctgtggaagttctctcttctttattacaca

SEQ ID NO: 6130 - DNA, 2300 bp, Homo sapien
cattcacccattgaccgtcctctgtcattccaaggcttttttcatcaggtgacaggcctgtggttgtcattccttcagccactgttgcaggtcattgactaaggtcaccgtagatttcaaggtccttgtgtccttgtggaagacagcagggggctgaggcatggctgggactcactgtggctcttggcaggacgtgccttctttctggcacggttcaggtcagggtctctccatgcttggtaacatgcccaggaggcccacctgggttccatgcttttctttccattttcactcacgtaaccagcatcccttgtgaaagaggaaactcaggcccagagagattggcagttcaggaccaccgtgactgtagtcgtattttgaagtcaaaccagctccagcccacatgtctagctcttcctggctctgctccattcagctttcacagatgctccacaccagtgtgacatcagtcctgccgttgttattcatttgcatcaaatgttactggagagatatgttttgttaagctcacatagtgactatttagaattcagaagagagagagacttctgtgctttctgcattccaggttgttgcaattgatttttttctgcttttctaacaactgccctgattatctgttttgcttccattttctgttgcttcttgccctttgcttgcaaaacaaacaggcaagcctggtaagtaaacgcttttccccctaatttgacacctgcccattgcaaccctttgtttgtttgtttttctatttttgttatttttgctttgtgtattgctgcattccccccacatgatttcatgatgttttgcctgaaaaagccagaaaagtcttcaggagcattgttttgttgttgagtgtagggtgtctttctcctgatttgaagaacctaactgcgtttgtcatgtacaaaaggatttgtgaagcattcttgcctcccccgtctcctgggaacggggtaattctatttttaaaaagggttaggttgagaggaaaggaaacctgaggcaggtgaagtcttggatccaggaaatcagatggacttggtttggtaaacagctcctttaccaagtcaggtgaaacatacacatgggctcagatcagcccagaatatacaccatacagcgtgctgggaactaagaaagcagccagaattccaagaataaaaacaagcatttgattattagagacatgttgaaaggccctttcttttaggagtgtgggtgtggcaagcaggttgttggcgattctatgttaaaaagctccctcttcgcaagccactgtgacactgttgctctgattccaggggtcacagagtttattatggacaatgaggctcttaataatgggttaccaatacgggactcttcctccttcttgggggctttatatacattttctcatttaatctcctgcaaatgccaggagatacaaatactctttcttcctattttagacaaggaggctgagactcagagagtttaaaaccctgctcaaggtcactcgtatggaaagtgtcagagtgagagctcgaactcaggcagttcagaggctcctagccactggcctgggcagctctgggctccagaggctcctagccactggcttgggcagctctgggctgctggtggtgagcgctctaggagtcccacgatcgcagaggcaggtgggaaggatattcggcatcttcagggccagtggttctccaagcagggtccctgccccagcagcatctgcgtcactggggaacttgtgacctgtgcacgttctctgccccaccccagacctcctaatctcacgccgtggggtggggtgtagcagcctgcgtgtgaacaagcccttcagctgaataaatccacactcacgtgggagagtttttggaaatgaggtgctgggaccctaagaggtcagaactttagagcaagcttatgtcgggaccggagctgaaaccgaggaaatgaccccaccacaccacacggtaacagtgtgcctagtcctggggtatggcaaggtgcagatatgtccggaacctaagggaaagaaactcatacaacaaaatctccctgctactaagggagctgcatcctccaaggtctgtcattacatggggcccgtgtagagacgtggttatgatcacggcttcaggcttggctttgggctctgccattttctcagtgaacagtgacttagcttctcaaaccctctgttccgccttctgtaaaatgagggtgagaaaagctgcccgggtggttgtgatgctctaagttgttcactcgtcgca

SEQ ID NO: 6131 - DNA, 2300 bp, Homo sapien
aagcatttgattattagagacatgttgaaaggccctttcttttaggagtgtgggtgtggcaagcaggttgttggcgattctatgttaaaaagctccctcttcgcaagccactgtgacactgttgctctgattccaggggtcacagagtttattatggacaatgaggctcttaataatgggttaccaatacgggactcttcctccttcttgggggctttatatacattttctcatttaatctcctgcaaatgccaggagatacaaatactctttcttcctattttagacaaggaggctgagactcagagagtttaaaaccctgctcaaggtcactcgtatggaaagtgtcagagtgagagctcgaactcaggcagttcagaggctcctagccactggcctgggcagctctgggctccagaggctcctagccactggcttgggcagctctgggctgctggtggtgagcgctctaggagtcccacgatcgcagaggcaggtgggaaggatattcggcatcttcagggccagtggttctccaagcagggtccctgccccagcagcatctgcgtcactggggaacttgtgacctgtgcacgttctctgccccaccccagacctcctaatctcacgccgtggggtggggtgtagcagcctgcgtgtgaacaagcccttcagctgaataaatccacactcacgtgggagagtttttggaaatgaggtgctgggaccctaagaggtcagaactttagagcaagcttatgtcgggaccggagctgaaaccgaggaaatgaccccaccacaccacacggtaacagtgtgcctagtcctggggtatggcaaggtgcagatatgtccggaacctaagggaaagaaactcatacaacaaaatctccctgctactaagggagctgcatcctccaaggtctgtcattacatggggcccgtgtagagacgtggttatgatcacggcttcaggcttggctttgggctctgccattttctcagtgaacagtgacttagcttctcaaaccctctgttccgccttctgtaaaatgagggtgagaaaagctgcccgggtggttgtgatgctctaagttgttcactcgtcgcatggacatgtatcaagacatcctgtatgcccggcactatcctaggccctggggcagagcaagtggacaaaacagactctggtgcctgccctcacagagcgtgcattcatcagggagatgagccgctgatacaccagcataggcacgcacgcacacacgtgcacacatgtgtgcacacatctgatacaatgataaggggtggctgctgctgcaaagaggaaaatgaaggactctagaggaagaggagccatttccagtacctctggggaggtgacatgggatcagagccctgagagaatgttggagagccctggaagccctggggcgggaccccctggggcattggaggccttcgtggctggagcagagaggcctgggagggtagagggcagagcatgtgggcaaggatttgggtgttatttccatttcagagggaggtcactgcgggggagctctgagcaggagtgaggtggcctggtttgcacattaggaagctcagtctggctgctgagtgctggcttagggacagtcaacacctagagcaatcagcagggtgcccgccacatggaagggtccagtcagcgctggctcccgttgttctgttatttccagatgtgatctgtctatggcagccagccctcggagtcattccaggtggcaggcagccccctccccagtgacgagggcctggtagaaagacaggtctgctgagctccttccccaggagctctgagtgggcgcttctcccttccccactctgctgtcaccaagagagcaaatggttcctcacccacctgggccggggatggatccgcacagaggacagaggggtgttttgtgtagagtagtcagagaaggcctttcccataagtgtagaaatgattttctaagcagccataaaaaaagaacaaagtcatgtcctaggtaccagcatggatgcagctggaggccattgtcctcagggaattaatgcagaaacagagcgccaaacactgagcattctcatttataagagggagctacacattgggtacacacggacacaaagatgggaacagaagacgctggggagttcacagtgggggtagaagggagacgggttgaaaacctgcctttcaggtactatgctcagtacctgggtgacaggctcattagaaatctgtaccccagcattagtcacacagtatggcc

SEQ ID NO: 6132 - DNA, 2300 bp, Homo sapien
aaataaattaacaacaagtgtttgtttttcaagcatgagagagggcccacacctggctcaggaatgcagcctcggcctctggctcctgaggcccctgcaacagttgttagaggcctgcttccggtctcatgctgcccctgagcgtctagggatggtgggcagaccctgaactgggttcctaacccccctgtctaagacatgccagtgtcttcagccccttgtcgcctacattcttctcccactggttctctcattgtgcacgtccctccctacctcctgatctccagaagagctaggctgagaggtgagcaccagtggactcctttgggccccacctcaaatcctgtctgcagcaccagctgctgctgctgctactaaacaccaaaagcctgacaatcagctgcttctccaacccggtggcagttgctgggatcagttgtatactaccatgaaaccctgtcgtctcactctcaaacccaaaatccaaggcacaaccaagagacatcgctctaagctgaagtgcacctctggaagctactagaacagccaaagatgctcttaacacacgtgcatacatggatgcaattgcaaatgaggacataggtgggtacaaacaccagggccatgttcgtactcaaacacagaagcagacacacacacctatgcatacataatcacatgtgcacacttatgcatgtggcactcaagcaggtacacaggcagagtggtggttatggactaggacatccaattacccaattccagagatgtttattgagcactttctaaagtccaagtttggttgctgggctctggggatgcagagatgggtaagccactcacagaacattccacagcgatcggcttctgtgcaaagcagaatatggtgttgggaggagtagaatcacaggatttgagggctgaggcgggagacaaattcaggggtacctcccatttatagagtgtttcgtagtttctagatcacagccacaggaggcagcgcagctactttcccgttttactttaggatgtatgtggcctaggagaggctggccttgggtcttaaaagctgtactgcctcctggttcctattactgtaactagggatttctgtgatccctggggtggtggtccaggcctttgatggacccgtggtgacccatgtgactctgacccacatggcctccacctccccatcccctagtttgggtcatgggcttcacaggccacgtcgctgaggacactgtaagattgcacttagggccaggtgcggtggctcacacctgtaatctcagcactttgggaggccgaggtgggcagatcacctgaggtcaggagttcgagaccagcctggctaatatggtgaaaccctgtctctactaaaaatacaaaaattaggccggtgtggtggcgggcacctgtgatcccagctattcaggaggctgaggcacaagaattgcttgaacccggtgaacctaggaggcggaggttgcagtgagtcaagatcacaccactgcactccagcctgggcgatagagtgagactccatctcagagaaaaaaaaaaagcaaaacaaaacaaacaaatcccaaacatttccactctggatgccagcttgaaggctcttggtcttgtccttgacttttaggcagtccttagctcccagagagagcagcattaaaaatcatcatcagcaaagtacttcattaggcatagcttttaataatgcggaatgctcaatttttattgaaatatgtttgtcaaaacacagatagaaaatgctagaaatagagcaccccagaatgccagagctgggaggcatctgagaagcttctagtctaatcttctcctttgacagatgaagcctgaagatttgggggttggttctcactgaggctgtgccctgggttgccccaggtgctgtgaggaacaggaatggaggcacatggcacccacactggtctctgagatgccatcactcacagcttctccccatcagccagggccttggacacagcccgagcctgagttgaaacctggccctggaacaggaagtgcttggaagcttccctgccgttgccgtggtgctcacaaccacccaggaaaccaaggcaagctccccctgtcaaagcaccttggcccataagaagaaaagggggagccccagatgtgatgagcgcttccaggcttcaggctcagaaggcgcccccagctctcctgtaactcagaggccagtgtgatgggagttcctccactcagcacacttcccctgtaaacacgcctgtggtgggcaaaagggc

SEQ ID NO: 6133 - DNA, 2300 bp, Homo sapien
aagcaggagccatcacattggccaaaggaacaatttcaaaccactcatcaatgatgtcaaacaacatttaggagagagatccggcgggtccagcctggagagggtgagaggctcttggcctaagtgttctattctcaggaccagtattttcagatcaaataaaagatgtgaatttgactttgaatttcaaataaacaaatttcccatctggaatcttctaggattctagcactgacaagctagagactccttccagaccttctagccagggaaggcaaactcaaatgcctacagggataagacaggtgacacctagatttttatttttaaatgttaaccacacattcagttaaatcaacaaaaacccactgtgtggaccaaaggaaacaatctgctctggctactttataaactatagtgaggccaaaccctttcaaccattatacagatgaggaccccaaaagggacagatgtcagcaaggctgcatagctaaggtttctcaaaagataaccaaaatatcacgttggatgaaaggcaattgaaaatgctaagtctcaaagaggcagtcagagagccgttctatgcagtttgcaagatgttttcacctccatcaatttatcagactctgagaacattctgcaaggcaggcagggtggatgacactcatttacagtcgaggtcactgagggtcagaagggcaaagtgtcactctctgcataaagtcacataggtaagtctacacaggaaaatctagggctgttcttcactacacctctgattcagataacaggtaggcttcctctaagattttaataaagacaaactcaaaatcctgtatgatgccccatgaagagaaacaagtcaggaggccaggctgagcccccagacttctaacccagttcgcaaataaagaaagtggcaaagtagatagattccagcctgtcaccagggttgtgtcttctgtcctagcagctgtacagcttgtcttaccactggacatttgtttcatgtacattttcacataggaaggatattctaaaagatgttgataaagattttttaaagggtttgaaggggataggatgtgatctaaggttgtgcaaggagaggaaaggaagaagcacacaaaaagaacaaatatttattaagagcctagagtggcatgcgctgtgaaaggcgtggcatgtaattctttcccagttctttgcctgtctgaatatttctcattcttcaggtttcagctcagatatcacatcctcagagaacttgccttgccactctctctgaagagcctccccccgtccccgccaccgctactgtctcttgaactttctcagtctggccattctattaaaatctggaacgattttgctagtttgcggacgagtttcccccaagctgcaggctccataagggcagtgacagtgtctctttctcagatgaatgccgggttgcctatcgcgtacttggcacacagttaagtgctcgagaaattgctaaacactcaacgaatatttaccagaatacatatttatgctccaccgttgctgaaagaatttcgactaacccttctttaagtctctcttaccctcctgtactattaacaccattgtaagtaggcagtggagctacatttgcagggagagagaagagcgaaaaattggcgcgcagagctgtaaagcgtttttctccaggtcacaccgcagcctgtaaatttgtgacacttggaccgattatgggacagcttgcaaacaaattatctgcaaactaacgaagcctatttttaaagatccctgttcctcgcagctctaggcgatgacatcagagaacccggagttctacctccgagccaagcccagtggtggtcaaaaactacgaataccaggaagcaccgcggcgcggcggcccagagctccgcgcgcaggcctccccggcgcgccgaggccgccgccgctggaaccaggaagacgccagaaactcggcccgccacgccgcagggacccgcgcggggcctgccgggactcgtagtctctgcgggctgggagcgcccgctccggaatctcagccgccgtctgagggctgaggcagcgtggggacgcgtgcgcagtgcgcgggctggccgtcgcggacgccgctccgggcagccgagcctctgtgggagccggggccgcggcggcgcgggtgctccgggccgaggccgcggtaaagtttagcttgaagaacgcggccgcgctggagcaggggtggtggacggggccaggcgcgaggtggcggcggctgcggggctgccgggctgctg

SEQ ID NO: 6134 - DNA, 2300 bp, Homo sapien
tatagattttgatatttgaatccctgtggtagtctctcgtgttgttctgttcttgggatgtcattggcaatggctacatctcggtatggtttttttgtatttgtcctgttatgagtgatactgaatatctcatcatatatttaaaggccatttttatatctctcttggtacaatgttcatgtcttttactcatttttctattgaacgtttgatatatttcccttaacattttttgcaagctctttaaatgctagggagattagccctttgtttatgatataagttgcaaatattttctactggctttgactttgcttatcaggtttttgccatggaaagcttttaaaaaactttatttggctgggcgcggtggctcacgcctgtaatcccagcactttgggaggccgagatgggcggatcacgtggtcaggagattgagaccatcctggctaacacggtgaaaccccgtctctactaaaaatacaaaaaattagccgggtgaggtggtgggcgcctgtagtcccagctgctcgggaggctgaggcaggagaatggtgtgaaccccagggggcagagcctgcagtgcgccgagatcgtgccactgcactccagcctgggtgacagagcgagactctgtctcaaaaaaaaaaaaaaaaaaatgacttgtagtcatttataaatgagtttttaaaattgttactgctccaggtgtggtggctcacacctgtaatcccagcactttgggaggccaatgcaggtggatcatttgtggtcaggactttgagaccagcctggccaaacatggtgaaaccctgtctctactgaaaatacagaaattagccgggtggtagtggctcagtgcctgtaatcttagctactcaggaggctgaggcatgagaattgcttgagcctgtgaggtggaggttgcagtgagccgagtatcacgcgactgcactgcagtctgggcaacagagtgagactctacctcaaaaaaagaatttttttttaaattggtactggatttttaaccttttgaagttacattcaataaactctatctgtttaaaatgtataatttgatgagttttgaccatgtctgcagcacattaagatacagaacatttccataactctgagaagtatcctcatgccacttacagtccttcccttcaccctcagctccaagcaactactgatctgcattccatccctatagattggtttgcagttttcagaattttatagaaatataattatttctataaataaataacactaaaaccactagttgaaatgttaggaagcagaattattatcaaaggctgtatccttttgtgtctggctttttttttttttttttttttttgaggcggagtttcgctcttgctgctcaggctggagtgcagtggcgtgatctaggcccactgcaacctccgcctcccgggttcaagcaattctcctgcctcagcctcctgagtagctgggattagagcatgcaccaccatgcccggctaattttgaatttttagtagagacggggcttctccgtgttggtcaggctggtcttgaactcccaacctcaggtgatctgcctgctttggcctcccaaagtgttgggattataggcgtgagccactgtgcccagcctatttctggccttttttgtacttaatattacgattttgagatttattcatgttgttgcatctgtcagtagttcctttttacggtagagcagtattccatctctactgatttgttctatgtcccatatcctttttggtctggcttctttcacataccaaaatacatttgacatttattagttgcgcatgtatcaatagtttgttcctttattttgccaagtaatattttattgtattggatgcaccacattttgtttattcgtacaccagttgaaggacatttgggttgttcgtgtttttttgccagttatgactaatactgctataaacatttgtatccaatatttggtgtgaacataagccttcaattcatttggataaatacctaggagtgggattgccgggttgttcgctaaggatctgtttaactgtaaaaactgccaaactgttttccaaagttgctatgtcattttgcatttccaccagcaatatatgatagttcgtttatttcacatctttgacagcatttagtgttgtcagggttttttttgtttgttttagacattttagtaggtatgttatagtatcttgtggtttttatttgcattcactttcctgactaattatagtaggcatctattcgtgtgcttattt

SEQ ID NO: 6135 - DNA, 2300 bp, Homo sapien
gaggcaggagaatggtgtgaaccccagggggcagagcctgcagtgcgccgagatcgtgccactgcactccagcctgggtgacagagcgagactctgtctcaaaaaaaaaaaaaaaaaaatgacttgtagtcatttataaatgagtttttaaaattgttactgctccaggtgtggtggctcacacctgtaatcccagcactttgggaggccaatgcaggtggatcatttgtggtcaggactttgagaccagcctggccaaacatggtgaaaccctgtctctactgaaaatacagaaattagccgggtggtagtggctcagtgcctgtaatcttagctactcaggaggctgaggcatgagaattgcttgagcctgtgaggtggaggttgcagtgagccgagtatcacgcgactgcactgcagtctgggcaacagagtgagactctacctcaaaaaaagaatttttttttaaattggtactggatttttaaccttttgaagttacattcaataaactctatctgtttaaaatgtataatttgatgagttttgaccatgtctgcagcacattaagatacagaacatttccataactctgagaagtatcctcatgccacttacagtccttcccttcaccctcagctccaagcaactactgatctgcattccatccctatagattggtttgcagttttcagaattttatagaaatataattatttctataaataaataacactaaaaccactagttgaaatgttaggaagcagaattattatcaaaggctgtatccttttgtgtctggctttttttttttttttttttttttgaggcggagtttcgctcttgctgctcaggctggagtgcagtggcgtgatctaggcccactgcaacctccgcctcccgggttcaagcaattctcctgcctcagcctcctgagtagctgggattagagcatgcaccaccatgcccggctaattttgaatttttagtagagacggggcttctccgtgttggtcaggctggtcttgaactcccaacctcaggtgatctgcctgctttggcctcccaaagtgttgggattataggcgtgagccactgtgcccagcctatttctggccttttttgtacttaatattacgattttgagatttattcatgttgttgcatctgtcagtagttcctttttacggtagagcagtattccatctctactgatttgttctatgtcccatatcctttttggtctggcttctttcacataccaaaatacatttgacatttattagttgcgcatgtatcaatagtttgttcctttattttgccaagtaatattttattgtattggatgcaccacattttgtttattcgtacaccagttgaaggacatttgggttgttcgtgtttttttgccagttatgactaatactgctataaacatttgtatccaatatttggtgtgaacataagccttcaattcatttggataaatacctaggagtgggattgccgggttgttcgctaaggatctgtttaactgtaaaaactgccaaactgttttccaaagttgctatgtcattttgcatttccaccagcaatatatgatagttcgtttatttcacatctttgacagcatttagtgttgtcagggttttttttgtttgttttagacattttagtaggtatgttatagtatcttgtggtttttatttgcattcactttcctgactaattatagtaggcatctattcgtgtgcttatttactatttttatatgttcttagtcagcttgtgtgttccaagttttttttttttaccattttcgtatttggttgtcttattattgaattgtaataattacctgcctgttctagggtatcatttgctgtctggatacatatatattgaatattttcttcatttttatggcttgtcttttcatttctttatggtgtcttttgaagagcaattttaaagtttgattacgtttcagatatatcaactattatatggttcaggctttttgtgtcttatctaagaaatatttgtctacccctaaggtcctgaagactttgtcctatattttgttctggaagctttgacattttacattgagtcagtgatccatttgagttagtttttttcctcatagacagtcgattattccagtcttgtttgttgaaaagactgtcctttctctacaaaattgccttggcaccttggttgaaaattaactgttctctcttcctgtttactagaagaatttttaaaagaccggtgttatttttttccttaagggattg

SEQ ID NO: 6136 - DNA, 2300 bp, Homo sapien
taggctttgacttaaggggaatactgtagctaatttgatgttctgtcgagaccagtaaagctttcttcatatcagcaataaagctgtttcacttaccattcttgtgttcactgaagtagcacttttaatttccttcaggaactttacctttgcattcataacttggctgtttggtgcaagaaacctcatttttggtctgtctcagcttttgacatgcttcacttactaagcttagacatttctggcttttggtttaaagcgagacacttggctgggcatggtggctcatgcctgtaatcccagcactttgagaggccgaggcaagaggattgcttgaggccaggagctcaagactagcctgggcagcatagtgagatcctgtctttacaaaaaataaaaaagttagctgggcatggtggtacatgcatgtagttctcccacctatttgggaggctgagacaggaggatttcttgagcccagtagtttgaggctgcagggttgccacaaaccttcaatttgtaaaaactccaatatctgtgaagtgcaataaaatgaagcacagtaaaacgaggtgtgtgtgtacctaggagtagaatggctggatcatatggtaattctatgtttaactcttgaagagctgccaaattgttttacacagctgttgtaccattttacattcccaccagcaacgtaggagggttccagtttctccatgtccttgccaacacttgttattttcctctcttttaattatagccatcctagtgggggtgaagttttatctcattgtggtttttatttggatttccctaatgactgatgatattgagtatcaaagttctcgttgaccatttgtttatcttctttggataaatgtctcttcaagtcatttgcccattttaaacttggactaaagtttttgagttctgaaagttacttatgtattctggatactagatccttgtcagatatatagtttgcaaatattttctttccttctatagattttcttttgactttcttgaagttgtttgatgcaaaaaaagttttaaaatttgatgaagtccaatataatttttgttgttgctcatgcttttggtattatatctaagaattcattgccaattccaaagtaagatttaccctatattttcttctgaaagttttctggttttagctcttaaattgttaatccattttgagttaatttttataaatggtgtgaggtagggggtccagcttcattctatgtggatatccagttgtaccagcaccagttgttgaagaggcttttttcccccacattgaatggtattagcacccttgttgaaatcagttgactatagatgtataggttgaaatcagttgactatagatgtataggtttatttctgtgctcttaattcttttccactgatctatgtctattctcatggcaagttgatagcttttacctgtggtatatggtagtatagagtattgatttttcaagctttgattacattgtaaacttttttttttttacaaacatggtaaatttattaaagaaattatttcctttaaagtatcagatttataagaacaataacagcaacaacacacaaacttattggatggttttatttaaaactttttggtgtattttatcatttctctgactgcatatggaatagtgatgcagatacatagtatatcagtgtgcattgtaattgaattttcactgtaagttaaatttaccttgagcctctaaataaatagttatgtaaattcatcctgccaaaagatgtgatggtgccagctatagaagtaccagaatagtaacagctgtctggtgcagatttgggctaagcatcacatcaagaaggaatcacatgtctgtagtctctagagaaacagttcttggcacctaatggttttttaactttaatcagtacaataaaagttgcagtactttaggaccagaatatgatacaccttttaagtctattttaatctataatgtctctctttttcttttttttcttgtaataatttacttgctaaagaaacttttttttttcctttgtttcttatagtctggctcttgctgattgaattcctttggtgcagtttagcatgttcctctgtgttctgcatctcctgtaggttggtatttggatatagaggggatctaaaaaacattttttcttgttgctttatgttcacatgataggtgatgtttgtgtcttccatcaggaggcacatcatacctgcttatctctctttccagtacattaactagtttattttgattcacttt

SEQ ID NO: 6137 - DNA, 2300 bp, Homo sapien
accaagaattttaaagtaatcaattggtattgccaagcttgggtattttcattaccagtgtgccttttgaactcaaaagactttgacactttataaatcttttaaatcaaattgtatcattccccacatttttcaggtcttttgctacgggagggtgattagtgggattagaaatcttacaacattaattaattaattaactattgagtgctttctttatgcttggcaaagggtatgttaatgaacagaaattccctgctgtcatagagcatacattttccaccaaagttggataaaaaaataagctaggattgtgtgtttactttttccaaaagtaatgattttaaactgttaaccttctggttactatgtacctagattaagcttctttcactggtattatgacctatgttgacataaggggtaagactattttcctgtagttgtgttaagacactgtattagtttgtatctgtggctgttttaattttgtctagagttaagattttgttgcattgtaattttggtatagatatttcagtagtttctaggattttatggagggtataattttattgcatcatttattttgtagtatagttttaaaaattataaaataatatatgtctatcataaaaggcaaaaattggtaaattggacctcatcaaaataaaaaatacttgctctatgaaagaccttcttaagaggatgaaaagaaaagctacaaactgggagaaaatatttgcaaaccacatgtccaacaaaggacttttatctagaacatagaaagaactcagaacccaacagtaaaaagcccaagaaatccaattagaaaattcatgaacagatatttcatcaaaagataaaagataaacagatggtaagtaagcacatgaaaagatgttcaccatcattagctagcagggaaaaaatacaaattaagagcacaataaaagatcactgcacacctctcagaatggctgaaataaaagtgacgacacaaatgctgccaaggttgaggagaaacataatctctcaggtgttgctggtgggaatgaaaattagccactctgaaaaacagtttagtgtttatgttttgttttttttttaataataaaagtaagcttgtgattactgtacaacccagcatttgcaggactaggtgtttatcgtagagaaagggaaaattacattcacataaaaacttgtgcatgaatgttgatagcagcttttttcctaatagctaaaagtgggaaacaactcaaatgtcctttaatgggtgaacagttaaacaactggtcatccatccataccatggaaatatagcaataaaaaggaatgaactctagatacaaggaacagtctggacgaatctctagagaattatgctgagtgaaaaaagataatctcaaaagataaccttctgtatgcttccatttacattacattttcaaaatgtcaaaattatagtcttggagaacagattagtggctgccaggggatttaggggtaggaactctaaagttcacaaaggagccttggggtgatgaccaattctgggtcttaaatgtggtagtagttacacagatctacacatgtgataaaactgcatagaactgtatagacacacatagatgaatgtatgtaaaactggtggaatccgaataaagtttgtgggttgtgccaatgtccatttcttgttttttgataatgttacgccgtttccctttgaggggaaactagtgaaagggtacataggacctgttgtactttttttgggcagcttctggtgaatccttataattatttcaaaataaaaagttaactccttccccaaaaaagagcactggtggcaggacttgtgcaaaacaagaggaatggaaatttgtgctttaatcagtgacaggaaaattaagagtaagtatctcagattaattagaaaactcttcaaaaatctgtttctgactaatctaaggtggattttaagattttctactgggataatatgaaataaaagtatgctaaacaagcaagaaaataatttatttattttgcttcattttagaaagaagaagtaaatgaatgtggtgaaagtattgacagaaataatctgaaacggtcacaaagccatcttccttactttactcctaaaccacctcaagatagtgcggttatcaaagctggatattgtgtaaaacaaggagcagtggtgagtagcttaacaaaatacatgaaataatgaaaaaggattacgttctagcaaactcaaattaacatggaaattgtttgctttattttat

SEQ ID NO: 6138 - DNA, 2300 bp, Homo sapien
ctattttctgtatctgtagattttcctgttatacacatttcttatgaatgaaatcatataatatgttgtcttttgtatctggcttctttcatttagccccatgctttcagggttcaccatgttgtagtgggtattttattcttttttatggctgaatagtatttcattttatggatatgccataatttatctgttatcagttgatggacatttgggttgtttctacctttgggctgttatgaatagtgctgctatgaacatgtgtgttccagtttctgtatggacacatgttttcctttctcttgggtagctacctaggaatggaaatgctggatcatatattcactctgtttgaagaactgccagactgttttccaaagcagctataccattttacaatcccactagcagtgcatgaggattctgatttctccacatccttgctgatacttgttatcatctgactttttgattctggctaccttagtgcctatgaagtagtatctcaatgtggttttgatttgttgatttgctgatgactagagatgccaagcatcttctcatgtgtttatttgtgctcttagagtttttaattcagttggtctggaatagttttttttttccttttattttttatttttttgagacagagtcttgctctgtcaccaagctggagtgcagtggcgtgatcttggctcactgcaacctctgactccctggttcgggctattctcctgcctcagcctcccgagtaactgggattacaggcacgcaccaccatgcccagctaatttttgtatttttagtagagccaggattccaccatgttagccatgatggtctcgatctcctgagctcgtgatctgtccaccttggcttcccaaagtggtgggatgacaggcgtgagccatggcgcccggctttttttttccttttaaaaaagtgtttggctgggagaagtggttcacacctgtaatcccaacactttgggaggccgaggcaggaggatcacttgagcccaggacttcaagacctgcctgggcaacatagtaagaccccatctccaaaaaaaaaaaaaaaaagtaaattagccaggcgtggtgctgcacacctgtggtcccagctacttgggaggctgaggtgggaggatcacctgagccgaggagtatgaggctgcagtgagccatgatcatgccactggattccagcctgggtgacaaagtgagaccctgtctcagaaaaaaaaaaaaaggctggggggcctgggctaggattatgcctgtaatcctagcacttttgcaggtagattgcttgagctcggagttcgataccagcctggcaacatggcaaaacctggtctctacaaaaaacataaaaaatagctgggcgtggtctgtagctgtagtcccagctactcaggtggctgaggtaggaggatcaccttagcccgaggatgttgaggccacaataagctgtggtcataccactgcacaccagcctggacaacagaatgagaccccatctcaaaaaaaaaagttttttattttgaaataattttaggtttagagaaaagttgaaaaatagtaaaacaacaacaacaacaaaaaaacaacaaaaaatcccaaaacccccaaaactctcattgacccttatctcagatttcccgaatgcttaccaccctcgctacatcattcaagttcttggaaacatttaaagcatgtgaaacatttaaaacatttaagttggaggctttaagttgcacgtcctttatttctaaatatttcagtgtgtttttcttaaaaaaaattttctcataccacagtaacatgatcaaaattggaaaatcaacattgattcaatactatgatctacaatcaaggttttttttttttttcaaatccctgggtctctgcattttttaaaagcttcacagatgatttcaatggatactagggacctctgttgcctcctctggcagagcaggactgaggggtggaccctccctgagaccacccaacaattcagggtggagttatcagggcgccctgactcctgggggcatttttgtgtgacgggaaaagacaatgctcctggctgagtgagatggcagctggcttggcaaggggacagcacctttgtcaccacattatgtccctgtaccctacatgctgcgcctatacccaggaccgatggtaactgaggcggaggggaaaggagggcctgagatggcaagtctgtcctcctcggtggttcctgtgtccttcatttccactctgcgagagtctgtgctggaccctgga

SEQ ID NO: 6139 - DNA, 2300 bp, Homo sapien
aagtcccccagatgacagggctcccacgtgcttctctaggtcacatgagcccacgctggaggggaggaggggtgtttcaagaagaggggagatgtgggcaaagaaaggcacagagaccgtaagcagacaggtgtgttccagaaaatgcaagttatttggcactgggggagcagaatgtatatgtggtgggggaggggtggaaaatgggtgagagggtggtggagactcagtgggatccccagctacttaattccccaacagggaaagagcctagaaactccctccacctcccgcaaagcagtggggaagttgcggccacactgttttcggtccgctcattccctctgcagtctggctgctcagggggatggaggaggatggggcttgcaggcaggcacagccggtttggaaggtgtcctggctccagcactcaacttgtggcatgacactcaggggagtcaccctttctggccctcagttttctcctctgtaaaataaggaaattcgacaaaaataagttatcaccaatttattcaccaccacgtgtccttttaattccatctgccccaggactgcagtggggagtctttctttgccgatggacttcgaaaatcatcaccccccgcattttttgtggttaaccacagctagccaggaactcagggcttctcatcagcagaggcctctgcctctccagtatccagggccgaatggattttgggtcaaggcctccctcccgcagccaggaggccctggctttatggaatatcgcttggagtccagggagtcagcatggggaccccgacagctttcccatgccccaggctcctgggcctttctgggggacccctctggaccttgggcattaacaaggttcatatttggaaggtgctttgagggggcttataggtatttggagtttactttttaaactatttgtattggaaaaataacgtgtgcacaagggaacaacccaaatacagaagaatattaaaatccccaagcccccagccccctcccatgctactctatcccaaagtcagctctgccggctcacccaaccctgggtgcctctgcccagggtgggggtggaggtttgagggttcgggatgagggctggacgaagggcctcctctcaggtccttggacacgagctgtgcccatctgctcagtgtggacccaggactactgcccacaggcctggtgctgcctgggcacccagacccacctccagggtcgccctcagccctcctgatgactctcggactcgcatctgtcccaacggatgcaccaaagattctccagtgggaaatcaaatttttgataacaagtgttttgaaataatcacgcacttggtgaaaaatcaaaagaggggaaaacccctttcccatctgagaccgctccaccctcgccagttacgagctgccgagccgcttcctaggctctctgcgaatacggacacgcatgccacccacaacaactttttaaaagaatcagacgtgtgaaggattctattcgaattacttctgctctctgcttttatcacttcactgtgggtctgggcgcgggctttctgccagctccgcggacgctgccttcgtccggccgcagaggccccgcggtcagggtcccgcgtgcggggtaccgggggcagaaccagcgcgtgaccggggtccgcggtgccgcaacgccccgggtctgcgcagaggcccctgcagtccctgcccggcccagtccgagcttcccgggcgggcccccagtccggcgatttgcaggaactttccccggcgctcccacgcgaagccgccgcagggcccccttgcaaagttccattagtttgaaggacgcgaatctcagcgagagaacctgcggaaagcgaatatgtggggcgcgcagacggggaaactgagtcccgcgagagggccggcctgtgcgctgccccgcccgcgccccgccagcaccgccgtgcccgggcgcgcccgccctgccccctccgcgggcggtcccggtccagccgcccgccctccctcccgccatccggccagcccccatcccgggcgccgtgcccgtccccaaggcggctcgtcaccgctgcgaggccaatgggctgggccgcgcggccgcgcgcactcgcacccgctgcccccgaggccctcctgcactctccccggcgccgctctccggccctcgccctgtccgccgccaccgccgccgccgccagagtcgccatgcagatcccgcgcgccgctcttctcccgctgctgctgctgctgctggcggcgcccgcctcggcgcagctg

SEQ ID NO: 6140 - DNA, 2300 bp, Homo sapien
agatgaggcacctgacggtgaaggctgaggtcccacacggtgttggcaggtggccctcaagcccattgtcttctgcccgcatgcccaggaccgccacatccttcctgttccactgacgtcacccatttcccacctgggatgcctacctgggctggctttgaaatgacagctaggcttcaccacttccttcttcctggtgtctcctgaacaaaaagctcacaaaccttattttctcaggatcttttctgctaaccaccatgggcaaaagatgcagtcaaaacaacaaaaacggggaggttacgcagttcagaaaatcccacacattctcaagaagggtgtccccgccaagctgagagatacctgggacatcatgctttcctggaggggaaggctccctgcccccattcctgtacagccgggagagtcgctcctgttcgtcatcccatcttctcgctctcatttgctgggctgacctctgctggtatttcaagactgtttggtgccaccctctctgagagatggcctccctcatctgatttagatgcttttctttaccttctcatagcagcttgtactaatacttgctaccccctgttgaaattgtcaccaggcaggtctgtctctaagaccagacagtctgcttttgtcttggaaggacacttattaccccttcctgttcacaggtatttagtattcttaccatcatctttccctgctgtgctcccggcagacaattctaatctgtcatgacactctgatgatcccagacccagctgcattatcattctcagtccaacactccaggaaccaagggatcacaatccacttctaagaggaatccagcatgtgcctggtcttgggcattccctggtaggtgagtaaacctgttctctcgtcacccagtgcttatcagttgctgatctggcagtaggaggatgaaacacagtgagcctattctgtgttcctgttctactcaaggggtgaagaggcacctggaaacaacaggaagagttgtaggattaaaaaggacatccaagattaaatgtaactttcatctggatgaagccaaaggcagacttccagccctaaattctgactggtggctgacacaggacatgggttcatggtacccttctagaatgcagcatagactactgatgaacagtgcatggcaaagaagccaagtgtcatttcatggcctcagcctctcagctgagaagcagggcacagctcacccaggctaggaaaacagaggcaagtcctggaaagctgtctgcttttaaccaagagttactggccatcaagtgtcttggttaaaaaataagtgtcaggcaaccttcttggtagagtgtgttggggggcattatcagagtctggtaatgacttctgagggtcccaaagagtgaagtgatatttacatagcaaatccaaggagggggattgtgtgcaatataggtggaggtgggggcaggttttgtgggtttgccaagctccaagggtcatacaatgtgcatgtcaaggacaagaaatcaaagccatgtgaaatggttggaggtggttcagtttgaggtcatgtgtttctcagctcctgttgtggaattagtgtgagacccagaagactgtggccaaagctattatggacccatggtctccgtggaatcatccctcatgacttctgctctctgatcacatccacactcatgtcatcctcgttcttccaaggtgaggttactagtactgcacaggggctgatgagagcatgtcctgccaggaaaaaccatcccagagatgctttcccccttggcactgtgtcctgtatttgctcagcagcccacatcctgttcttccccaaaccttggggcagacttcccacaggtgaatttgaactccccaagattaaaatcaagcccgtattcaggaaacacttgggagtccttgaggttcaccgagagggaagttggaaatttttcacttatgtcagtgcgtttgcagttgggcaacagccagattgttcatatggcaatcaatcaaacacacctaagttttttccacatattagccatcgactgttagcaaaagccctcacttcctttatattgatttatagcagcagtagaaatataccaccctagaggacacacctccttttagctaggtacctataaatgtccaggattttctattcaattgagaagaacccagcaaaatggggatctccacagtcatccttgaaatgtgtcttttatggggacaagttctatctacaggtattacgtttaattattatattcattaatttc

SEQ ID NO: 6141 - DNA, 2300 bp, Homo sapien
cagactttcccacagtatagagcctcatggctgtggtgacaccccgcccaggtgtatcctttctcaccctcgttttctctgaagtctggaggagctggaccctgacaatgacacctttacctgtctgtacctgctgtggcagggcaataacttttccatctaaatatctggagttgaccaggctgctgatgcaccatcagccctggaatatccccacaagcccatagcctgaagtaaccttagtatcactgtgtatttccttttggtctttttttcctcttgcatatttgtatttttacagcatccaaattataccctatataagttttatattctgcctatttttgcatcccattatgtcatattacagaaaattttttagactcaatttttaatgggtacacgatattccatcaattggagtccaacaatcccatcgattgttccacaaatatttgttgaatgcatatgatgtgccaggtgttgtatggcttgctcaaggtcacttaattagcagttgagtgtgggacacatgggaaagtcaatgaatgcactgcaaaaggcattttcttcactgctcagaggccctctgctgatgtccaggctcacagatggtccaggtaactgaatttgcctgtgtcaactggaaaagtacctctgtattttagtgcctacatgggtctgaacactggcccaactcttaatatccaccatggatttctggtaagggaaaggagttttaggacctgtgtttgtcagcgataacatggcaatctttttccatgagctgcttccttactttttaaatttatgttttcaaatacctaatacattcatgtggttctacattcaagacaatatcttcatgtataccatgaaatggctcattcccaccacttcttcatctgctgaatacctactgtcttactagttttttgtgtattattctggtttctttatgcaaatacaaatatatacatgcttattttttccctccccaacacaaaagagtattctagaatttatatatgttttcatcttgctttttgcatttgattatgtttcttggagttatttccatataagtaaaggtcttccttccttgatctttttgactcctatagtcctatactccattgtatggctaactagaattctctgaccaattactggttaatgggtatttgaatttgccatgaggtttgtcacctcaaacaaagtcacactgaccaaccttgggagtaatttattttgtacacataactgggtgaaagggcaaatacatttataattttgatacatattgccaaattaccttccatagagttttggcaatatcaattcccaccagtgccattcttaaccacacctttgaacagggtctcaggacaattgtttactgagttagcaaactgagcatctgccctacaccatgccctatgctgacaaccacacaccaaagaagaataagatgctgttggtaccttctttcaatagagggagagacagacttaccaagaaatctgacttaccaagcaagtcattatgtgagaaagcaccatagcatgaggcagagagtgctatgagaacatggacaaagggtgatttattctgcaaggagacattcagaggaagcaacaattaagctgggtcctgagagacaagcaagttgccaaggataagagagttattcaacacatgaggggactgtgaacaatagctcagacgcttgttttgagaatgatggatagtgtggcgttgatcaagcatgaggagctaaggctgaagagactagtgaaagccagtgagagagattttagttgactgagtcttcctcttgtgaaaactgagcagtcttgtgggtttttcagtggcagtgacatggtcagattgcctcccagccacattctctatccattctcttcgactccaacacaccaggagcctggtaatgtgtgtccatttcaccccaggggatcattcaatgtcttaaactcagacctcacaatagcccccaggtaagccagttatgatgcaagaaatgtttgtgacttaccctcgggccctcatcacattgtcttagaaacaaactccaggtgtgaacacctcccgtcctagcttattgccggagtatgatcagagaatggaagaatgactgtcagaggattgaaaaacagagggctagtgacacaatggtgcaagaaaggaagaatgaaaagccagttagaatatttaataccaactcttcctttcaggatcaagccccaacgtgttgccaagaggatctgagttctgcttca

SEQ ID NO: 6142 - DNA, 2300 bp, Homo sapien
aggcaggtttgggagcccttaaaagtcacgtggaccccagtcactgtgcctgccacatctgattgaggcatctgtcctgctcttctgtgttcttccaagtaatgaacacgtgcagacccgctagactccagcaccacaaggacatttcgggaggaagaatacgatgcatttcccctgatttgagactgcttcaaatcagggtgtgggggaggattctgatttatttcataacctcctcggggtagaaccgatggactgtggtaagagctgtcctaaccttatgccctccttagggctaagccataggcagtctgccctgtcgatagtgctgcacagagagctggccccattttcagacacaggttgctcgcaggagctttgttgagaaaagaggttcattttttatgcatagttcctggcagggttgagttgagaacagtagttaatggtcacactgaataatgcaagtaggagtgggttgtttatgaaatggaggctgctggctcagaagaactggagcctgtaaaggggggattgacctagaatctctcggaaaaccttcccttcccttctgagcataatctacttatgattatcataacgactcacatttccactacatttttcctcacatatattttctaacttggtctcaaaacaacccatatgttagatatgaaaaatatttctgcattggattattgacgttatgtaatattgtattgtattgtactaccactcctattttgtaagctagagcactgttaatataatgagacacagactctcaaactttttgtttaagaaatctaatggagtagtaggttctattttttacttctcctgttggcttaagaaaaaagcctcaccagtgtttctagaaaattctagaacacagaatgtcaatataaatatcatgatcagggcactgaattactaaataaaacaaccatcagaattccagatttttgagaggtttaacaattactttcactagacatagaaataatctgagatgatttctcctttgttttctccatcctatcactgattaaagcccttaaggtgtaaactcttccttatagagccttgcacataataggcattaagtgaatattctgtggtttaaagtataactgtgttggcagcaaagaaaagaaatgtctttagtgctagaaagaatgcgctgtaatctccagtctgggacattcccccatagcaaggcgacttccacagaaagactagcaagcgtccactggggcatggctgagaggactccccccccaggtcaggggtcctctggagttcttgtgccatgtgtaggcttaggcgacatgtgtaagttgggagcccagggatctagcattacctctctagatgtctaatgcaactgctcaccagggtcttctggcctccttgaggcacttccagggagtaggagttccagcccagattttccaagacccatagaaatttctgtctgcctaacccagaggaaatacccttttagttacacataaaggtagaataagcacttctctccctcaaaccttattctcttccttgatctcaggtctttgaaaccaaagccagaacatcctacaggctatatcagctctctactctgtatgtaacctgaggcacagggctcagcttgagagaaggaaggagaagggtaacttcagggagggaaatacatataaaaaagttcactggccttagaaagctgtacaaaatactaatcaaactacccagttccaattcacattgccactttggccctgagaaagctaacttggactttctgagtctcactttcttcatgtgaaaaacagaggtaataatagacccaaaagagagatgtaatggtcaaataagatcaagcttataaagaacctaggatggcacctgctattggtaatcacccatgaaatgtgagtggtagaatttatgattattattcttactattattcttcctatgaaataatatcatatggaagatataagtattatgacatcagcaatatatcagcacaacataataagactaaggcaatgtcctgacaccaaaggccactccccagtgtccctacttcttgtgcctccccaggagcctggatggaggtgaggctgctgaacggcacaggaaggtgctcaggccgtgtggaagttctcgtccagggcacgtgggggaccgtgtgtgatgatctctgggacctggctgaggccactgtcgtgtgccgccagctgcagtgtggccaggctgtggcagcccccacaggggcccactttcgggca

SEQ ID NO: 6143 - DNA, 2300 bp, Homo sapien
gttgtttattttgaacttgtgactcactttagcgcgttgtgtattttgaagtaaagacagagcacgacaactatcagcaggagcaaggccgccaggataccaccagcgatgacaggcataatcactgtatggaggtcaaaagacttcgatgtacctaggcagataagtgcaagcaagcactgagcccacgtggtctccctccccacacaaccactaagcaatgccaatgtcaggggaggaagaagaaaccccaaacacagatccttatgtgtgtaaaacacaaatgtcttcccagggcggcctaggatcccaagctggcccagagatggaaaaaaagaaataaaaaaagtcagtttgtcaatgaaaaggaatggaaatgcaaagtccagagagaaggctatcagaaggacaaacagtgggaagaatctttccctttcacaggtgtgatatgcggctggaaataacaagcaggcctgcagtggagctgatggcgtcactccccagcacctgggcctcctgagctatactcattttcagagtcagaaatgaccccccactggatatcaggctcaaagctcttctgtggaaatgactgtttccaaatgttactgtcccaacaatactgagaatatgcaaatccattttgtaaatgatgcatgttttaggaaaagaactttacaattcttcctctgacaactggcatttttcctcctaaatcttaaattctcccaagaaatccaatttgagataataaattagtttaactttctgaaactgggaaaaagtgagtcaggggagaagaataaacaatctgattgccaaagcatacttaccaccttctaactcctcatggctggatgaaagccaacagtaaaaaaaaattacaatcaaagtaaactttagggaacaggacatctcatcacgaatttctcaaacctttaatttgagaaagaaaattctaatgattaacatccaaagttgaagagcttgcttttagaagcagtcttccagcagagctagcagaatggatatccacaatctagttccaacttctgtgccaatcaggacacacgctgtgtgacatcaacgctctggacaccagctctctttcatggagttctgaattccattccacttccagatatattttagcaccaatggaagtagatatgcctaaatactctcttaagccatggaatactcaatctccccttttcaggctttgtttccctcagagaaaagttttagttaagagtctgattcccagagatgctatgttatattattttaaatgtccagttttcaaaaaagcctataagaaagtatggcccataaaggagtgggggagcaataaataaaaactgtttctggaagaagcccagacattggccctactagaaaatacttttaaagtcttttaaatatgttcaaaggaatccatgtccaaaaaactaaaggaaaatatgagaataatgtctcatcataaaaaataccaataaagataaaaattatcaaaataaccaaatagaaattatgtcattggaaactacaataactgaaatgaaaaattcactagaagggctttcatagcagattgggattgacagaagaatcagtgaacttgaagatagttgagattatccaaactgcaatacagaaagaaaaaaaaatgggtaaaagtgaacacaggacttctggtttctgcacaaacatgtgaagggcttgggagtcatcattcccatcctcacaacaagtaaaaagctgaataaagtggctgaataaaagctgaatcaacaactcttaagtcaaccagaaaattgaagtcacagggcaaacagccacccccaaaactaaagagagaggtgaatacagagaatcccagcttaggagcagaagccattgccagagccagcaactggtaagaacacttacatggtaactgatgtcttcctggatgatgaatagggactagcggaatatttaaaaactcctgagggcccaattttgttttgttttgttttgttgggtgggggcacacattcatgagtcatatctccaggaactcaccaggttcttataatgaagacaacaggaaaattcctttctgttttagtctccactgacactgcagtggaggtggccttattaccactgcgagataataaaagtcatgaaatttcaccaggcctcctctgatgccaccccagaagttaagtggaaagttgccccattatctattgagtcagagaagaaatccagactccccaaggggtctccactgataccacaggggtcagagg

SEQ ID NO: 6144 - DNA, 2300 bp, Homo sapien
agacagaaaacttttagacaatagcttctgcattctaggcaaacaccatagaaaaagctatggccctatcccaactccaccagcgaagactgagtagagagcctagatgtctactgttaccaagctgtaaagaagtgtcccaaagcacccctccaccagggtggtgtcagagaaggctgaataaagagcagagactcacctctgacccctgtggtatcagtggagaccccttggggagtctggatttcttctctgactcaatagataatggggcaactttccacttaacttctggggtggcatcagaggaggcctggtgaaatttcatgacttttattatctcgcagtggtaataaggccacctccactgcagtgtcagtggagactaaaacagaaaggaattttcctgttgtcttcattataagaacctggtgagttcctggagatatgactcatgaatgtgtgcccccacccaacaaaacaaaacaaaacaaaattgggccctcaggagtttttaaatattccgctagtccctattcatcatccaggaagacatcagttaccatgtaagtgttcttaccagttgctggctctggcaatggcttctgctcctaagctgggattctctgtattcacctctctctttagttttgggggtggctgtttgccctgtgacttcaattttctggttgacttaagagttgttgattcagcttttattcagccactttattcagctttttacttgttgtgaggatgggaatgatgactcccaagcccttcacatgtttgtgcagaaaccagaagtcctgtgttcacttttacccatttttttttctttctgtattgcagtttggataatctcaactatcttcaagttcactgattcttctgtcaatcccaatctgctatgaaagcccttctagtgaatttttcatttcagttattgtagtttccaatgacataatttctatttggttattttgataatttttatctttattggtattttttatgatgagacattattctcatattttcctttagttttttggacatggattcctttgaacatatttaaaagactttaaaagtattttctagtagggccaatgtctgggcttcttccagaaacagtttttatttattgctcccccactcctttatgggccatactttcttataggcttttttgaaaactggacatttaaaataatataacatagcatctctgggaatcagactcttaactaaaacttttctctgagggaaacaaagcctgaaaaggggagattgagtattccatggcttaagagagtatttaggcatatctacttccattggtgctaaaatatatctggaagtggaatggaattcagaactccatgaaagagagctggtgtccagagcgttgatgtcacacagcgtgtgtcctgattggcacagaagttggaactagattgtggatatccattctgctagctctgctggaagactgcttctaaaagcaagctcttcaactttggatgttaatcattagaattttctttctcaaattaaaggtttgagaaattcgtgatgagatgtcctgttccctaaagtttactttgattgtaatttttttttactgttggctttcatccagccatgaggagttagaaggtggtaagtatgctttggcaatcagattgtttattcttctcccctgactcactttttcccagtttcagaaagttaaactaatttattatctcaaattggatttcttgggagaatttaagatttaggaggaaaaatgccagttgtcagaggaagaattgtaaagttcttttcctaaaacatgcatcatttacaaaatggatttgcatattctcagtattgttgggacagtaacatttggaaacagtcatttccacagaagagctttgagcctgatatccagtggggggtcatttctgactctgaaaatgagtatagctcaggaggcccaggtgctggggagtgacgccatcagctccactgcaggcctgcttgttatttccagccgcatatcacacctgtgaaagggaaagattcttcccactgtttgtccttctgatagccttctctctggactttgcatttccattccttttcattgacaaactgactttttttatttctttttttccatctctgggccagcttgggatcctaggccgccctgggaagacatttgtgttttacacacataaggatctgtgtttggggtttcttcttcctcccctgacattggcattgcttagtggttgtgtggggag

SEQ ID NO: 6145 - DNA, 2300 bp, Homo sapien
ttttacaggcatgagtggaggatgccaatattaagtaatttttgtagaaaataatttcgcgtttactgaaaatagaataaaaattattttttcacttatataaattatcagtttaaacagctgcagtaaaaaaaaattgtttccaggccattacttaaatcctgagattcagtttgcctggtaggggacaaacagttgagatcccttctcaagtgacctggtcaataaccctgtgtcgtgtatttattatttccaatatgcacaatatgtaaaatagttgacgttttgatttatattaaggcgcgattagtgtagaatgttcctataagggactagggaaaagatcaaactataacacattgaatatggactaaataggctggtgtggcaccaccttgggcttgtaggttccttaaaaaatatgtgatcaaagtttcagactgactgtcaaattaatttctggaaaacagaccattgtgagtttatggagagagtcaagaagcagcaataaggactgcactcttgcctggacactttaactagtatgaccctctccaggctcacctctcctttattagctctaaatttctgcattcctaaaaatgaggaagctgaactagattgcctagaagatgctttaatggtctaaccttctatgccatagtaggtttttatcttctcttctctaatgtaaacatcaatgtcagagagtcaatcaatattgcaaaaggtgaacagaataaagacaccaattcaggagaacactttcccgtgtacaagtcacacaactgtcatccaagacagtacaaacattcttgcccctactggttccacagtactcctctcctaagtacacttccatatttcttgctgaacttaaaatgccaatagaagcgatttcttcacctccatcagggccacacctcaggtaaaggaagcaggggttttcatcttggttgttcaatcttctcttctaaatcaccagattctggctgagaagaaaacaggtgaaaacatcacacagtatagtttctgaacatggctcaaaacccacttgttaggccatgaggtttattctaacaaatgctcaacacagaattcataaggaaatggaggcatcacacatcagggcttccccctctattttttcctcaatcatcaacgttctactcagtcccctgcaattgattctcggatacattactggacacctactgtgtgcacaggagtaggagcagaacacaatagaagacaaagtgtatctttttcgaaattaagtcgacggcggtcgtctatagctggactttttacacagcctgttttggtggagaggaggtggcttgtttgagggtagatgggcggactgactttgatagcagccctgacgacccgtcacgcctgacggggacgtttatgaaattccaagtcctggtcaccttcccccgctcatgcctcggggcctcgggtacttcccggccagacctaccccgcctccgcccaccccggtcctcgcctccacctcgcagccccgctcccccgcagagacccgacaccaactgctctcctggatcccggactcagaccctcacgttccccgaggagcgcggcagtcgccgagcgcagcgacccggtcgccggcggcccggcgcaccgtggcgcaggtggcgccagaagctcctcccagtcgaagtcgcgggcgcagacacgagcccgggtgaggaggctgtgagttagggccccgcctgcggcatcccaggaagaggcaagcgtggggcggcgggtgaggcccccgtcctcggaccgcgtgtccactgcgccgcctcctgccaggcctctcttccagtgcttaagtgtcggccagtgcagcgcagaaacgggcaggcagagcgactcccggcttacatcatttcaaatgcccgccgcttctggatttggtgagaacctgcaccagagaaacgcatgcgcataagccaactggactcgagaggcgttcaaactttgctcaggaagcgctaaagagcggagcatgcgcactggcaggccctcgctcagcctttggagaccatgcgcaggcgcggtgcactgtgcgcgggcaccacggcggtttttcgacgctggcggtggacgcaggcagcatggaccacggttgctgggcggatggggagcgtctatggtcaggtaggtgtcgtctcttcgctctacgcgatgtgcaggaccgactcctgacctcgttctttcccgagtggacgccagggccttttctgcctccactccgtcgggtctgcagcatttgtggcagc

SEQ ID NO: 6146 - DNA, 2300 bp, Homo sapien
gataaaagctgtcaccaacctatcaattccatacaacaaacctgtactcaacataatgtctatctcagcaagcatgcagatagtagggaacacagatatataaacaggcaaagtctgacatcaaaggagaattatactacctaaaaaagtggtaattgtagcacagaggaatttgtttaattctgtagcaggatgaagtaagcttggtttcgcatgataaataggatttttcctactattgaaaaaaatggcattctaggtagaggaaactggaaggtaggcagggttcaaagtacaaaggactctgcatgctatgctaaggagtgaaggtgttgattcagtcaggaacattgatcaccagaaggagaagagggcagtgcaaagactgaaatggaaggaatcaaaatgaaagctactgacaaactcctggaattgttcagataaagctagtgcttggaaacagaagaagcagagataggaaaatttttctttaagaaaatgaagacttggtggtttattggctgtatggaaataaaggaaaggatagaccataggaatcttttgttttctgattcctggacattcagctttatttaaggaagtcaaaatccagtttataatattgctattgctcatgaaattgcagattagtttctgaagagcctattttccttcggattgtccacatgtattaatgtggatcaaagttaacttacaaccacaggaagcaggacatacaggacaaaaataatgacaaggacaacttagaatgagtctgaaatattaaaaaaatctttgcaaacgaggactttacaattctgctatgatagacctttggtgacatttctctctttcaatcttggtgaattcacctaccatacgtacattctggtgattacttatagaaaaatacatttggtcatcatttttcttgctttgacacaggtaaacagaatgcaaagtttattctcatttttagctagagggcacaagtcctagtacataaactcaaacgaaaacataagcaaaaagattaaagtaatgcgcactgagtcatgaacccagaatagacagctctgaaagaaaattagagtatgggtgagcaaaaacgttatttcctagagaggataccaccttaaacacaactttggaactctagattatagacaagtggaatttcagagtttgcttttttcaaaagacagaaaaataatctgcacaagcctctacaggaggaggatgagggggcacactatatacagtcccatcccgtggggcatctagaaagttccatctgctcccactgttctgcatccgtagccttaagttccttcaagactgagttcatattctacttcaacagagttctgagaccccccctttccactcgctgtttccagtgccatgaggagcgatctcatggggcagcccctgccttcggtgtctgggtctttcttgcatttcaaatttctgtcacctagagcgtccagccctggatgcccgggttcctgcggcctgagggttgcacatggggtcagggggcgtcagctgagacagcacccggcgaaggccagcgtggctcaatgcccatcacagatgcccttcaaccccaaaaccccatcatccgcttcagcccccctctaaagcgagaatatgtgtgagggaggctaggagaattcgaagtaaaaataacccgaatcggcagcgcgtccgccgcgctagctgccacaaatgctgcagatccgacggaatggaagcagaaaaggccctggcgtccccttgggaaagaacgaggtcaggagtcggtcttgcacgcagcgtagagcgacgagactacacctacctgatcacagacgttccacaccagctcagcaacggtcgtccacgccgcttgctgtttccccacagccaacgtcgaaaacaccctcgtgccggcgcgcagtgcaccgcgcctgcgcatagtctccagcgaaagagcaagggtctgccagtgcgcatgctccgctctcgacctcctccccgcacactttgaacgccgcgcctgaggccagctggcacatgcgcatgcgtgtctctggtgcctgctctccccaccaaagcaagaagcggcgggtacttgaagcggagtgagccggaagtcgctttgcctgcccatttccacgctgtaccggcggaaattcaagcactggaagagaggttccggggctgggctggcctgactgaaggcggcggaatggagacgcggaccgaggacgggggcctcacccgccgccccacgctggcctcttcttgggatgttg

SEQ ID NO: 6147 - DNA, 2300 bp, Homo sapien
cgtccacacaaaaacctgcacatggatgtttatagcagctttattcataattgccaaatcttggaagcaaccaagatgtccttcagtaggtgagtggaaaactaaactgtggtacctctagacattggaatattattcatggctaaaaagaaatgcactgtcaagccataaaaagacatagaggagccttaaatgcatattactaagtaaaagaagcaaattaaaattgtgtgattacaattatataattgtatgttattccggacaaggcaaaactacagagacacacacacaaaaatcaatggtgtcaggggttagaggagagggaggataaacagatggagcacagaggatgtttgtgctctgtgctctgaggatgtttgggctgtgaaactattctgtactgatggatatgtgtcattatacatagccaaaacctacagaatgtacaccaagagtaaaccccaataccaatagtaaactattttacaccaatagtaaactatggcctttaggtgataatgatgtgtcaatgtaggttcattgattattgattgtaacaaatgtatcactctggtgaaggatgttgatagtgggggaggttatgaatgaggaggggaaggagtatatgagaactctactttctgctcagtttagctgtgaacctaaaactgctttaaaaaataaagcctatttaaaaaaaatacataaccaaaacaaaaataactatgataaaaagaaaaaaaaaaccggttgcctgcaggggttaaatgggtgtggatgtggaggatgggagataaaagacagtggagccaggctcaatggcacatgcctatagtcccagctactcaggaggctgagataggaggattgcttgagcctagaaattcgaggttacaatgagctatggttccactccagcttgggtgacaaagcaaaaccctgtctcttaaaaaagtgggggaggggcaaattaaggagagggaccttatactggaccaataatgataaaatgtcatgaaataaagagtttaactcattgctcttcactttcagtccaaaggaaaatgagattatttgtaagtgcttcatacaaattatatcagctttagcaggttactcgtcatattttgacacagtatacactgattttgtccttacgtcttcacattttgaacataccctttacaggtaagaaggaattatcccctaaaatataaggataaaagaatctggaatctaggcccgacgcggtggctcacgcctgtaataccagcactttgggaagccgaggcgggtggatcatttgcggtcagttcaagaccagcctgtccaacatgaggaaaccccgttcttactgaaaatacaaaaattaattgggcagtagtggtgttcgcctgtaatcccagctactcgggaggctgaggcaggagaatccctcgagcctgagaggcggaggttgcggtgagccgagatcggaccactgcactccagtccgggcgagagagtgagacgctgtctcaaaaaacaaaaaactgtaatctgaattcaatttttctacaacacacccccagacaaaaaaaacttggccagccgcggtggcttgcgcctgtaatctttgggaggccgaggcgggcggatcacaaggtcaggaaatcgagaccatcctggctaacatggtgaaaccccgtctccactaaaaatacaaaaagttagctgggcctggtggcaagcgcctgtattcccagctactcggaggctgaggcaggagaatggcgtgaacccaggaggcggaggttgcagaggttgcagtgagccgagattgcgccactgcactccagcctgggcgacagagcgagactccgtcttaaaaacaaacaaaaaacaaaaacttgttttgtacctctccatagcttagtattactttttaacacaaacacctattgttctctgtctgcatgcactggaattgaggtctgtggatgtgcctttcctgacaatatttcttcacgcttgctgcccactggtgctgtgagggcacaataacgaatgtttactttgcccttgcactcttcacatctgggaaccgcaaaggagcgcggtggtcggactgtcagcctcgccttctattctttgatttccagtaacttattttcgaaagattgctggagggaaaggctcaacgtctcttttgggattttcctaagcagaaagacctcatcctaacaaaactgaggcgccaatcctactggctggcaactttcggcagggagggtgattctatttgaagatcaatccta

SEQ ID NO: 6148 - DNA, 2300 bp, Homo sapien
tgttctctgtctgcatgcactggaattgaggtctgtggatgtgcctttcctgacaatatttcttcacgcttgctgcccactggtgctgtgagggcacaataacgaatgtttactttgcccttgcactcttcacatctgggaaccgcaaaggagcgcggtggtcggactgtcagcctcgccttctattctttgatttccagtaacttattttcgaaagattgctggagggaaaggctcaacgtctcttttgggattttcctaagcagaaagacctcatcctaacaaaactgaggcgccaatcctactggctggcaactttcggcagggagggtgattctatttgaagatcaatcctaactctgggaccccttgggaatgtccaggagctaggaacgcagcgccgcggtctctccagcctctggtccctgggagcaagcagggcaccggtggagcaggtgcctctggggccgcacggaaacccagctaggccagttcctccactgcgccggtaggcggcggagacgctgcgcgtgcgcgcagggcagacggtagagcggagacgacgctcccagactcctccggtctccccgggcagcatgaagaccgccgagaacatcagaggaaccggcagcgacgggccgcggaaacgaggcctctgcgtcctctgtggcctccccgcggcaggaaaatcgactttcgcgcgcgccctcgcccaccggctgcagcaggagcagggttgggccatcggtgttgtcgcgtatgatgacgtcatgcccgacgcgtttctcgccggggcaagagcgcgaccggcggtcagcacggaggggcggggcctgggccgcggggcggggcggggcggggcggggcggggcggggacactcgcgtccacgcggtcctgggtgatttgccatgagcgcccattgcttggtgtgggaggtgaagttcgagaaaagtggagctgggttaacatagttactgcagagggtgaatgcgttggctgtagaaagtggttacaaagccaactgttagaacgatgcattttagatgcttatctgtatatttgatgcatgtatatgttgtatattctatacagttgagtcttcagacagggtcaggttctcaagtcagcgtgcaaggtggaaagcccctatagtcaaatgcactgtcgaaaatcccttaggaagtttctccttaggagagggaaagaagttctaaaacttgaacgtctagctacgggtggattcaggttttgtaatttgaggaatcctctttaagaaaaggaataaaaactataagtaacaaaatttctggggtccctcagaacgatagaaagaggctgtacaaatgcattatcagacctatgaagcttaatctttgttcatctcaaagtaaatctgcctctgccagctttgggaaggatggctgtttcttagttgaccaccagaggaagtaatgggtttgtatttacggaaaaacttgtatgttccaaatacatctctttaagccctcctcatctcacactcagcacagtgagatacatcctcttggagaagcatgtggaaactgagaccactgggggaagagtagattacattcgtgtttctcatgctcactcttgagtaaatactctttgaaatattctgaaatgttaacattattatttttgttgtttaatgcctaatgtagatgaatttacagaaatcaaatgcaaatgttatgtgactctactttctaagtatatatacaaaaatacagtacatttggtgcatgggctctccagcaaggtgtatctactttctcattcttggttaattgtgaagtaagtgcagtgtcaggatagcgcaggattgacctggatgatagtattttcaacacttcggagaaagctgaaagttgtcgatagggattgttgtatttgctggctttcccttcacttgtattatgttgttttttccacgcttttcctatggacaaagactgtgggactcatctgctcacttaggaagtgatatgtgtttccaatttagtgggtttagctgatgtgtttgttgtatgtagtgtaatctcagtggtggtaaggcatgggcaggcaagtgagagttctcactcccctgtcctcgtgttttccctccagcttagatttcttaactatgtcaggattctccacagcccttgaccagcacaagattacttgtattctcaagctgtttattcccctcagtttgtttcctccatctttccccatcccatatcaactcatttgttagcctgaggtcttttcttcttgacccagagactt

SEQ ID NO: 6149 - DNA, 2300 bp, Homo sapien
ctttgattctcttgctaaaatagatagtctaaataggttgcctggtagttttcttatagaaagagatctgtgaaagagtgcaacaggtactgggtcctatttgccttagagctcaccatagttacactgcttttgcatatgtgaggcttgtaggctatgctgtctaatgcatttcattcattacgtatgtcttgagagttctagagcagcatatttctagcagaaacttcgctggcgatggaaatgttctatatttgcactaatatggtagctgctagccacatttgactattgagcccttaaaagtagctagtgtaactgatgacctgaatttttttgtttaacttattgatttaaacttaagtagcctcatgtggccagtggctatttattggacagcgcagttccagaggtatattgcccacacttccttagttcctgcatattgtccacgagggatcggtatcagctcactgcaggcttgacctcctgggctcaagcagttctcctgtctcagtcccctaagtaactggaactacaggcccacactgccaagcccagctaattttttaatttgttgtagtgacagggtctcactatgttgcccaggctggtctgaaactcgtggcctcaagcaattcttccaacttgacctcccaaattgctgggattacgagcatgagctatcacccccggctaatattttcttaaattttgggttacattgggaacagtgtctataattccttttgaaattctttttaggaatcttatcttaaggttatagttcccttaaaaaaatatttgctatgctttacctcttttaagactgtaaacaaactgggtgcagtggctcacacctgtgatcccagcacttgggaggccaagaagggaggatcacttgaacccaagagtttgaggttgcagttgagctatgataatgccactgcactccagcctgggtgacagtgaaaccctgtctctaaacaaacagactaaatagaacaaaagggcatgggtatgaaaattagctagtgatcactggctgaatagtcactaaaactcaaattctctcccagttctgaacactttatatatatggtctcattcagtcctcacaaccaccctttaagggtagaaactactatccccattttatagatgggataactgaggcccagataagtaaagtaatatacccaggtaggaagtggcagagccaagatctggacccagtgagatcgcactcactccagaacctgggctcttttcagtgtgaggaagatcatcttgaggttgagctttaacttgatgagctcactcgcttaaaactttttagtgccactcccataatctgagtaaaattcaaactccttaccctaacttaggtgatctaacccagattaattctccaacttcatattctgccactctcctcctggcttcttttcagcctttctcttgcacgaacacaaggagcatgttcttgccctggggcccttgtacttgctgcccctctgcccttcccacattcttatacttgactgccttcactgaccatcctaactaaagcaaagaacattagttgggctaccctgtcactcttatcattgtcactttattgtctttgctcacttatctacttaccaccatctgaaattattttttgctttatttaactgtttatctgtctctattacattatcagccttggcaaacgcaaggatcttgctacacccccagctcagcatgtggttgtacagtatttttcatataagacgttcaatacatatttgttaaatcaatgaatgaattctacctgaaaccttcatggacctttgctcagtgagaaactttgctcatccatatccagtaaataagcgggagccagaaagtaaagaccaggcatctttccatagagaataaagttgagctcttgtggcccccggttcagccttaagaggggaaaagagaatgacttttcaaagcttattgacatgagtcttaggaaattggtattttttaatgaggggtccttagcttatcatttgttttgagctactgcatttggattgtctacatggaagctagcttctaaatcatttagtttttttccttttgttaagaatcttgggttatagcagtttcattcctctagaattcagtttaatattcataaatacaagttccttaaaagtcagatgttggctgggcatggtggctcacgcctgtaatcccagcactttgggaggctgaggcaggtggatcacgaggtcaggagatctagaccatcctggcta

SEQ ID NO: 6150 - DNA, 2300 bp, Homo sapien
aaaaaaagaaattatgaggctctgagaaatcagaaatcaaaacataaaaataaaacataagtaaaaccatgttgaaagaaatccagaagagaaattatacaatctaaccttttcaccccaaatctgttcctcctttttcttgccactccaacattgatgaaatgtagagtaattgaaatttacttcggagatacagcaagggactccaaaaggccatggagagagaatttcaactaaaattgaaaagccatacagaggtctgcataaaaaacaaacagcacaccacaaatcaaaacctttaagataaaaacttaattagcatctacaggttgaatgagctagtaacttatgccaatcttatcattacattagctgaaaagaaaacgaactgacagattaatcaaagaacaaagcagtagcttcacttcagcaaaagctccataggatcaccaaagaataactggtgtgactaccgttttctcactggtggattagtttttggcaagatttttaatgtctaaatttaagttaaacttcagtttaaagaaattaagattaacttcatttagtcacagcacacttccaaaacggtcaagcttagtactgctgaacagctgtagttgcataaaaacaacgcatagtcctaagtagggaaatgggaaagggctttaaatacaaaaacaaaaaaaacatgcacacccgataagggcacatctgaatcccatccttcttatcctatcataacacaaaacagctacggttttctgggaaacatcctggaccgctaggggaaaataacaccagacatttcaattcactgtaacgaactctcatcaataataataacctttagctgttgtgacaacacgacataaatcaaaattaaattgaatttttaaaattgttagttcctacgtttaaaaaaaagttgttttaaatacattctgttctttcaaaactgaatttcctcagatcacacaatttaagacgcctttatgtcttcttccgcttgtcacacgtctttcgggttctgaccagcacatcaaggggactctaagcaggccacgtggttagtgtttgctagaacttgtttagcttcagatccagtcatcgagcatgctaggcttggctactcgcgctccacacagtttatccaaagatctaaaccccgaatgaacctgaatagttatttgctacaatgtctttctcaaatctcacatgttcctaaaataagggtgcccatgcagtagagacggatccgggcaggatcattagataaaatacgaaggctttaaacgtccttctcccaacaatcagcctgggaccggcgtcggggcagcagcctcaccaagattcggagcgacatcctcgccaggattcgaaacacctaggagacccgcgcccggctgactcccagcccctgggaccccgtgaagacgcaaacctcgggacgcctcccgcagaaccacctgtcagagccaagcaacagtccccgccccggagcctccgagctcctgctcgaaggcaatgacagcaggagaccccgctccctcggggttctcgcggccataggcgccgcagtccactgccctccggctaaagaggtcccgggccatcacctgcccgcctaccgaccacgcccgaccctccactgaactgagtctccgtccggatcagccggcccgccacgaacccagctccagtctccggccgctccttcttatccgccctgtcctgccgcgtcgccgccgtccgagccggcagcctgctacttacctcctgacaactgcatggagtaaaccacaccgccttgttaaatgccgtcgccgccgccgccgtcttcgtcaccgtcacagtcgccgccgccatctttgttgtgtctccgactcccttcccgcccccctgccttgctcaagtctcgcgtgagcaggatggagggcgaaagcgaggaggggcctgtttgtctctcttggggttccgtaggcagcagggggcagggattaagggggggtgtgtgcggggcgggtactgagtgggcggggccttgctcgggtaactcccaggggctggctagagacccagaggcgcagagcggagaggcctgcggcgaggatggagggcctggcagtgcggttgctgcgcggcagcaggctggtgagtgcgttcgaggctggcgtcctgggggcccagggcgaccttggcccctggaatcgcagctggcagagccttctaacgggcctcggggcgccggcctgagccccgctccacgtcctgggtccccagactctttacccgcgggc

SEQ ID NO: 6151 - DNA, 2300 bp, Homo sapien
atctgcacgcagactgtagccccttaggatttgttccacacctacatgacatggggttagttgcacatagttctaacctttcctctaaaagataaacttcttggaggtagagtattttattcattattacatctggcatagcacacaatgcttcgtgcatggcagtaagagctgatatttaccgagagctgactacattccgagcactattctaagtgccttacatgaacatatgagctcatttaattttcacaacaattttggaatacgcacaattattctctccatttacagaccaggaaactgagacccaaagcataacctgtccaaggttataccactaggaagtgagagggcctgggttcagatccaagcagcctagctacagaacctacgttcttaaccactatgctacagtcgatgttcaatcaatttagctaatttatgtaaaagagcttcaaaaactataaaggactataagccacaataaaccaaaagttcaaacaaaataggtttttgatatctctaaggacggggagacagtagtatatgaaggttaagtttagaatcagaccagagttcgaataccaccagctctatccctttctatctgtgggcaagctattattctttttcagcatctgcaagattaaactacttgttaagatggttgtgagaattgagatgactcaggtagaacgagaacgtgcctaccacagagtatgcggtcaataaattttggctctaaaacagagtcaaattgtaaaaccaaagaaattttctttgctaagttattaaccaacaattataaacagtattaaacaataatcacttactgttttttattgcacttcaggcctgtaaaacagtcaaataacattaattatctctaataagaaaaagggtcagagttctgcctctgggcataagactgaagcagcagttggaaagcctaactcattaaagcaaatgcaaaggaaacattaaaagcacacgtaagcagtgggaaaattcccagtgaagtgtactgacaaatacaagtgtatccaaatgtgtatgttctgaaaagcatgctatataataggtccaaggggtgaagagcataggatgttaacacaggggctgttaacagtttgtgtgggtgcacagataagaattaagcacaacaagaggctggtttcagcttaagttcatggaagagggaccggcaccggctccggctcccctgggcggcggtgagtctatccacggaagatacccaggctccagacatgagataaggggcagagggaactctgtccctggccgggaagcccgaacaactccgaagtcccttactacctttgagcggggccgcggaaggaaggacagggagacacctgctcagaatgagactgggcctatattttaactatcttttttgggggagggggtgtgaaatgtaatcactcgggaaaggtgcgttagggcatcagggaggtgacatctgtgcaaaatgcatccagagatccagagatccagactcggtggctctcaggacgcaacggcctgcaaaggacatcttgcggacgcgaccctccgactccactcaaggtacttgctccgccaaagcagcttctagacagccccgacccccttgccaccagctgcctccaccagaggcctgaagggggtcggggtcatagactgcccgcgggtaaagagtctggggacccaggacgtggagcggggctcaggccggcgccccgaggcccgttagaaggctctgccagctgcgattccaggggccaaggtcgccctgggcccccaggacgccagcctcgaacgcactcaccagcctgctgccgcgcagcaaccgcactgccaggccctccatcctcgccgcaggcctctccgctctgcgcctctgggtctctagccagcccctgggagttacccgagcaaggccccgcccactcagtacccgccccgcacacacccccccttaatccctgccccctgctgcctacggaaccccaagagagacaaacaggcccctcctcgctttcgccctccatcctgctcacgcgagacttgagcaaggcaggggggcgggaagggagtcggagacacaacaaagatggcggcggcgactgtgacggtgacgaagacggcggcggcggcgacggcatttaacaaggcggtgtggtttactccatgcagttgtcaggaggtaagtagcaggctgccggctcggacggcggcgacgcggcaggacagggcggataagaaggagcggccggagactggagctgggttcg

SEQ ID NO: 6152 - DNA, 2300 bp, Homo sapien
ttttctccctgtcctttcaaaaatgtagcatactatgtatcctattctgtgccttcctttttttttttcatttagcaatatattcaagagatatttgcatattaagacttagagagctttttcactcctttttaaaatttaaatagttgcaaaatagtccactgtgtacaagtaccaaggtttttgtttttagaactaggctccaccttagactgcatagaaatctaataaaagtcattacctctgggggtagggtaggctggggaaggtacaacaaaactccttttgttgtaagtaaactgaaatgagggagatctttgtgagcatctagatggtagtggtggttatgcaaatctacacgtgataaaataccaaagaatgatacatttacatacttctctaaccaaccaggttaaatggtgatgatagaggggctctgaactaactatagacagattaacaatagtagagacaaggtttatttacacaggcagttgtattttcagaaggctcggtttaagtttaaataatgtttttccctgtggctactgattggatgttttcagtttaaaattttcataatactttggtggactattattagttctgtttttcagagccttggccaaaacagtatgctgttttaatatttaaatttttgtgcccatctgataggtgaaaaattgtatcacaaggcattctcttttttgtttgtttttttgttgtgagacagagtctcactctgtctcccaggctggagtgcagtggcgccatcttggctcactgcaacctccccccaagaactgcttgggttcaagcaattctcctgattcagcctcctgcgtagctgggattacaggtgcacaccaccacgcctggctaatttttgtatttttagtagagacagggtttcaccacgttggccaggctggtctccaactcctgacctcaggtgatctgcccgcctctgcctccaaaagtgctgggattacaggcgtgagccaccaccacactgggccaggcattcttatatttgtgcttctcttcctatgcatttgagcatgttttcatatgtctacaaaccatttgtatttctttttctgcatacagcttattcatgttctttgcccatttttctattcaatttctttttctgttcccattgatttccaggagctttatacaaattagggaaattagctctttgatggcaggaattacaacttttaaaaaagccagtttgtgatttgtcttttgacttcgcttatagttttgggtattttgccatgcaaacacattattttatttatttatttatttatttatttttcgtgacagggtctcactttgtcacccaggctggagtgcagtgatgtgatcacagctgactgcagtcttgacctcccggactcagatgatcctcccacctcagccttccaagtagctgggactatacgtgcacaccattcccagctaattttttgttgttgttcttgttgttgcagagacgaggtctcgctatgttgcccaggctgatgtcaaactcctagattcaagcgatccttgtggctaggcccccgcaaagtgcagtgattgcagacatgagcgactgtgcctggcctaaaagccttttattttcattaattactttttcttcagggtgatctggtttaacatttgttttgttttctttttgttttcatgacagtctcactctgtcgcccaggcatgagggcagtggcacgcccactgctcactggaacctcaacttcccagggtcaggtgatcctcccacctcagcctccaggatagctgggactgaggcaggaaatagggtctggaggcagggaacctaagggtttcctagaactaaattaaatggaaagcctctaaccttctaaagccaagtaaataattttgtaactatacttcagctatggcaggaaacatcatataccaagtaaccaatgggaaacctctagagtgtatttgaaccccagaaaattctgtaactgggcccttgagctgcctgcttgggcccagccccacgagctgcttgcttgggcccggccccaccctgttaggtgtgctttcattttcaatacatctttgcttttgttgcttcattcttttcttcctttgtttgtgcattttgtccaactctttgttcaaaatgccaagaacctggacaccctacactggtagcatagtttggttagccagccaggtggtaagcccaaagtttggggtttatttttcaccttttcctttctgctccatccaggggaatctctctctct

SEQ ID NO: 6153 - DNA, 2300 bp, Homo sapien
tatcatttttgtttgcatttcaatagattacagtttttacaagagatcatggttttaacagtattgggtcactgtatcctctgtaggtttcccttataggaagtggtttcttatagccatttcagtcacttaatgacagtgatttgtgcccttaaaattttagggaatgatccttttccagtttgtcatgatgtgtatatttcattctttttactaatccagaaactagctgtcaaccgtgatccaacagtataattagttcttaggaattcctctctcacaggtaactaggttttacacacacacacacacacacacacacacacacacacacacacaactttgcatttggatttaaatgttcaggactccattgttgccagatttcctgtctcaagactatcaattcatttgaataatcagcaaaatcatcagcctcctttcagcctctaaactggatttaaaagattgacgtttcttaaaactcaaatcgagtcgggctgcaactgcatgcccagagggacctgaatcatacacacactggataatgaaatacacttagattttattagtgggtaattcatgctcagaatcttggaacaataatataattaaataaacaactgggagaaggaaccagataagtcaggaggtaaaattatttagctaaagttagaatggaagtaaggaactgcatttcaaaattttgaattcagccattaacttgtggaaagagaagagatagagaaccaagtaccaggactggcaaggaaggagggcaagagtctttcagcagtaatgtcatcaatgcagtaggcagaaaggttgttgttgtatgtgtgtttcttgtgtcaggaatcacagaaagaggtgcatccaattcagggtgtgtgaatgcataaagatcatcaacactttctcattaatgtcccttaaaagttaatcactttaaccccacaattttctctcacttcacacaaaatcaaataaaacgatatatatttttcttttacaaaaggcagtgaaaaagcggttaaagcatggattaaattgaaatttttcagtgagcctttgacattcaagaataactcagtcacttcattctactgattaagtattgcttttctttcatggagataaaataatttctcatactcaagcaaccttcttgatcctcatttctagaggattctagaaaacagcaaatggagcacactgagcctgcaactttggggagtggcaggacagagtggaaggggagaggcttgtagctgtcgtttcaggacccttcaaaaaagagctctaaaagaagtggtgggagctttaacacattgcagagtactgtctcccaggctgttcacccttctgaaggggggttcctgaagggcaaaggctggtctgattacatgcatctttccagagcctctcaccaggcctggcgccagtggaggctcaataaatgtttgtggaaagatggggtggagagataaagcataatataaatatgaatgggtttcttcagcagaacttgagacaatgggaaatgggagaccctggtttataggtggaaattcccaagaaatgagaaaaaaaaaatcaaggcaaaataatgcagttgatagagcaaatatttcctcctctacatcaacttttggttagcttcacgggcgtgtgcacgcccagggatagggagacaactttaggactatataagtattgcccaaaatgggattcttgtgtttcagagactaacttcaaggggagggcgccatggacagagctgtaaagatctttcccgctttctatgaagagggcgggcagagcgtcagcccctagaaaactacatttcccagaatgccatacgcaggcgggagagggcatgaacagagccttggcgcgatgctccttgggaggtgtagtttccacgcgtccagctcgaacgctgatgccccagcgcggtggtaaaatgagcccacgtgatcggaaaagcagcggtttccctttgagccggaacaggatgactgggttgaccgatgctgggcagctgagcggaccaatcggccccctagactgagacgttggcgtttgaaatcagccaatggcaggtctacactggagcttcctctccgcctccttcgcctagcctgcgagtgttctgagggaagcaaggaggcggcggcggccgcagcgagtggcgagtagtggaaacgttgcttctgaggggagcccaaggtagggaggcgaggcgacggtgtgcgggagcgggctctccagggacttcccgggtccgcaactggcag

SEQ ID NO: 6154 - DNA, 2300 bp, Homo sapien
gtgttattttcttatttgtttctgcagaaaaatctcagtttgggttctgttcctggtcatttagcaaaggtcctcaatttgatccattgtcttttatgacaaagaggtcgaggggttatgtgactagccgaatgcaagtctgctgggagccttggttttctgcttatgcaacagtgtcaaaaccacttttaaaaatgccatcccatggaaatcaccaacaggaggagcttattgccagaaatcttaatttgattactagtagggattttacttacgattgtgaagttaaaacagaactgccccctctttttgggagggatttttcccatcctcttccatattcaagattggttaaaaaatctctgcccaaaattgatctgagcagggctcaagaaatgaagacgatctctggctaatagcaggtgcattttaatcacaaggcctatttgatcatgtatggcttccctgtgccttacaaagacagagttttaaaagtgtgtaacattagaatatgcaaagcctcggccattccaccctgccccatgaagacttacacgatcccaatgcttaaaatatggagagaggaacaattaacattatgtttccagtgcgtatggtggccctaagtagcttatgggctctgtgtccacctagaagcaataaagtcatgttattatgcattaaataaaagaaacatcttaatcattatatatgaagatctcttttccagtggtcggcagaacgaggggtaaaaccggcttttctttcccttcacagctcacttgagaccgggagaacaggcagagaagcctggaaatccggatggcttctaattgtctctttacagccaactaggctaccaaaatgattgtctttttctctccaagccttactgacctgtggctaatgagatttgtgcttcgattagttgtagaacataaattagctaatcaatggcaatggattcacattatttctcatacatgagttccgctgcagtgatctgtatttaatattcaaatcaatttcgaatgctcaggatgattccgttaacgtggcatgctggaagctggcagcatctgtagcctcctggccgatgaggactaggccaagcctggatgatacacctgcctctcatcggcttccagagctttgcagattgccttgccttccattacacagggtgaggggcaaatggggttcagcagaaagcttgtggaaaaagcaaaagaaaatccaggagcacgtacagcagaggtggcctctttcctgaacaggaaatcaaaaagcaggcgagctaatttcaggtttctgatgtgcaaactttgcaaagagcgaggttgtcggtcagcgtcttcacttttcagcaccgagaagcatatttttgctctttgctgtaattgtctcatctgtacaattaactggcatcttggcataaaatgtggagatttgtacagtcttctaggcatctgtgggctttatggtacaagttctgttagtactgaagccacagaaaattaaatgttccccaaagaacttccagatgtgctttattctaatagggtcattatacagtaaattaaaaagcagggtaaatggaactgtaaaatttaaattactctaaaaccacatctctttgctttgagcattcatttgtggggttgcatttgcaataaatgtgaattaggcagctgcaataactgttaatcatatatttataaaatagtaatgaggaaatgaatagcagagtaagacagctgcacatttctctaatagtgtgtcaactgtgagcataataagatgtggaacactgtttggtgctgggctgataatacagctgaatgtaagagatcgcttcagcctcttaactttacatgaaatttcacataaaatccataaaagctcataataatgcattatgcctctgaattgtattcaatatttttctttgctttgattttctgaaatgagctctactttcaccaaagtcatcttccggagatcggtgagccttttgtttcaggcaatctcgggcttctaagattgcaactggatttaaagaaaccagcgccaatgcaggcaaggagtggatggtggtgctttgttttgttttctctgggttgctgtacatggccagagggatgctttgtcttgggcagaggacacggtctatacaggccatctcagctgcctcccgatgtcaggattctggagagagtccactcactgtcgaccagagtccctagactgccagtttggcctgatgggagcaggcacatcaccttcagccacttccaaac

SEQ ID NO: 6155 - DNA, 2300 bp, Homo sapien
ctggaaatatatattcttgacagatgttcacaagccagaacagttttggagacgaagtattggaagaacattttacttctctttggcaattaacttgaaaaagaagtttttttatcaatgggccatccctctgagatgactcttgcactgctactcccagcccctgcatgaggatatggatgttatgcaagtacgttgagtggggaggggtgctgggaatgagcacagcaaatacttactggtgcaaattaatattctggccagaaagcatggtttcagatattgctggcttcctacacctagcaacagccgtcaccacgtgagacttggtaaggaagctcgggcttgtgtttcctaaatggctctaacctgtttgagcagagtcattgctcagggctacaggatggactagagccagctgggagcagatctcatcttgtgtttatgagctggttctgatcaaagcctttataggtgcctttttgggttatggggagtattggaagaggaggtgggtcatgtcccacaaaggacatcatccttttctcgttcctctagttccacgccccctctccgcttctccctaccaagcaaatgttcattagtgtgcacactttttcgagcagacatattgctgttttataaaaaagatgccagagcaggagacgcatgccctccccatcccagccaaagcacaagacagcagcactgtattcctcctccctctccaatgtgtcgatggcctactgtgtgccaggcaccagctaggcgcttcacatgggccttctcttcattaccccatgataacgccgttgaatagaaagggaaacagacccaagggattgcacagttattaaaagtataattgctctccaggcaggacaaacaagaatgagcactgtcggtgtgatgtgggttcaatcctgcttttgtcaccactcgtgggtcatctggacttggctccacccattctccttgcaggttcaccatcttctcttctccctgagtgaggtataagctccctgaacctgaatctgactcccaggtaaggagagggcagggcttgtccactgggctgtactggcatttgaggctagatagttctttgtggtggttgcgtgggggtcttacactttatagggtggttaagagcatctctggcctctaccaactagatgccagtagcacacccctagctgcagtcttgacaaccaaaaatgtccccagacattaccaaatgtcctctggggagcaaaatacctcctgtttgaaaattattggtctagacatctgtattttgtttgcttggggctaaaaacatagtacctttttaaaacatgaacaccaaacaatttgttttactctaatagccctgataattctgtagcagcattctcgttgtaaataaaaaataaaaatgaaaattcaaaattcagacttgaagactagaaaaaagaccatatgtgtgtgtgcatgtgtatgttttgacaaaacctagaacttttccaatggaaatctcaggaaagggcatggactgggagtcggaagacctggatccagtcctaggctgctgcttcttgctggccagtgtcttggtgagtcaagtcccttgagcagtgagattttttgtcattaatgtgaggaagatgttatagtgattcatctctgagggtcctggaaggactgacattcttaataattgaacagaagcgtaatgagtggtacaaatgtggaatcagggaatttccagtgatgggcaaattcacaacatgtgagaaaggtagggagggaaagagagagagtgggggcggggagggcaacagtgcaaaaaaggtgcaagaatggatgccccaaattcactgcgggttgtgaagtcactccaggacctggtctcaagtcagctaacggtttccacacagtcccctggaggcccatctccatataaggaaaaccagagggaagattagatttgttttacagagacttgtttcacctccacgtcaggaaggcatgacttatttgtcttagttgtggtgtgatctaggcctgcttgtatctctgcttgctcagggtcagagagaaggctggattctgggatgctgcaggattttggaagcaaagacagagagggcacctggagaatggttgccagagtgaaattccccagacaatagagataatttggaactgtttaaagaacaagggtaagttctctgaatgctgctcttctcaggctgatccccaaaagcagagaactgaagtctctttccccaccgagtaccggtgacagagagggagga

SEQ ID NO: 6156 - DNA, 2300 bp, Homo sapien
gacacctcatttcatgagcatttaataaagtttggatgtttgtcccctccaaatctcatgttgaaacataatccccaatgttggaggtgggccctggtgggaggcgaaggcgattggataatgggggcagagccctcatgaatgggttggcaccatcctgaatgacttctcagtccatgagagatatggtgtttaaaagcctgggacctcccccttctctttctggctttcactcttgccatgtgacatgcctgctcccactttgccttttgccatgattagaagcttcctgaggccctcatcagaagctgagcagatgttggagccatgattgcataccttgcagaatcatgagccaattcaacctcttttcttcatcaattacccaatctcaggtattcctttacagcaaagaaaaatggcacaatacagcatctacaatgtgcttggtactatgtgaaggagataattaagtataatgaggtctctaccttcagggcgtagagtccaccacgtccttgcttggcttactttatctagtggcttgaggcccaggaatgtccagtcaccactggccacaccaggaggctccagaacagggctttctatgtccaggacagggatctgaggttgctgacatggtgcagggggtcactgcagggcagcatctcacagagttgaagggggctgcaggggttctgagagctgcccctgcctgtccatccccaccccttccccacagagtcttggttgagaaccgaagggccacagtccctgcacactttgctgaggggaggcaggggtcccctgtgtccagggtctctgttgcttggaccatgcctgccagctgacaccctccccattttctgaagagttctggcaccttatatcaggcaggtccctcataaactagaatgtgctgcctcaccagtctcagggcagaggggtgtgtggcttcagggctacaggaggcagctgctggaacttggagcaggacaacagagtatccaccatactagggttagctgtctaggctggttgtggacagcctggcttgcccaggtgggagcagtcagggtcagcaaaggcatctcccagctggagagatgcccaggggatgttacagagagcctcggggtccctgcagcaggcttaggattcagccgaagctctggctgtagggcgagggaaagaaggcactgagaatcgagtaacctcagtcatgcagcagctgttcttgggacagacaggctgggacactcacgtcaaggtctgccaggatagcatgcaggcggggacaggtggcactggggcgtgaaggtgtccaggcatcccttccttttctcagagagatttccttgactcagcctgtctttgacacacacggggggatggaggatgttgggggaagggagccacagtgagccaatcaccctgcaccggagccttcggggctggttccctccgagcctgtaagtgtgagtgtgtgtgcgcgagtgtgtctgtgtgtgcaccagtggggatttctgtgatagaagcagccagattccagagacagagagaagaggagggggaagaacaagagaggggagaaaattgggggtgggagagacagacggagagaacagcgcggggggcggggagagggagagaggtggaggggagagcagagagagagagagcgagccagagagcagagagggaggaagagagaaagcaagagagcgggagggtgcgcggagcggagcggagacagagctcgcgggcatggggtgagagcgggaggaagcagaggcagaggcggagcaggggcgcaggtgcctgcaacccaggatcccggggcgctaaaggcttcgggttctaccgcacgctcagtcgctggctccagaggtgctgctgggggccagggttcactgccgcgcgccaggtgcctgcccgtgaggcggcgcggggctcccgggtggctgcgcgcccagacgcctgcccgggaggccgcctgaggctccggggtggccgcgcgccctcctgggagccatggcggctggggccggtggtcgccgggcggcggcggcgccgaggggctgagccggccgcgggcagcgccatggcggcgccgggttgcggaccctgagcgccggcgcggggcgcgcaccatgaactcgtgggacgcgggcctggcggggctactggtgggcacgatgggcgtctcgctgctgtccaacgcgctggtgctgctctgcctgctgcacagcgcggacatccgccgccaggcgccggcgctcttcaccctgaacctcacg

SEQ ID NO: 6157 - DNA, 2300 bp, Homo sapien
taacacccatacccaccagctgggcgttgggacctctcccgtcatatggctgccacttgcttgggaaggaattctccagactccttttactttgtatgtgtttctaggggaattctgagggaagaagctttgcagcaacctctgtgcccagaacatacggctcacaagtcctttgtgccgacagggaatctatctaattgttttagtgtgtgaggctcattgtcagcctagatttccctgaaactctgggccagcagcccccaggagcatcagtaggacccagcatttcccctggcaccaaagtggacctctttgcaccttgcagccgggagaactgacttagagggccctggtgttggctctggaacctgggctgagatggattcggggagaggctgggtggagcttggcctctacggtctgttcttgcagattcaggagagaaagtggtatgagagcagtgtggtttgtaagttccccaacttccccgctggctcacactgtctccccagaccaatggcctattagcccccaaaaagttagtccaaccccaggccagctgcctttgctctgctgtggcctaagttctggcctggtcaaaggaaggtggcaggaactccaggcttgctcctgcctcctcacacctcattccacaaatgcggagtgaaagagcaggagccagacacatttgggggttgactgtctagaaaggaggaatcagaggtcccaaggaacacaatcgtgcaacttcctagggaatctgcatcaggagaaagaagcggctaggacacacagtggcttcgctcagcctggccacgacatcactgtgcagaagaagagatctgtcaggggtccagaggagcggagtcctggagcctctgggagggtggcatgtggcagctgcaggctgtggtccagaactatgagcagacttgcctgtcactctccaaacatttactgaacacctactgtgtgccaggccctgtgctttgtcaggctctgggggagacaggtcattactctgcagtgtgggaagcggggctgccctggaagtgtgtactcagtgctgtgggggtacagagggagggctggagaacttagctggtgggaaaggagggttctggaaggcttctcagaggtagtggcattgggccagaacttacagtagggaagagcatgtggcaaggcacagaggagatgggagcctgcctggtgaggggtccagtggtgacagagctcagtgtgggtccagagatggtgtcaggtgagggctgagaggggagggcaagtgccccttgagatgggctgaacgtgatgatgatctgtggccagtgggagatgatagaagtcttgaggttgggaatataagaattaggtctcttttagaaagagaggacatggagaaaatccatatatttttagctaccaaaaaagagaaggaagaaagaaaagaaataagaagagaagcaagacagaaaagaaggaagagagaaggaagaatggcaaaggaaggaagaaggagagaaggaaggaaaaacaaaggaaggagaaaaagggaaggaaagaagaaaggaaggaaaaaaggaaggagggaggggaggaaggaaaagaaaaagaaggaaggaaggagtcctagccacttctttctcctgatgcagattccctaggaagttgaacgaagaaggaaggaaggaagaaaggagagaaaggaggaaggaaaatgaatctcattcattttgaggggcatcttcattacacagcgtggggagggaagcataattcactcttaagaaaccaaccacaccagccagggcccatcttctgacaatatcctgaagggttcgaatgtttgtcttcggtagggagtgccacacatttaatatcaatgcagggtcctgatgggcactgccacatacccccaggacaaacggaaaaatccacacagcagaaacaagcagttggcaaaagctgtcctcatgctacttggcaattcaatcaccctcccttcactcccacacctatctccgggtgttgcccgtacagtgtgtcatgtaaatagcatctagcatttaaaggtcaaatttgatgagtctaatcaatcttagcagtgttccagttcatcacgtatacccatatttaaggacttttaaagtaatttggatttttaactcaaaagacgatgtgtaccccttggggcatgcgtgtgttcttaggaacaccagcgtgtggtatttcctgtgtcctctcatgcatgctcagcatgtcactgttgtactcattccctggcacggaagaattgt

SEQ ID NO: 6158 - DNA, 2300 bp, Homo sapien
caggatcctgtgtaaaatgagagggagaagattcatcttaaatttggatgctatcagaattacctgaggaacttcttagatatgctagtacttgaacccactctttaggagattctgaaggtctggggtgccgcctgggtgtcggtctgctgttgagcaagctctgggggttctgatggaggtggtgcagggcaccgtcctggcctgggctgcctctgcagtccctctggccaggatgccaggccagcctcttgttagcgcttcacacagctcgctggaacgctgggtgtgttgcttgctgctggagccgctttctgtttcaccactaaagactgtgttgtcgtctggagtgcctggcttcagataaaacagtccccaggagtgagccctggggataggccatggaggagggtgggtggggatccaggaagggttggggagcaaagagtggtgggtggggaaggggaccctcctgccctctcaccctgaggacttctgctggctctggattccagagcgtcctgggggtttgacaggcaggaccaaggcctcctggtccctgcagacaggccctgcctcaaccagcagcctcctcctctccctctggtcattctgctttggccttcaaactggaagcctggaagactggccctaaaagatggcctggtggagtggcctgcgcagaaagagaatgacaaccttcctggtccaagccctgcccactgtggggtctcaggagcccccactctagggaagtcctcactccagggcaatggtgaggccttgccctggtgccctgactcagctcagtggcatcgtaggatcacatcacagacccagaggaactgggaaggtgacaggccaatgcaggcttgagggtcagtctgtccctgtagcgcactccatgggttcccaaagacatctacacctgaatacctagaacaagagatagttacggaacctggcaaaaagttagggaacatggcaaaatggactttgccgatgtggttaaggtcaccactcaagataggatgactatactgaattttttgggtgggcccatctattcacactctcttaaaagcacagaattttctctagctggaaggcggaaagatgtggcaggaagggaagcgatttgaagctgtgccagctctggctctgagatgccgggcccacgtgcgaggaccagggagaggcctggaggagcctgcagaagacatgaggaggaacacaggcagccagcaggaggaaaggcgcctcagcccacagccagcgagtgaactgcacgtcagtcctactaccgcaaggagctgaattcagccaatacctgagtgagcccggaagtggacttttcgccagaggctcccctaagaaaccagtcctgctgaccccttgattttggcctggtgacactcgcatcagccttctcacctgcagagctgtgagataggtgttgtttgaagccactaagtttgtcatcgtttgttacagcagcaagggaaacgatgcagtccctggttccccacatccccgcctggagagcagaagccgcagggccatgggcctgggctccgcataaagaacccatgcagagttgtccaaagcaggaggccctttctcaaaggaccctctgggcaagagcctgctcttggatgaaccacaaaccctcttgtgacccctggatggccaccttggggtaacgtcactgtctttcccaagacccaacagaatcacagtctcagatgggagagggctcctccagggtccctaggccctgctcccagggaactttactcccagaaaccccgggaacctcaggaattcctcattcccagttcctgaaacagtagcatggctagtgggaagtccacgtctgcggaatggtcagcacacggggcacggtttgagagctggaggctgcttgggctctgatttactttaggaccctgggccaatcttttcttctctcaggtcacgtttctccacctgtaaaacaggaatggaacagcgggcctcagtgttttcttctaagattgaaactcattagcgtctctggggaagcaggccccacgctggctggcctgcgggggaggggaagggggctttcttgggcttggctgcttggaacacctgcctccaaggaccggcctcggaggggtcgccgggaaagggagggaagaaggaagggcggggccggcccccctgcgcccgccccgcgcctctgcgcgcccctgtccgccccggcccagcccagcccagccccgcgggccggtcacacgcgcagccagccggccgcc

SEQ ID NO: 6159 - DNA, 2300 bp, Homo sapien
tatctcatcctgtgacatcgtaggttaagaatgcctaacctcctgggaatgcagcccagcaggtcattttaccctcggtttacccagtccctgttcaagatggagtcactgtggttcagatgcctctgacacatccttgactgaaatgtttttatgccgtgcatgactatagatccaaagctggtcgaaacccacagagcaatagcagttgcattctaccagacaaaatccatctgcacttctgtggactagagccatttgcattactctaagttttctgcaacttacaaaattgtccaattcctcaaagacaatgaaaggtgcaggcccttagagattcagataaccctggaggggtgcatagataggacacccagcaatctttttaacctattttaagctctttcacaatttctcctggcatgcccatagggatctaagcacacttgcatgtgcaagccattgtgcctacagattctgggtttgcctgtttccactgcttcatccgcatctcagatgcggttcagagaaggtaggtggcctgctcaaggtgaacgagagaaccagttcttctggcctcatactctagcttttgagctcttcttcaaagcacccccaaaggcagaggagggggaaagtcctctggggtccacagggcagccgtccgctgcaggtgggagggtcttacgttctacctcgtgaatatccacactggttaaacataaaaacaatgttttaacattattcactgttatgggtcagattgtgtcctccaaaaatgtatgttgcgatcctaacctctaggacctctgaatgtgaccttttatgaaataaggttacaacagatgtaattagttaaatttagacaaagtcatacaggagtggtggtggggggcttttaatccaatatgatggtgtccttataataagagaagatacagagacagacacaggaggcggaggccacgtgacaacagaggcagagattgacctgctgcagctgtaagccgagaaacaccagggaagctggcaaccagcagaggctaggaagaagcaaagaaggatgcttccctagggccttcaaagggaacacggccctagccacaccttgatcttagattcctaggccccagaactatgagacaatacatttccattttattttatttttaatttatttatttttttgttttgagatgaagtctcgctctgtcacccaggctggagtgcagtggcgcgatctcggctcactgcaagctccgcctcccaggttcatgccattctcctgcctcagcctcccgagtagctgggactacaggcacccaccagcacgccctgctaatcttttgtatttttagtagagacgggctttcactgtgttagccaggatggtctcgatctcctgacctcgtgatccgcccacctcagcctcccaaagtgctgggattacaggcgtgagccaccgtgtccggcccatttccattgttttaagccacctgtttgtggcacttttggacggcagcactaggcaatgagtaccctcaccatggagacacagatgctccaggaagaagcaccaggcttgtcctgtggctttgagggccccaccggtgtgggaatcttgagctaatccatggtcccagaaaggcaagtgctgttttccacccactccaacaactcagcgttggtttaaaatgctggaagtcgaaagagaaaggctgttgccatctatggatgcttgttaggtgggtgttgaggcgtcccccaagaacttggaaatgagggaaataagcctgctcactgagagccggagccaaggcccacacacagagtgtagatcagagatgggcaaagttgttgggtagtgatgagtgattcccaggcttgggcgctcccttgccaggtgggttctggggtggatctgggacaagggcacagatgtcccgtgcacatcatcacaaggacacagagtcctgtgcccatcatcacaatgacagagatgtcctgtgcaaatgacaaggacacagatgtcccatgtacatcatcacaatgacacagatgtcctgtgtacatcacagcaagggctcatcacccatgggtaggtaaagaagaggcatggaggtgaatgcaggcagcagctttcagggaagaagaagcatcaggctgcagaccttgcctcctccctgccctgatggcaggactgaggcctcccagggtgagctgggtgcaggcagcaggggaggggttgtggtcctgctgcttcgagctcagggagctttacagccaggatgtgtcgatga

SEQ ID NO: 6160 - DNA, 2300 bp, Homo sapien
gtacattcctatcttggagcttcaaagtccgtgttttgtttgctttttaaagaatctaattcgattttctgcagcagaaagacaggagggtgcgaattccctccccgctgagctgctggttggagtctcatttttaaccccggcttggccctgtcttggacatgtgaaaaaatgttttcttggctttaatgatggagtttccaagtaggggatcttgcccttttgtttctttagtttggaagaattgtttgtagcaagcgatgggtcaggggtggttgagcaagtttgaagcagaggttgatccttgaggtttctgacatgtccctccagctgccctcagggataagagatgggggtagggcctgagatgtctggcctggcttcccagaactggccccttctgcatccccgccccagcgcctctgcaggactcaggtctcagcctctactgaccagcctttctcaaactggctccttgataccctagtgagattccttggccaattaggtacttccaactttgtgtattatattcctctcttgtggattcacagggcttattagcatatcaaaggccctgaaaagttcagctgtaaagaattctgtgtaattttgtccattccacattttctccaaataatttaagcacagaacactcaccaacggcaagcagaacattttgtgggaggaagacattttgggaaacacagcttggctgtttcttggccaccatattttgagaaaacatgaagttttcagtccaaggggcatgaacatttcttctgttgagttctgattgtttaatccttcagccagtacatggcgatcttgatgcgcggttagttaatgctgcctctatggagacagtgagggttgtttgaggggtggcgtgggtagagttggagatgagtctaccactcttgggtaattttcaattgctaaagaataatcatgtggtataggatctctcatctttgattccatttcaaatgtttttggcattcactgacaatgaaaaatcatcatcataatagttgatgatgctattattatcaatgctgtctaccttttatggtatgctaaatatgtggcaggcattattcaaactgtttacatgtagtagctaatttagcacctgttaaggtgtccttattatcctaattttactattgaggaaaccaaagctcagagaggttatgtggcttgctcagggtcacacagccaattagtggtgatctaccactgctagaaactgagtaggtctccttttatgcttatccatggctctttctacgacatctacaaagaagtgtcatttgggcaacaatatattttataaccacaggattctattaatgggtttttaagaatcatatcttgctcgagatgatgaaagtgaaaaattatgtcaggttctgaagctctgtgtcactcgagggaatcctatacattggatttaattgcttaataacttaaagtcaagtagttttttaatatgatacattctactgaaggagagactcatttcattgtttctaaattttcattaacttttgcttcctaatctgataataaaggttaactctaagaaagagactgctgatgccagtgagagggaaaaaacacattttctctgcctgctccctttctaaccatcctccttagtattcttgagatttttcattgactgaaaagcactgatatttcaatccatccctcaaatttgtagtcattgactgtgcatgactctgagaatgatcacaacatcctgggattcagagatcctgtacctgagaagtatcaaggcagagggattaggggagatgtagactatgcacaatgtgagacgtttgatgtggcgctggtggtgctgggattggggccatgtttggtggcagaaattgagccccaaagccagctgcaagaacctgaaacctcttcctttatgctcgcgattttctatgacttgcttagaaccaggctggcttggctggacttagaggtggaaaagagagtgagcatctgtctctccttggaggatgagctttgggttattgctattaccacacaatgtaataaagcttcttgtctttctgtgtaggaaatctggcattttttaaagtttgcgccccacaaagaggaaatattccaaaggtactcaggatgtaaaaggggagatcttcacagatgcctccgtggatggcatggcaatccatccatcaatgagaagaccatgatttcttttaattttctgtgtgtttccacattccccagtgagaattcttccacctttttttgtg

SEQ ID NO: 6161 - DNA, 2300 bp, Homo sapien
gaatttcatgtgtcttttctttaactgatggcatcttcagcccagagtcagtggagtcggccactggtgccgctttcttgccctcgggctgtccaggtggttccctggggcagccgactccaggccactgcggcaggccgtggcgatcggggtcctgcagagctttacctcccccgcggaagcaaaacacgccgggccaaagagccgggccagccttcccgggatgcaaaaatacaacagagggcgccgaactcaccagcgctgtggccttgaatattaatgtacgggctggctccagaccgccaagttccttaaagatgtctctggcggccgggcgcggtggcttacgcctgtaatcccagcactttgggttgggggggcggacggatcatctgaggtcgggagttcgagaccagcctgaccaacatggagaaaccccgtctgtactaaaaatataaaattagcctattttgcgtggtggcgcatgcctgtaatcccggctactcgggaggctgaggcaggagactctcttgaacccgggaggctgaggcaggagactctcttgaacccgggaggcggaagttgcagtgagccgagatcgcgccattgcattccagcctgggcaacaagagcgaaactctgtctttaaaaaaaagaagtatctggcaaggtgtcactgccagatttcaggggtttcgatgtgcttttatttggaatcaccgcaacacacaagcagtgttgactcggagggggagggggcaggggccaaacccaccgctcggcgcacacgccttgatctcacattccagactggagctgatgtgtgtcagcgcgacatggggcggggggagggttctcctcggatgtttcattcgccgtctgcacgtcactcccaaacttttcctcccagcgctcggggagtcaggttgacgcgccctggatgcggggctagaggctcggggctgggcgcgctcccgcggagccggagccgcagaggctcccgggctggactcaggcttctcaggtacaagttaggtgccagacgccgaggtggggtcggcgaggagcggcggtaggaggtctggccctgggctcggggctccggcgcccctccgcgggttcgggccaggcagcgccggcggcggccggggctgggcgtagggagtccgggccggcggaggcggcgcgcagcctcactccccgcggcgctcccggcgcggtggtggcggtggcggtggcggcggcggcccaggcagacaatgaacttgcgagctcgacgagccgaggcaggtttgggccccgggctccttggcccggcctccccgaggcttcagcgatccccagcgggaggagtcccttcgccattggtcctggccgcgctccgggcgccctgcgcgcttgaggaccccgcgggaagggttacccagcggcgacacacgccccctccctcgcagagaggacgcggccggagcgaggggacaggggaccgagcagtggcgtggtggcgccgtggatagccggaggccggcggggggcgcaagccgcgtggaacgcaccggcgggctgtccgggagaaggagcccagtagtcggaatcggggcgcccctgcaccgcccagctctgggagccgcaggcgggggaccgaccgacggacagaccagtgctttcacggtgtgagcgcgcgtcgtttggcggtaggggacggggattccccccagccttgcgctccgcccccacacccctatcgcactttggggaagtttccaggcgcggcccggggcaggtaagtgggcatccgccactctctccccggttgcgagctcggatgcgcttccagaaccctggctctagccttgcggcggttccgggcggggaggccagagctctcccgcgcctaagcccgtgggacccggttcagggaagggggatggcgggggcgggcctgggaagagataggggagcggctgagccccgagcggtgtgaacttttgctccccgccccctcctccttcctcctccccgccccgcccccactgctgtcccctccctgcgccccgccgcgtctcgggaggcggcgtgactcgggagttgccggcgcttcccggcggtggcggcgtctctggccggccttggtgcggcgagccgagcgaggcagctctgagccgcgcggtgaggccagaggcggggagccggggctgcggggcggcgaagctggggagccggatggcagcggccggggcgcggaggcgacgctggcggtggagatgtaatgcgagtctgttgggttgtgtgtgccggga

SEQ ID NO: 6162 - DNA, 2300 bp, Homo sapien
taccatgttggtatcaacctctcttgcagttacacatttatttgtctatccttccacccatccacagggacctggcatttgggtgttctttcaattctctgcagtaacaggctcaagtgcaattcttgggtaattttttgaaattaaggttgaaaggaaaaaaatcaccttctagttaatctcaggcacgtgtataaatacctttggaaagtccctggtggaattcatatcaaagcggcaccgtgatttttacttaaaaacaattttgctccatgtcaaccgtggtttctgacacctgaatttgaaagtgatctgggtgggcccagcgccatctccataacggagttatgtgtttacttggagggaggagaggaaaggcattattccctggcagtatgtgtggccctggaataatgttccacacacccttacagaaggggatttcctccttgctgtttccacagacccttccctgtgtttgtttaaacccgttgcacactggtctgacagctgcctggcccagggccttccttgcagacgcatgtacaaccaaccctctttaacagcaacctgctctgtgtcccctgatgcaattactcgagtatataaacctcactgaaaggcaggcttttcttgggagctaataaataagccccaaagccacaacgtgtgtgagaccttgaaaaatggcatcatcatctattgggaattgtgaaccctgcaaaaagcagctcgttgtattttcagaaataggtttttgtttaaaaaaaaaataaagaacaaaaatcactaagtggagtctatatggaaaaagcaatctagtctgagattctaaggcaagtctctttgctgcattcatctttcttcgcagattttatgtaagaggcattatttgcaggaaaacaagacaggattttaaagaactcccctctcatcccggtttcccatctgcagttataatcctctgatggtgacctctgcattagttgccatgggtgctgagcagaagtttatgacctcagggtggactgtagcttcaggggggcgagatgaagcctccggcaataaagagataatggggagaagccactgtcaggaatgacccttcggtggcatgtagtctacagttaacggagcactttcatttccacttctggttgcttcgaggaagagggtgctggactctggccacggggacacaggccggcaagagactgcagattctttttgtcccttggacctcagtttcctgagaggctgggcttggtgctccaagcgccctctgagcgaatctgccagaatttcatgtgtcttttctttaactgatggcatcttcagcccagagtcagtggagtcggccactggtgccgctttcttgccctcgggctgtccaggtggttccctggggcagccgactccaggccactgcggcaggccgtggcgatcggggtcctgcagagctttacctcccccgcggaagcaaaacacgccgggccaaagagccgggccagccttcccgggatgcaaaaatacaacagagggcgccgaactcaccagcgctgtggccttgaatattaatgtacgggctggctccagaccgccaagttccttaaagatgtctctggcggccgggcgcggtggcttacgcctgtaatcccagcactttgggttgggggggcggacggatcatctgaggtcgggagttcgagaccagcctgaccaacatggagaaaccccgtctgtactaaaaatataaaattagcctattttgcgtggtggcgcatgcctgtaatcccggctactcgggaggctgaggcaggagactctcttgaacccgggaggctgaggcaggagactctcttgaacccgggaggcggaagttgcagtgagccgagatcgcgccattgcattccagcctgggcaacaagagcgaaactctgtctttaaaaaaaagaagtatctggcaaggtgtcactgccagatttcaggggtttcgatgtgcttttatttggaatcaccgcaacacacaagcagtgttgactcggagggggagggggcaggggccaaacccaccgctcggcgcacacgccttgatctcacattccagactggagctgatgtgtgtcagcgcgacatggggcggggggagggttctcctcggatgtttcattcgccgtctgcacgtcactcccaaacttttcctcccagcgctcggggagtcaggttgacgcgccctggatgcggggctagaggctcggggctgggcgcgctcccgcggagccggagccgcagaggctccc

SEQ ID NO: 6163 - DNA, 2300 bp, Homo sapien
aagagcaccttatctgtgagcccaaagacattgtaacatactttatgttacccctggatcctgggtgtcatgtgcctctcctgaactcacctgctcctccttgacaaggcataactcgggagtcttgggctctataagagttccaagagctgggcatggccccacatacctgcccaggtttatagagcaggaccatggagaaaccattcctttctgaccccttgggcagaataacctaacttccaggaagttaatcacattgtattgggtgctgtggaggaacatgaaagaaataaaaggcaatgttctgctctcagtgagttctggagagcccatggccacaacagtctgagagagtgaccttggtatagggcagatggagcccagggggactgaatcccttttggtgtcttgctctgcacatctgcagatactggctctgctgttcacagctctgcacccatatcactttcttatccctaccatttagcatggactttactttctgcttagctaagacttatcttagccagttatgtatgttggatgtcttccaattgctcccctaccccgtctccacccttttccaccctgctgtttgtcccaggaggctgagctgtcttaaagggctcccctggcctctggcctcctaatggcttcagcccatgtggaagcctgacaggagatgctcattgtccagctccttcccatgcagttgctgatgactttggtgaccagatagcctttcccacactcctctctttgggttctggaattctggaaaccccacttggaggccgttgggcctaggatggataatggccctcgctggtgcatgagacccaggttatttctccatcccttgtggtttacttgcctacattgattgattgattggttgattaagatagatggtcttgctttgttgcccaggctggagtgcagtggtgcagtcataggtcactgcagcctcaacctcctgggctcaagtgatcctcccacctcagcctttggagtagctgggaacataggtgtgccaccacaccagattaatttttatttttttttgtggagacggggtctcactgtgtcgcccaggctggtctggaactcctgggatcaagcaatcctcctgcctcggtctgccaaagtgctgggattacaggcatgaaccacgggcccccaccaccacgttttaggaaatgttcacattggagtgtgccctctgtttccagctgggcccccgactggtcattgtggtctaatggagtgtggtgccggcagctgccagcgcctgccctctgagaggggtggcgaggggcacacaggaccagactgcccctactgttggatgactgggtaagtcgctttccttctctgggtctctgttttccaatatttaacatcttgttgtgggctaagtgaagtccaagtcccttccgattctaacatgaggttgtcccggaatatctattttgtgttctgaatttaataaccggctgtggagggcaccacaggcaaatctgtactgtgagtgggttgctgccactcaattatctgacagcagctgcgaacaggtgggcagtgtgttttccataggcagcgacgacttttggaggtggattcagaggcacaactaagccgcgcggcgcatcagggttcaagggcatggggctcccgcagctgtggctggggcagagctggggctggtccctccctccaggagcacagggcgggcggtccagcctcacgtctctcggcctccagccacacccggcccgcgcagtggggggcccaacagacttttccttttcgggcctcagtcttctcgtcagcaagggcggacaaggactcttctcgtcccgccagaggaggcgaccgaggggcctgagctcaggtacaggccggcgggctcaggaggcgcgagcgcggatcgaatccgcgggaggagcaaagatccttgatgcgcggccggagggcggggcggaggacgggacccacgcgattggtatcctgccctccgccccagccaatgagcggcgagggtgtcttgggggcggggcagaatcagcctttaagttgcagtgactctccggcgtcactgttgcgcttcatagacgccgcgtgtacccggttgtcctcaggcgctgtcaggtaccgtctgggcgccgctgtcctggggctctggttcgggccctggccggggttccctgacagcggcgggggaggcgggcgggcgcggggtggccgcggcccgggttcgggggatgctggctgagggggcgcgctgggcctcggcc

SEQ ID NO: 6164 - DNA, 2300 bp, Homo sapien
tttcccttatgaggactcatgtcattatactgggcccacctggaccatccaggataatctccctacaggagcataggctctgcaagatctaagtcccttttgccatgtcaggtaatatatttagaggttgtggggattgggaggtggacatctcaagggggcactattctgtctactgtagtcgtagaaatgaaaagggacttgcccaagagtacccacagagctgactgaaaagaaacaactatgggtaggctcacaccactggcagaagcaccccttttcctcctccttggcatgaagctaaagcccagccattctccaaggtccatttcaggctgcccctgcccagaagccacagctgccctcctaggcctgcagaggtcatcctcttgactgtgtctgtgtcactcattgccacttggcacacatttggtcagcagtcgtgaaggtcttccattgttctctgcccagtcttgatcctggaaggcaaggatcacaccctagaacttttttgtgcccactgcacagagtagggtctcaatacgtgtacggttcatgatgttcctagcagattctccaaactgactcactcagcccctggaacactaaaaactgcatttcccagactcctttgcagcgtgggctaggttccaccaagccagacacagtgaaagtgagtgggtggccacaggtggagggcacagtggtggatatgttttgttcttttgggggcagctatgctgggggctgcactaagtgatggggcagtggtcccaatggagtagtaaaattaagtgtttctcgtggctgcatggctcctggctgtgtaggacttagacccgtcatctgtaagctccttcacctcatgtaaacaaaacccctctagctggagtggtgtctattgtctgcgactaagaacccttatataaggtatactactccccaaccccattagtggaaatcccaaagggtaggaactgtattttatttcacttgtaaacagctcccctagtaagcatgtcaacaaaatatacacaattcattgaaccccataacatttcaacgaattcctcatcctttctgtgaatcaagagcctgaaaagaaatggtgaaataatatgatcctctcttctttgaaagctcaaagctatgttggaccagaagtaaagtgttctcgtttctatttaataacttgaaaggttccgaggggccattgaggaaactcctcccttttaatatcaatgtgtatttattgcaaaaataatgtagcatcgagtggtattttatagcttatccaaaaacctcctgggtttaacgcattgtgatagtcccgttttcttctcagcccaggtcctatgcatcctcatctatgcagggctgttatctgcatataattttttttttttttaagacaaagtcttgctctgtcgccccggctggagtgcagtggtgcaatctcggctcactgcaacctccgcctcccaggttcaagcggttcttccgcctcagcctaccgagtagctgggactacaggcatgcgccaccacacctaggtgatttttgtatttttagtagagacaggggtttcaccatgttgaccaggctggtctcgaactcctgatctcaagcgatccacccgcctcagcctcccaaagtgctgggattacaggcataagccactacgcccggcctcaattttgtattgtactttttctttctttctttaatagagacagggtctcactatgttgactaggttggtctagaactcctgggcacaagctgtccgcccgcttctgcctcccaaagtgctgggattgcaggcgtgaaccaccgcccctggctacaggtgccttcttgtctcaatttgcctttgacctttcttagggacttgttttctgcttttcctgctctttgtccgctgatctcctgggaagaaagcttccgaaaaggacaccgtttcaggggcgagtgacgccggggtgcccaggccgcgccccagttccgggtttgcacccggtcttcttgccctgccccgcccgcgggactacagttcccaggcgcccctgcgcggccgcggcgccggcgccggcgtcggttgggacgcggagctgaggagcagggccgggcgccatggcaccgtggggcaagcggctggctggcgtgcgcggggtgctgcttgacatctcgggcgtgctgtacgacagcggcgcgggcggcggcacggccatcgccggctcggtggaggcggtggccaggtgagtgggccccgggacgccgctggggccgccgagctctaa

SEQ ID NO: 6165 - DNA, 2300 bp, Homo sapien
tccgcccaccttgacctcccaaagtgctgggattacaggcatgagccaccgcacctggcctcagtttcttttcaatttagaaaggtcaacatctagtcctaagagagatgacagcatgtttcttctaggatctgaaaacacagatccaatgatttgatgtatccttgcaaattttcctattttaatttaaaatgggggaagacaaagaaggagaaggaggaagagagtttcctaagggagctggtgaactggacctgtggggatggaattctgctttttcttcaggacatatgtgtggggttgcctgaaatgtgtcaacggttcttacagtttgggaccagtagtgccaaccctccaaggcttgtgcagccccatttcctcctgctgcaggctctcagtgtcttctgagcagatttcccttctcagtagcaaagctgtgggtttcctgcctgcgatagtgacctcagggagctcctggggctgatgtggtattgggatggagggtcctgggtgtgtccacctttctcctcataagccctctctgaggagccgaattccctcctctgtcaaataggaataacccttctgtgtctacctcccatggcagctgtgatgatcagaaagaaatgcatctgagaaagggggaggacatgtgaaaggtgtccctggtaggagatggggaggtaggccatgtcctcccagggctccgtggcactctgtctctctctctctttccaggagtccgctcagaatttgatcagatcgacacatccaacccaaactgtgtggtaattgcagacgcaggagaaagcttttcttatcaaaacatgaataacgccttccaggtgctcatggagctggaaaaacctgtgctcatatcactgggaaaagggtaagttggctccagggagagtcatttctcggtgctttagatgatgctgtgccagtctccaacttgcggaatcaggcagagaaggatgcagaaggggaggtgggaggagcaccggtgatcttcttttccctccctttttcatgctttctctcttcatttctttattcctctcctttaatcatttctttaggaaataggaacactgtcttcaggagctggttgatcaagcttccatgtggagtctagactagaagagggcgtcattgcagagggagaccctctggagatctcagaggccaagtgttgattgtcccaagtttagagcaaagaaggagaaggtgcatttgcataggatgtagcagggtgttggagaatgctctcaagggttgtctaattagtaaaacataggcttgagggcctacccagtctgggcaccgacagtctctggccacagatcactgtctctgtgaagttgtgattttgtgatcagtgttttgtctgagcctttagcacatgccttgccatctctttcttaaacaaaacagtgttggttatttttaacatttttcttacactgagatagcacatgttcattgaagaaaaattagacaatacagatgagcaaaagaagaaaccagaaagtatttttagtcccactgcacgaggaaaacacctgtccctattttggtgtatgtccttgcaagtggcttcctgtgcgaatagactattatggatggagatgttcacagcatcgatgtcacacttgaccttgttttgtcatctgttttttattgttcaccaaacaatatttgtgactgacttagcatgcagcaaatggatatgtcttggggcatggttatctatggtgtggctatcttgtatatatatatattttttaagactgagtctcgctctgtcacccaggctggagtgcagcggcgtgatctcggctcgctgcaacctctccctcccgggttcaagcgattctcctgcctcagcctcctgagtagctgggactacaggcgcccgccaccatcccagctaatttttatatttttggtagaggcggggtttcaccatgttggccaggatggtctcaatctcctgaccttgtgatccgcccgccttggcctcccaaagtgctgggattacaggcatgagccaccgcccccaacctcttgtaatttttttctttttttttttttctgcttataagtttattcaatgcaaaataaccctcaccagttttactgaggtggctgaccatgtccacgaccaaatacgcctgtaaactgaaattcggttgctgacccattcccagcctcagctttctcactggcaccagggggacagcactccatctgtgggtgtctctttctctctatggctgtctgtctgtgggtgtctc

SEQ ID NO: 6166 - DNA, 2300 bp, Homo sapien
accagaaccatggcatgaacccctaagaaggctgggagggagaccgagtcctcacacccctcaacaggcctcagaattggccacgagctcctcctccagtgccacatgacacccagggttgcgaggaccctggtgactttcccttgcacattgagactttcccgctctgtgactaaggcctgactctggggacccagggtgagctgcgcctctggggcctgctcccataattccaaagtggcctatgctgataccagtcccggcctcccccacagtcatgctttcctttaaaatcttaaacctccacttgttatcttcttagtctgattagaaaacaaaagaaaaattattttccatcgttcctgttgttatcttgatggtatttacacggggatgatgttaccagtttaggaagctaaagcaaaaccccgtcaacttcctctgaacctttgctggctgttcaaagcaaatgctagcatcagcttatctcacattctgtcccgtggatgtcatcactagactaagattattttcagtatttcttcagttatttacatcgtgtgtctctccccaaggcctggaggggctccaaggcgatcacagcctctggaacagggcccatgcgagaaggtgctgggggaagcagacaagggcctggacttgaaatctgtgaccagggcagcccctccctgggctctctgagccacagtttccttcctgtataatggggtagaaatgggtgcacccctgcccctcagcaggtggcatgaggctcaaggacagggaggaggtacctggacctctgggcatacagtttggatgttcgtcccctccaaatctcatgttgaaatgtaacccccaatgctggaggcggggcctggtggggggtgtttgggtcatgggagcggatccctcatgaatggcttggtggcctccccatggtgatcagggagtcctcgctcttctagttcatgtgagggctggtagtttaacaggtctggcacctcctcccttccctcttgctccctctctcacctcgtgacacacttattctcccctcaccttctgccatgactggaagcttcgtgaggccttactagaaacagatgcaggtgccatacttttttttttggagacacagtctcactctgtcgcccaggctggagtgcggtagtgctgtgatatcggctcactgcaagctccgcctcccaggttcgagccattctcctgcctcagcctcccaagtagctgggactacaggcgcccgcctgccaccacactcagctaattttttgtatttttagcagagacggggcttcaccatattagccaggatggtcttgatctcctgacctcgtgatccgccctcttcagcctcccaaagtgctgggattaccggcgtgagccaccatgcctggccggtgccatacttcttatacagcctgcagaaccataagccaagtaaatctcttttctttataaattacccagcctcaggtattcctcatagcaacatgatatgaactaacacacttcccaagaccctcagtgtagctgcacctccaacaccttcctgctggcccacgctatagcgcaggcagcgctgagccaggccgggccaggcactgacgcccagtcaatgtgttctgggcgcataagcaaactgagcaatgagaaagcccatctccaacagggctgctccccacaacagacctctcatctggagccaaggggagagaagaggaggaggaagaccacagatggacccaaagcactgcacactgggtggttctgggcccggacaggccagtaacaaaaagcagcagaaagaaggatactttccaacaaagcaaggagagttcaggaagaaagcacagattctaatctgtgtggccacaagagaacacatggtagaatcccttccagcaaagccgcctgctctcccctgactgctttccctttctgagatgagttttccttccctggccagggctgggaggccgtgctcctcctggcaggggctcaggccacacctcttggaagagcagctcagctgaccttgggcccacatgtcctggaaccaactctgaagccaacaccaggcagtcccaccctgagaagggaccaagcacagaggcggccactgcagccaactgcacagctggacccgggtagggctcctccctcgggacctccagatggctcctcacccttgaggtcccttctttttggtcagagctactctagtcgcacccactcagtcgtgaactggagcagcagccagagagagagtaagacaa

SEQ ID NO: 6167 - DNA, 2300 bp, Homo sapien
ttctctttaaaaatcgctttttggatacaaggtcaataaaataacatacaccagtaggaaggagtaatgggaaatctagggcttcacaaggaaaacaatccccctcccccaggtgagcagcacaatgaaaatactctgcttattctatcagggttacattcctgaacttaagtcaacatcctaagttacagaactaaacatgctctgcctctgcttagcaaccacaaatccttccttcgccagttgcatgtattttggatgtggcttctgaagtacacagtcacagcgccccgagttaggaaatttgcgctttattttcccaaagtgtgacaacactttaaggtcccccctccccgaccccacccgcccgctgtcctgcacgccactgaagtgatcgtttcttttgaacctcggcatctaacaacccggaagctggacgcctgaagcctatgcggcccagcgttttcatcccggctcgtgctgggggcggggagagaagcccgtagggcctctggcgcggggcccgggcagccgcggtggcgcggcccaggcccggggccacttcccgcgtcccggggcctcgcaggcgcgagcgcggcgagcggcgcgcggctgagcccgcaggacgccctctagccccgccggcggcgcgccgcgagtccctcactccccgcccatcggcggctgcgcgcactgcacactcgcctgccgccgccgccgcacgccgcctgcctcctgcacgccgccgccgcgcctagcgcccgggcccgcgacaccgcccgctaagcgccgggccgagttcacgcagccgcggtctggcggctccgcggcggcggcgggtgcgggcggcctggccggtgccggttaaagggacgagttgcaaacacttcaggaagtgacaagtcgatttcctcctccccgggagtcgctcgtacaaagcgctcggcgccggcaggcgagcgtgcgcgcggcggacgcgcggcgggcaccccggacgacttggcgagcgctggcggtgacggcgcggggtccgcgcccggagcgccccgccgcgcacagtaagcgacccggggccgggcggcggcggcggtggccggggggctggccccgagcgaggtccgggccgtgtgcgtcccggccgctggctggagggagcccggctcgcgtgcgcaatgggcttgccttttttttttcttttttcctaatgttgctggtttcctttttttctgccttgtttcgcctttgggttgggtcgggcggtttctccgggcgctcggtctcgcccctgatgcaggcgtgagacttgtcagagcacaggcatggggaagaacaagcctggctgcggcggaaaagtctgcgctccccaggccagggcgggcgggcgcggggactgctgcgcccgggggtgtcctctccgcgtctcaacttgagccctgactagccgctgcggaggaggcgcggagtctcgggagccgggcggccccattcgccccgaagttcccgcatcgtttgcagacaactcttttgttcgcggaagtttgcacccgccacccccggggtgcgggagcgaggcggcgggctccgctgctgctggactgtccggggcggtcaggatgggggtgagggggcattctgtcccgggcgggggaagcccgcggggaggccaccgctggggcttgcggagtgggggcgtccgcgccggcgtggcttttgcacatggcgagaagggccgtccggcacaggcacactggtcgagtcacatttttgctagtcttggattttgcaagcccgtgggagtcaggttccccgctcagggtttctcttggggcagagacgaaagaaacgaggacacccagaatccggggagggtttgcggtttgtgttgtcccaagtgtgttctcgctccccccgcccccccaccttgtcccccagcccccagctctccacccccattttcggacttggggaacaatgcttgtagtacgggccggggcgccgcagcagcgacgaaccgcgcggacaggtttgcccgggtccctcgcgttcggacgccccctgaagccgagctccttccatctgaccgcccgggctcattaacacgtactgtacttaggacgatggtgaacaaagaaaagctctttgcagcgtttgatgaatgggattctgcctcctataggccacactccgagtcttccatacggtacaatctccggactcggtggtgttaggaaagtggcccccggaatggcttgcattccgggtctgggatcctggggtgggcatttgtgccgtcgccttcg

SEQ ID NO: 6168 - DNA, 2300 bp, Homo sapien
tttaggtgtctggttgtgtgcaaaatctggttttgaccattttggattgaacaaagatagacagtttagctccatgtccccaccccattgcagcttttacatagctttaaatctagagttctacatttttagctactcttctgaattgagcagaactctaatataacaacaaccttttgggtagaattttttcttagtaaagaactatggagctgagcactaagaagtgaggatgttttataatatagctgtaggattattatatcatgtgggaagaacctatagtatggaaggttaagtgtgacacaggtcttaatgtatgcatatctttttagcctttggagatacaaatctagaaaatgagaagtaactatttattggttaatagcataacttcttaagcaagtatattctagacagcctcaagaaagcctcagaaccagaaaaacaggctgctttaggttggaaaggaggtgttacagcagaggaactggccatgaccaccatccttggaatgtgaaacgcaaatcatcctgaaagcaacaagaataatggttgtaataattgtttccaggcctgggaccctgcatcttgttttttaagttgacctgatgaactagtaattgtaggaataaactgaatgtttgccagcaggagtcactctaggcttcctaataaaacgttagtaaattaaactctgtccttaaagctctgaaaggctgaggtgattgtgtgatatcagatggctttagggaaacactgactcttttcgttaagcatagcagcattcttagattattccttgggccttcttttgttcaccatcggttcttggatcttgttcctttcaagattggtccttaatgcatttttaaaaagcaacgtatatgggtaaggatatcaatatcttagtatgctgtattctgtatgttagctcattttggctttctaggatgaactgactctatcccacatcatgtaacttgaaatgaatagactcatatcctttccactgattgctgtccattctaatcatgcagcagaactcagtggagcgagctgtagtgtgaaaggagatgtcagttcatgcttttctgaaaagaatgggtccggtgtgatgatattctgaaatatttcagcaatagccatgaaatataatagtttcccaagcacacaaagctcaagaagttaattgttcatttatgtttgatactgggattgaaacattggattaaaaccaattaaatgttcctagaagcaacagaaaaagtttccttatttatgaatagaaccattcaaatggcgcagacacaatccatgtaaagtaatgaggtgttttgtttttttggcaaaggagaacacaaaacaggcatagggagttttaaaaaaacttctctttaaaaatcgctttttggatacaaggtcaataaaataacatacaccagtaggaaggagtaatgggaaatctagggcttcacaaggaaaacaatccccctcccccaggtgagcagcacaatgaaaatactctgcttattctatcagggttacattcctgaacttaagtcaacatcctaagttacagaactaaacatgctctgcctctgcttagcaaccacaaatccttccttcgccagttgcatgtattttggatgtggcttctgaagtacacagtcacagcgccccgagttaggaaatttgcgctttattttcccaaagtgtgacaacactttaaggtcccccctccccgaccccacccgcccgctgtcctgcacgccactgaagtgatcgtttcttttgaacctcggcatctaacaacccggaagctggacgcctgaagcctatgcggcccagcgttttcatcccggctcgtgctgggggcggggagagaagcccgtagggcctctggcgcggggcccgggcagccgcggtggcgcggcccaggcccggggccacttcccgcgtcccggggcctcgcaggcgcgagcgcggcgagcggcgcgcggctgagcccgcaggacgccctctagccccgccggcggcgcgccgcgagtccctcactccccgcccatcggcggctgcgcgcactgcacactcgcctgccgccgccgccgcacgccgcctgcctcctgcacgccgccgccgcgcctagcgcccgggcccgcgacaccgcccgctaagcgccgggccgagttcacgcagccgcggtctggcggctccgcggcggcggcgggtgcgggcggcctggccggtgccggttaaagggacgagttgcaaacacttcaggaagtgacaagtcgatt

SEQ ID NO: 6169 - DNA, 2300 bp, Homo sapien
ccaagtcacttaatgtcttatttctctggctttattttcttcatggcactttatctgaagttacttatttagcttatttatcttttatctttctctttgtagaatataaggtatattttctttcttttcttttcttttcttttttttttttttttgaggcagtgtctcgccctgtcgcctagacagtagtgcagtggtgcgatctctgctcactgcaacctctgcttcccagttcaagcaattctcctgcctcagcctcccaagtagctgggactacaggcacatgccaccacgcccggctaattttttgtatttttagtagagacagggtttcaccgtgttagccaggatggtcttgatctcctgacctcatgatccgtctgccttggcctccctaagtgttgggattacaggcgtgagccactgcgcccggccaatataaggtatgttttcatacagggaccttttctattttgtttactgtttttttttttttttttttttttaagatggagtctagctttgtttcccaggctggagtgcaatggcgtgatctcggctcactgcaagctctgcctcccgggttcacgccattctcctgcctcagcctgccgagtagctgggactacaggcgcccaccaccactcctggctaattttttgtatttttagtagagacaggatttcaccgtgttagccaggatggtcttgatctcctgacctcgtgatcctcctgccttggcctctcaaagtgctgggattacaggcgtgagccactgcgcctggctctgttttgtttactgttatatccagggtctgaaaagtacctgacaatagatgtccacaaaatatttgctgaatagatgagtatttttatataggcatttaggatgaggaagcctcttcaaagttagctcttcagagtgatagtcattattttgcttcaggtataatgaatactttggacatgaaggaagggagaagacccaccttccaatatacatcaacataatatatacatttttaagtcaatagagttttagattaaacatgatttacaattgctgtattaaatgtgtgtgaataattgtgagctaattgcctaattatttttttcaaaatgagttttcagaattttcattggtaaattgtgaatattttataaaattgaggcggattgctatttccgatgcttagtatgcatcaggttattaacagtgaatgagatggtgatgtatgacttcacacctccaactgaagtaattacagtttaacagttatttaatttcttaagccttatgccattcattatatccattagtaatttcgtaagctgcttagtcaagacccaagaaattcttttttttttttaaaggctggtcaagtgaagcagtgataatagagaaggaaggaataaatttgtaactggttttgatcgattagttgtaaacaccactgcactcagaccagccaaggcccaagaacttttgatctaccgtgtttattttaggttacacactaggaatataagttaaaaatcttattcccatagctgagtgctgtggccacatctacttaggaaggctgagatgggaggattgcttagctcaggttttcaagtctatcccgggcaacatagcaagactcctgtcttcaagaaatcttatttccagtgaacttagttccaaataaattgtcatttttaagaatatgtcaaattttctactttttgacagaaacaggtttttcataaactaggcttgtgagctccataatgtgctggtattattagggaatatggctagctttgatttgtttccaaatttgtagagatttggaatgttcaggaaataccagtctctcttattaatcttggctttaatgatcttggactgaagctcataaaagttagctataaagttgaaaatatgtttattatatgtaaaatgccattataattaatgggtccttttattaataaccttttacaggttgtcacttacattctgtaaggattttgttttaattgttctcacatagacattgacttttaatataggtagaagactttttgaatctctccacacagctgtctggatttcatatttgtattgacaaagggacttttgatgccataagccttaatcctgacaatgcaattgagaagaggaagcaatatgtgaaatctctctccagggtgttgaaagtaaaaggcttttttctaataacgtcatgtaattggaccaaggaagagttgctaaatgaattcagtgaaggtaagtgactatatggtgtttaaat

SEQ ID NO: 6170 - DNA, 2300 bp, Homo sapien
cagtctttcttccacaacacactgatccccgtgtttggcgtattgtggagagttgcagggcattcctttccctggacataaatttccacgtctaccggtgacatcaagtcacaagaggccagaacgcggttttcaagtcagaatcttagccagaaacgaagttggcctcttgccaaggagccaaataactggatggacgctcgcacccgcttcgcagacaggcgcacgcagtggagaggtgaagtgatttctgcgtttgggtagagcggcgtcggctttaggtgtccacggtgcggaagccagccgttttccaaaatgcaatacctctaatggtccctcacgaacagcagtccccaaatacagccgctcttggacctcgacgaaggggatgccactaacgctgtggggagagcgcacggtccccgccggcgcagggagccgggggtagagcagagggcgtcgcgtccccatcccagccccagcgcgggggctggagcagtcgagagggcggcctcccgccgcctagaggcgccggtccgctcgtccgctctgcctgtgccccgtctctatggcggccccaacggccgtccaggacgtggagcgaaatgagctcgggcgctgacggcggcggtggcgctgcggtggcggcgcggtcggacaagggcagtcccggggaggacggtttcgtcccgtcggcgctggggacccgcgagcagtgagtgtgacgctgggcaggggaggatgagccgtgccgccctgcctgggccccgagaaggggacggcggggtggagacccggggctcagggacagggagaccctcgggggcgtgacgggagcagggccacctggcggggggcttacggggatttcaaagagtggaatccctaggggtcgccctacgcggttaaccgacgtttcaagggattggagcccaaggggcttgtgggtgcgggacaggctttggctcctgggaggccttttgggagtctcgaacctgagggccaggcttgggggaaagggggagagggcgaggctggcgaatagggctggtcggcgagagtgagagaccgagggagaagtgctgggcctgggagccgaaaaggctgagtaggaggggagggatgtgggagctggaagtggggtgggaatagcggatgacccgaggcgggagcggggagatagtgggggatcttggggtgaaagaaagcgatctgacctcaaacagacgctcaggaattattaaatgaattaatgtgggtggatgaatggctgcagggaacagttggggagaggtaaattggcgggatgagagggagcagggattctagagaatcattgtaggaaaagagacggcaaatgaaaaggattcagagggccgggtgcgtggtggcttacgcctgtaatcccagcactttgggaggccgaggcgggcggagcacaaggtcaggagatcgagaccagcctgaccaacatggtgaaaccccgtctctactaaaaatacaaaaattagcggggtgtggtggcgcacacctgtagtcccagctactcgggaggctgaggcaggagaatcgcttgaacccgggaggcggaggttgcagtgagccgagatcgcgccactgcactccagcctggtgacagagcgtgactccgtctcaaaaaaagaagaaaagcgtccagagaaaatttaaacggagggctagaagactggaataggcagagacaaatagcacaggaaagagactgtgtgcctgcacacttgagaccagatgtgcttgtttcatcaagttttgaacttgggtcagggacttagggatacgtggacaaatgtctttgtgtttttttaggctaaaacttattgttgtgcatcagatattgtcctaaatgctttacatgtacagtataaacgtattctgcttgcccatgtatttccttcttttaactcaaggacgttaaaagattgaactatgtgtatttattaataacactagtgatgtttaaacctctgtcataaatagctctgtaatgtattagaaacatacatttaattcataatacagtttaattcaagagtcttgctttgcatttcattgtttacatagttgggatgctgtctatgagagagaactgcaaactttccgagaatatggagatacaggtgaaatctggtgagttaggaaaagaatcaagttataatctagaagattatatgtatatgtgtgtgtgtttaaaaaaatacgtatatattcgccgggcgcggtggcttacgcctgtaatcccagcactttgggaggccgaggca

SEQ ID NO: 6171 - DNA, 2300 bp, Homo sapien
ctcggcctcccaaagtgctgggattacaggcttgagccactgcgcccggcctttactttaatcattacgcacaaggatttccatctgcctttttttttttttattattggagacagagtctcactctgttgccaggctggagtgcagtggcgcaatctcggctcactgcaatctccgcctcccaggttcaaatgattcccctgcctcagcctcccaagtagctgggactacaggcgcgcgccaccatgcctggctaattttttgtattttagtagagacaggatttcaccattttggccaggatggtctctatctcctgacctcgtgatctgcctgccttggcctcccaaagtgctgggattacaggcgtgagccaccgtgtccggcctcctgtctgccttttatcttaccctatcactagtggctgcctgaagatctcagaacagcatctataggagatgcgcatccgatcctaggaaggatttctgatgctattttatctttagggacttgttactgggcttctgtctgccaagacaacagaaacgtggcctagcaaacaattccttttggttggaaggcagtctcgctaggggcatttgagggccttgcctaggacataggaccagcagtatttcacagctactacagaaaataccccagactttggcccataagatctcttgtattatactgcagatctaccaatggcactcagacccagaggcagatgcaatctccggttcgcgggttgggagcagttttgtggaacaaagacaccgtctagttctgacatggtacagggaggaaacacacagaggttaagacttagacaagaggccaggcgcggtggctcacgcctgtaatccctgcactttgggaggctgaggcgggaggatcacttgaggtcgggacttcgagaccagcctgaccaacatgaaggaaccccgtctctactaaaaatacaaaattaggccgggcgcggtggctcacgcctgtaatcccagcactttgggaggccgaggcgggtggatcacgaggtcaggagatcgagaccatcctggctaacacggtgaaacaccgtctccactaaaaaaaatacaaaaaattatccgggcgtggtggtgggcgcctgtagtcccagctactccggaggcttaggcaggagaatggcgtgagcccgggaggcggagcttgcagcgagccgagatcgagccactgcactccagcctgggcgacagagcgagactacgtctaaaaaacaaaacaaaacaaaattagcctggcgtggtggcgcccgcctgtaatccagttactcgggaagttgaggcaggagaatcgcttgaacccgggaggcggaggttgcggtgagccgagatcgcgccattgcattgcactccagcctgggcgacaagagcgaaacttcgtctcaaaaaacaaaacaaaacaaaacaaaacaaaacaaacttaagcaaggccaggtgcctgggtcgaggcagagctgaggcttatccgggcatcctctcacttagcagtctttcttccacaacacactgatccccgtgtttggcgtattgtggagagttgcagggcattcctttccctggacataaatttccacgtctaccggtgacatcaagtcacaagaggccagaacgcggttttcaagtcagaatcttagccagaaacgaagttggcctcttgccaaggagccaaataactggatggacgctcgcacccgcttcgcagacaggcgcacgcagtggagaggtgaagtgatttctgcgtttgggtagagcggcgtcggctttaggtgtccacggtgcggaagccagccgttttccaaaatgcaatacctctaatggtccctcacgaacagcagtccccaaatacagccgctcttggacctcgacgaaggggatgccactaacgctgtggggagagcgcacggtccccgccggcgcagggagccgggggtagagcagagggcgtcgcgtccccatcccagccccagcgcgggggctggagcagtcgagagggcggcctcccgccgcctagaggcgccggtccgctcgtccgctctgcctgtgccccgtctctatggcggccccaacggccgtccaggacgtggagcgaaatgagctcgggcgctgacggcggcggtggcgctgcggtggcggcgcggtcggacaagggcagtcccggggaggacggtttcgtcccgtcggcgctggggacccgcgagcagtgagtgtgacgctgggcaggggaggatgagccgtgccgccctgcctgggccc

SEQ ID NO: 6172 - DNA, 2300 bp, Homo sapien
tcttgctatgttgagcatagatttggcaaggaggggattaaaagctgaagcaggaacactgggtttctcagccttgtcaccactgatgataattcttcattgtgggcctgttgttgtgcactgtaagacgtttagccacttctctggcctctacccacccaccagatgccagtggcacctgacaccgaattatgatatctgataatgtttccaaacattgccacatgccattttgggaggcaaaactgccaccagttcggactccctgagtaagaggatacaaaattctgagagagagagatgatggtgacttgaaccaccgtttcacttccctcccaccccaagacgctacagtctcaactctgcagccaaagtgattgtgttatctgttatcaaattatgtcactactataccaaactgtttatttgcctgaatttcctccatcctttcatccttgagcttgtaaatgttgccttttttcttttccttttttttttctttgagacagagccagagcgcagtggcacaatctcggctcactgcaatctctgtctcccgggttcaagcgattctcatgcctcagcctcctgagtagctgagattacaggcatgcaccagaatgcccggctagtttttgtattttcaatagagatgggcagaggggagtgggcagggtctcaccatgttggccaggctggtcttgaactccttgtcaggcctctgagcccaagctaagccatcatatcccctgtggcctgcacgtatacatccagatggcctgaagtaactgaagaatcacaaaagaagtgaaaatgaccggttcctgccttaactgatgacattaccttgtgaaattccttctcctggcttagaagctccccgactgagcaccttgtaacccccgccccttcccaccagagaacaaccccctttgactgtaattttccactacctacccaaatcctataaatcggccccacccctatctcccttgctgactctcttttcggactcagcccgcctgcacccagttgaaataaacagccttgttgctcacacaaagcctgtttggtggtctcttcacacaaacgcgcataacactcctgacctcaggttaacactccccacacacgcccccccctcccaaagtgctgggattacaggcatgagccaccgcgcccggcctcaaatgttggctttttgttttgttttgtttttgagacggagtcttggtctgtcacccaggctggagtgcagtggcgcgatctcggctcactgcaagctccgccttccaggttcacgccattctcctgcctcagcctcctgagtagctgggactacaggagcccgccaccacgtccggctaattttttgtatttttagtagagacggggtttcaccgtgtaagccaggatggtctcaaactcctgacctcgtgatccgcccacctcggcctcccaaagtgctgggattacaggcgcgagccaccacgctcagcctaaatgttggccttttttttttttttttttttttttttttgagacgaagcttcgctcttgctgcccaggctggagtgcaatggcacgatctcgactcaccgcaacctccgcctcccgggttcaagccattcccctccctcagcctcccgagtagctgagattacaggcatgtgccaccacgcccggctagtttttgtattttcaatatagacagggtttctccatgttggtcaggctggtctcgaactcctgacctcaggtgatccgcccgcctcggcctcccaaagtgctgggattacaggcgtgagccactgcgcccggctagaatgttgtcttttaatactaaggtttcacttgcaaagggaaagaactgtttgcggaactatcaaccgctgtctgaggcgtgtcgggagcgacacccctgcggaggatacggtgccggggtccttccgatcgcaaaaaccggcgttcctcagccttcaagactgtgagcgctcagggccctcggccgctgcccgccgcagactccacttcccatgatgccaaggggtcgggccgtccggaaggccgtgtgccctccgcggggcatgatggggtagctggagatttccatcatggcggcgtccatttcgggctacaccttcagtgctgtgtgtttccacagcgccaacagcaacgcggaccacgtaggtgccgggccccctgccgcgcccgctgggggctttcagcctctgtctcaggccggcgctcgcggccaagccgggacctcatgcggctcgccccctgggcaccagggccgg

SEQ ID NO: 6173 - DNA, 2300 bp, Homo sapien
gcattattccttaaacactgtcacctcggagtcacagcatttaaacaataaagtggaagaggcaggaaaaatgcctttccatttcaccgcagttatgataaccttgaggcatcttttttctgtttgtcttccagtactgacttttttgacaaggatggagtgatgaaagacatcagggcgatttatcaggtttataatgcacttcaggagaaagttcaggtaactgatttatttattagttttcatcttatttgtcttgcccaaaagcttttaattctactttaattttgaattgtcttccaactgacaaatagagttaggatccgaaagtcagaatctgctttcccagaacagagtcaagctgtggaataatgattcatgccgtctcgcagaagcctggctcactcactctgtgcctgaagtagattgttaatactactgtttcaaatacttacagccccatttgtgatagtagttttgctaggaaaatgtagaaaggcttgctaagaacatagctgtctccatcagttatattctaagtagagacaatatcaaaaggcagccataactggttgcatctctgcttcttcatcctagttcactcactttgcccccagctgcctccatcgagtgggaggatctcggcagagcctgttcactcctagtcatttatgcaacagacatcaatggaaacatctcctgtgagccaaatactgagcttggtgctaacaatactttcccacattcttttcgtcatccccgctgtgtttttaggagtagtttgctctaaaacctaagaacaaaagagcgtttgaactggcctttgagtacagcaaagaaagtggtaaagttgatgaagctctcccagacctggagaaagcctgactttaaggaaaaaggctttggcccggcatggtggctcacacctgtcatcccagcattttgggaggcctaggcaagagggtcgcttgagccaaggagttcgagatcagcctgggcaacataatgagaccctatttctacaaaatagttaaaaattagccaggtgtggcagcatgcacctgtagtcctcagctacttgggaagctgaggaaggaggattgcttgagtacaggaggtcaaagctgcagtgagctacaattgtgccactgcactccaacccaggtgacagagtgagacctcatctctaaaatataaaaataaaaaggatgaaggcctcagtgagtaaaaagaggaatgaagacagatactgaaaaagaggaaaacaggctgagttcagcctggggcaaagggagaagcatgcaagagccatttccagtctagtgttccaaatcagggccactgtgcacctaccagaatagggaactttatacagactcactggtcaccagcctactttctggaagcttctggtatttctgctatggaaggaacttgcagtggaaaatagctttttgtcctgaattcatgaccatgcccttttcagaatatcagcactggccaaaagtggctgttatatttcattgttgattgaataaggcctgctttgaaaataccaaatcacatagagtgttctcaggattataaatagctaaattacacagatgtagtctcagatagctatcttttattaaaccttgactttgaaacttttttcaacttttctttaaaaatattttctgttaaattgtcttatctgattttttgaatgttggtaataaataaaagttgaaagcatcttattcctgtcttatcttttgttcttctttgtatgctaaactggtaccaagagttcccttttcatttcaataaaaatgattaatcaaaggaaagagtagatctttcctatcttacccttactggtcaagaatttataagctaaatagcataatcatcttaaaattaaagcaaatcagtgaataataacaattctagtcttttgggctttcatgattttgttctaccttatgtggctgctttttaactcaataaaccatctggacttttcctggagttgtaatcagcgctgaatttatggaatgccttgtgcttgaacttgaagctaacctcgttgtcatttttttcctcaggcagtgtgtgcagatgttgaaaagagtgagcgagttgttgaatcttgtcaggcagaagtgaacaaattaagaagacaaatcactcagaggaaaaatgaaaaggaacaagaaagaagtaagtttcttattaattttaccattcagtatcagggaaatgttgttttaaacatcagattatactatacaataaattatgtgcctctttctacg

SEQ ID NO: 6174 - DNA, 2300 bp, Homo sapien
ttttgctttttctacttttttggattttatcatcttttcccttttagtaatagagtaatacaggtaggaattaacttagcactgccaaattaatagtaatattagaactgtgtacacagcacagggttaaggttatatagaaaaatgtctcatccatgtttaatttggctgaccagcccagttgattagccaattttattgttttgttaaattaaaattctaaatatagttgtccattgttaaaataagtgagtagggttaaaatagagaattgataaaaataaagccttaaaaatcttttagctaaagtagcaggcttcaagtgaaattcagttttggtctcctttacaggaatagctattcagtcagacagaaccacttatcacgttttgcagtatctcctgaggaagtcagaattctgagccagcatgaagacggaatcttgtctttgatctgatttgcaaaccgtacttttattctaatcatgtgcaaggtggaggttatagcgtgggaactaaaatcttagtaagtgtggtttttattttagctattaagtagtatactttcttatagtgatttttttttcttcttagcagagttcacactataaatggtgtatggacttggcaggcaggaacataatacagtatacttcaaaagtgaaagatttaggccaggcgtggtggttcatgcctgtaatcctagcactttgggaggtcgaggtgggtggatcacgaggtcaggagttcatcaagagaagcccggccaagatgctgaaaccctatctctactaaaaatacaaaaattagccgggcatggtggcatgcacctgtaatctcggctacttgggaggctgaggcaggagaatcgcttgaacctgggaggtggaggttgcagtgagcttagattgcaccactccactgcattccagcctgggcaaaacatagcaagactccatctcaaaaaaacaaaaatgaaaacaacaacaacaaaaaaacaaacaaacaaaagatttaaccctctaggttcaggaaaaatccctgagaaagagagagcaaagcttctatactctgcctaggatttctttctctttccgggtgaaaaataggtgttgggatgatactgagttgataaaagtatttaggaaaagtggccagtgtctaaattcaagccattaaaaaaaaaaaaattaaatttgttatgtaagttgcttcatttatgaattagttgccattaaattatgaagtctttcttcattatagtgtagtgttagcccattgttgaatcctagaaatcttttaagtagtgtgaatatcttttaaatatgaattggattttttggggggcaggggatggagtctcactctgtcacccaggctagagtgcagtggtgcgatcttagctcactgcaacctctgcctgccgggttcaagcagttctctgcctcagcctcctgagtagctgggattacaggcacctaccaccatgcacggctaatttttgtatttttatagagacggggctttaccatcttggccaggctggtcttgaactcctgaccttgtgatctacccgcctcagcctcccaaaatgctgggattataggcttgagctactgcccccggccatgaattagattttgagtatattttaaatattcaaaatttaaaatattttaattatgaacattcacaattatattggaatgattatgctactggttatttcagtgaccttccacagatttaattttccccagtacagtcttcttttttttactccagatagaactagattttgaggctacagattatcaaggaactacctatttcataatgttactttgttaattgtagccattacttctcaacatgtttctttactacctgtgctaattaagaacagtggataattagcattttaagttgcttttctcccttagcgagaatgataaaatagacgttgcttgatcttctgaattcatgaatcataatctgtgttcataatttgagaatggttatgtgtttaagctattttttagtttgtgttgtttcctctacctttgtctctttaaactattggttacttttctaaattgatgtgatggcctccctgaaattaaacatttctattagtggcttcccgttaatctcatccttcttagatcaaacctcgttatatctcctgcctatctcttttgcattccaaagttcagttttattaaatcccagggtctaagattttttctttgagaatttatctccagtgtttctatggaaattaaaaaagaaaattaggat

SEQ ID NO: 6175 - DNA, 2300 bp, Homo sapien
ttcctggtgcagaaggatgttggagtgcggatccatgcggacaccctgtttggggacctgggtgtcggggcagcagcaggagtgactgggtgcacgtgtgcctttggtgtctgagcgtcaggtgcagctgccgctcagggctgagaggggccatgatttctcccagccgggggtggcaggagaactgcacttagcttgggggccatgcggggctggctgtggacctggctaccccagcccattcttctgaggctgggacaaaagccttttttgtactttgtgctcaaagagacaattatcccaagtcccactggccgagcacggccttccatgcagggctggtgcaggtgctctgggccgtccctccccagcaccgtgtatagtcttaacaggatgcagtcacggccccagtggagggggatttccttcctcgtctccgagcgtgtggctaacggaatatgagccttggtggtccagcaggagcccccccgtggctggggtcccagtcatcgtccccaccaagtggccagcttggggactactaagagcccttgaggaggttagggatggaaggcgaggccacacagatgaagttggcctttgtggaaggctcctgcttttgcctgtgggaccctgagcctgctgccttgtgctcaaaggccagtgatcccgggaatgtcacaccttcctggttgggttacccatggtgggtcaccaggctgggctcagcctggagcaatggcctggaccgtccagcctcagagggagggaggggatggggatgtaaggccgccgtcagggttgatctggatatctgaaaagttgatgagccccaaagttttaatctgaggctaaagagttctaatttgacaagagacattgccccttcctggcatctcggcggattgcacctctggaactcaggtagttgttctcttgtgtccagggtgtgggtcttgaagatgtgaggtttgggcagatggtcaggaggacctacgaaatccaaggatggatttgaagggggcagtttttgttggagaaaatgctgcttctctgtctctgaggtcttcggagcctgctgggtttgctgcacagaataaagagagaaaagaggccctgaggctctcgctgcatcctgggcgggccccgcagggtgtctgccctgtatgtgcacggggcgcaagcatgcgcgtctgtagtgtggcaggtaaggccttccaccaccctgctgaacgtctagatgcagccgcgctggtccagatgaagttgctagagaatttgtacttggacttgtgggaaggaccactggggcccttcctggggtcacccctgcccctctgtcctcacagctgtcccttcaccttgttggcagcaccaggaaatctgtcaggattaatatgatggctctggcctgtctagagagctgcttgctgtgtggtcctttgagaagtttgctctcctgagcccctagaggcctcctgccctcaggcataccttccctgccccagacccgccatttctcctcacccagcgcaggtgagaggggctggaggagcctgcccaggccgcctgtttgtgcagggcctgtccaggaagttcctttggacgcacacgccttatcccctgtcatagtgtgtgaggggcagctggtgccggtgcaggcagggaggcacgcggtgcagggacccgtcctgtgctggactagcctgtgctggcctcggggccccatggtcctgaggctctcgggactatggtctgctggcagggaagcagccgtgtgcgtctccagccagagccgcaagtggatgggaagtggctcctcttcgtgtcagtggctccctggaaggtgatgcaggtggaggcggtgccctcgctgctccgccaccctcgcttgcccaagccctgccctgagtgatgagtggggagctgcccctccacgcaccctgtggccccagccacccacccactgtgctcaccccttccctcctggcaggtatccgcccccagatcatgaacggccccctgcacccccgccccctggtggcgctgctggacggccgcgactgcactgtggagatgcccatcctgaaggacctggccactgtggccttctgtgacgcgcagtcgacgcaggaaatccacgagaaggtgggcccaccctgcccggccggggcctgcactgaccttgggcagtttcctccccagcatccccccattagatcgccccaagtcaccggcaggccccagaacccctgttccctgctttcctgctgaactcctctgcctcaggttcaagggtg

SEQ ID NO: 6176 - DNA, 2300 bp, Homo sapien
ttagccaggcatggtggcacatgcctgtagtctcagctatttgggaggctaaggcaggagaatcacttgaacctgggaggtggaggttgcagtgagcggagatcgtgccactgcattccagcctgggcaacaaaagtgaaactctgtctccaaaaaaaaaaaagccagagccagcctttgcctcctatgtcagaaatgatcatttgcagctgctttgctttggggtagaagcctcaaatcctgaaaccctttaccctggggcaggttgtcttgtgctgtaagcaacagaaacccatttagatcatttttaaataatgagaatttctgttggaaggatgtcggcttagctcacacagtgtctaggaagactggaaaatgggtctcagaaacactgcaggcagctttgtgtggcaggatcaatccagttccttcttggtgactgctcaggggaacatcccatttgccttgcatggtactgagccagaaggtcaactccaggcctgtctgcctgtatccgagaaagcagcagctccccacaatgaaatgtagcgttttccagctccggatccttccgccatcctccctgagatctacctgccttaggatctgtgagatccacgcactttgcttttcctgggtgtctggttactgttcacaaaagtccagcagtttggcctggtgttgtctttgtttttgactgagcatctctcatttcacaagtatttattgcagctgcagctctaagcaataccaggcccagggatgggcgtcagcactgccttgagctggtgcacagcacatcccggacggaggggcagggccgtcctggtgcacacgcaagcctgaaaccagatagtaattgataccaggggagccggcagggctttctgctctacacagttaatgtgggcaagctgtcaacagtaaggcactgatgtcatttccgtgatgtgtccagttgcagctggaattgtcctgaaatggacaaggcaggtttactggcgggagacggtagaaaggaaaaatagcgcatagagggcaccagggccctgtgaccctcgtccgcaagtgtctcctcatacctcgtggttgcgcaccgtggtacggggccaccctgagcgctgactcccgggctgtgaagtgggaagaacagcagcactgcaggactcttgtcagccttgtggtctgtacgcatggaaaaggccgtcagctgtgcatagcaactggaagccatggctttttagcataaagcccagttcttcggaagccctcattacgtactgcgccttgggctttctcctcgcaaattcccaatcctgccccactgggcctggggaccccacgtccctgaaagggtcgtgttccatcttaatgtatatgaatcttactctgtgtgtcagttacatcctaataggttaaaaacttgctcaaatggtcagaagcctgaaagaggcgtcaggaatcctgtgtgaggtaagatgggggatctgtttgcaccttcatctctccatatgagatcttccatatgagctcttccagaaacctctgccccaggctccagcaagcctgtagggcagcggctgctaggcaagggcttgaatttcagtccagattctctggtgtgtgggtggacagtttccttctgggactgaaggagcacttggaagatggtgctttcccttctagagcaaaccttggcattgtcccagctaagctctcatgcccagggcttgggggtctcctgtggcctccatatccctgcacctcatgcagggcacgcaagcatcccacccactcccaaccccccacctccagccgtcgtgcccggcatcttttcccagcatgagaacccgttggcttttctcttttcccgccttgccatgaaggacctgctgccaggattcgagcctcagaccttggacaggtctcgggccagcctcagccacgttctgcgtgcccggccatcagggagggtagagggtgggtttcaccaaggagaaaggcaacccgtgtcggggagggagccgatcgctaggcaacctggagtttgttaccctggtaacggatccatgcactgatgatgctgcggatggacatcttgtgacaatggcctctcaggctccccagacgcatcagcggctctggattcccaccttgcgcccagcgtggttttcctgtgtggctaccatttaacgaacagcttggatttcttataatcaggcactctctccgataaccatcctgccagcacccctgaaagtgaagttggggtgttcctcactgtgtgtgggcgaccgcct

SEQ ID NO: 6177 - DNA, 2300 bp, Homo sapien
agctgggcctcctggttcaatgggaggctgatgctgccccaaagcgcatctgcccacatctgccctgctcctgcgatcaccccttggacaccagctcagtaacctctctgaagaatcattactggtttcttaggcgctaccgggtaaacattcttctatagagccctgtttacatttgagaacttgctgagctgaaaaccagatagcaaagaagctggtgagtcaacagagctacctcaccctgctacaaaaaagacttggcatgggggattttcccggaatgctccaagtttatccacccatctttgaggggtgtgcatgcaccatgagtggggtagcatagtactaacaccacataaggtcatgttgttcattacaacaaggggaggaaagaaattggcaaggtggcttaatcctgaggcgctggccaggcgcagtggctcatgcctgtaatcccagcaccttgggaggctgaggtgggtggatcacctgaggtcaggagtttgagaccagtctggccaacatggtgaagtagatagagtagagacatggtaggctctactaaaaatataaaaattagctgggtgtggtggtgcacacctgtaatcccagctacttgtgaggctgaggcaggagaattgcttgaacccaggaggcggagactgcagtgagccgagatcgcgccattgcactccagcctgagaaacgagcaaaactcggtctcaaaaaaaaaaaaaaactgtgtctcaaaaaaaaaaaatttaaagactggtatttctctttagaagattctagtagagtgctagattgagagagatgtgagtgaggaacagcactcgggtttaatgcttgcaggtatgcatgttgtctcattttaaagtgctttcaatgtatacagcctttgtagcttcctaatcaccggcttttatttttgctatgaattctttgtcatgggaatcctgcagttgcagggcaggaacctaccgtgttagtctgggatgttgcttctctggtactgttccatatgtttaaggaaatgtcttaatacttcggggcactcctttatctaaataactgctgttctttgcattattgcgcctgaagtcctttgtggactctgaaagcttaatccatgtgaatatggaaaagcatctgcaggatctaagcctgctggaattaggcttttcatcctgacatacctaaaggaagatgagatattcagatgcagccgcttcccagttctgctttgcagtgtaaggtttagtcacccatcctcctgttcctgtgacctctgttgcagtcactttaaatcccagattacacacgcccttccctggcactccccggccccccggcagcatgagcccatctgtgtttcacagtaataaggtaaagaatgcatttgggcttgagctcggaaacctgtttgattcacaaccaaagagtcgtctcaaagccagatctcagtattatcaaagcatcaggtttcagagctggcccttttttgggctaggcatccatggcctaggatcacgtgtggacctttttctgtttatccatgtttaatttgtgtttagctgtgccatggattaacgtttcatcacggtggattaagagtggactgacattgaagcagccttattttgcttctgttacctctcaggaatcagtggcaggggtgggaacagccccttccagagggggaggcagggttcatcctaaaagtaccctggtgcttggaagagggagtataaacctgagcgtcagtgtggaagtaaatcccagttgcagcttgggagggctggatagagcaagccaccggcttcatcagtctaacgagatgtcacatggaacaaagctttagggttttatttagctcctaatccgcatgctgagagagccctggtccatgtgagcacaccagccaggaagggggacctggcaggctggggacagcctcctctccgggactgagctgtaaggaacagacctctctggctatcgttggggagtgaggcaaagttaccgtgagtcttatgttttgtctgctaaggtttcggaggattaataattcaggccatgctttgaaacagaaaacccccagttggttgtccctgccgtctcggaagggttagcacacagccaggtctgtttttgatgtatgtaattgaagatttataaagaaaagcttctcctctgcctcatccgcagtcattttttttccaatgccagttcccagcaggcatataaatattggtcgttctcagagctgggatgctgctgggtggtacgagggcccc

SEQ ID NO: 6178 - DNA, 2300 bp, Homo sapien
gtcaccacctcccgatggcaccactctgttctactccactgcccccggggcctgacttgctactatggaactaaccctgtaggatgaggccgccatgcccgtgtgtgtgtctgtccagatctgtccccacatacttgctggtggcgggtgggaagaaggttagataagttactgtcatagattgtgactatgaagtaatccattagaatcttcagacaaggaatgctgggagtggtggctcatgcctgtaatcccagcactttgggaggtggaggcaggatggatcacttgaggtcaggagttcgagaccaacgtggtgaaacccatctctactaaaaatacaaaaatgagctgggtgtgatggcacgtgactgcagtcccagctactagggaggctgaggcaggagaatctcttgaccccagaaggcagaggttgcagtgagcagagatcatagagatcatgccactgtactccagcctgggcaacaaagggaaacttcatctcaaaaaaaaaaaaaaaaaaaaaaagaatcttcagacaaggaaaccatgctctttgacctagtaatctcccttccccacccaatgccaagaaagctctaatgcaccaagattttagttatggtgttacttgacagcaaaaagacagatgactcaagcatccaacagtgggaaaacagctaattctttttcaaatgatgccttcacagtttgaaataagtagaatgcttgtcttaaaatgaaaagcttcaatatcaaatgttgaacatttatgaatagaaccataaaaataatcatgggggaaagctgatgaggagcagttcatagtgattatctttagttggtagaattttgggtgatttttttttccatacccactcctcctccccaaatgttctgtaatgaatatatgtttgggtttttttgtttttttccaagacagggtctcactctgtcacccaggctgtagtgcagtggcacagtcacagctcacagcagtcttgacctccgggctcaagcagtcctgcctcagctccccacatagctgggaccacaggcatgcatcacgatgcccagctaattttttgtttgtttgtagagatggggtctccctgtgttgcccagactggtctcaaactcccgggctcatgtgatcctcctgccttggcctcccaaagtgctgggattacaggtgtgagccactgcacctggcctatgttactttttaaatagggaataaaatagctggtcaccctgatgcttccaaaggaatcatgcatttgttgaagaggggaacagtgcaatgcaagatttacgaagacagagctgattaccttccctccccagtcctcagatactgtctttctccttgcctttaccaggacgtacaagtgcatctgagcatacggagggtgtctgtgttggcttaccgaaaggagtcctgttactcctgcattcccattcgatatggcagattgtgcatagatacctctgcagaccagtaggcctctccaatacttttctttccctcttactgcctttgggcatgtgtgcacacccaggattttacctaagtggaatctgtacttactatggttttggtttgtgttaagtcatatcctttgttttttcaattgtctcttttggcagaaccatgtatgctagcatccagctgcctgggctcaattcctgcctctgcctttggtagctgtgtggcattgggaaaatggctgatcttttctttgcgccaatttcctccttaaatataagtaataatagtacctgttttataagcttgtaaaggataaatgacttagtacctgcaaattacatggaccagtgcttggagacgtaagcactttgccaacttgctgtcagtgtggttggttattttcccccatctccccagttttgttttgttttgttttgttatttatttatttttttttttgagacaagatcttgctctgtcgtccagggtgagtgccagcacagcttactacagcctcgacgtcctgggctcaagcagtcctcccacctcagcctcccaaatagctgagactgcaggcatatgccaccatgcccagctaatctttaaacttttggtagaggtcgggtctcactatgttgcccaagctggtgtcaaactcctggcctcaagtgatccttccaccttggcctcccaaagtgctgggattacaggtgtgagccaccacgctggccctcctcagcttttttttttttttttaaataaccattattattccatattttttctatgaaatcatttataaacataa

SEQ ID NO: 6179 - DNA, 2300 bp, Homo sapien
ggcaagaaaagcctggtcggcgctgccctcacaggtaggcggtcttcaatcacgttttaaaatcttgttgagtgattaagcaatcttcgatagtcccggcccctccactgcaggccgctcaggccgcaacgcacctggtgcgctttggcaaacaagccccgcggcgggctggggcaggatttaagaaatgtttaatgaagactgggaggcctggagcaacgctctttgggatgcagaaaagggtcgtgcagctcggtggcctctcctccggccccctggccctggctgtaagtttcctcggctctgcagggcgcggggcactcagggatggaggagaccacaccgcgcggctgggttcgcggaatggcggtccctgcggcctccaaaggcgggacctcagacccctcccactcctttcctgctcgacatctcaatccagctcctaatatctcaatagggtttttaaacaaatcgatcctaagggctcagttcagcccacccagggattcttggaggacgcacgccgaactcagggtagtgagaagagtttggggggccctggggcgcagggagaagaccccacactccacggccaccagctcccttccggagacggcgctcggacgtcgcgggtcacgggcggggaatttagcccaggtgctcgttgggccgcgagcggccgctgggcctggattcccaggctcgctgtgcagactccaaccttgagacgtcaggacggcgtgggctccgggccgccgcgcaagcccaggaccccgagtcgcgggcccccacgccgcagcgcgcctccctcctcgagacccggggctccgacccaacacagggcttctcaaatgccccggcgagatccaggcagcaagagggaaccttttttttttttttcaatgtgtaagaatgttttgcttcttttagggcacagcactgctgcaacttgcagcacagagggcccttccctgcgcacccacagcggtcgccgcctctccggcacggtctcccggatctggatttggggagcgcaagtgccccctgtggccggcccgcgcctgaccccgcgggcctgagaaggcagaagcggccggtgcggggcaccaggaggaagttggagcccgggggccgggaagggggctggttggcgccgctggctgggcggggccccatgggaccggggccacccggggctcgcgttcccccacgtggccggctgcccggtaccccacgtggaaggggcggaggaggatgaagggccaggggagcagcggaccccgagccaccgcgacaggacctcggcccctgccaccgaggcccccgcgcctcccgagggcctcccgggcggggccgggctagggagtgcccgccgcgcccggcccctggccctcccgcccgccgcgcttgtgtgcactttcgcggagccactaatcccccgagagagccgatttgtagtgaggagtatctgaagggggcgaggccggcccatgtggggttgtgtcattggtttgcaaaaagagaccccgcctttgccccccccccccaaaaacaggagcgaggagtgagcgagcggcgaccctcacctcgcctcccgcctagctcctgcgcagccagcgggtaccgggagctgcggccagcgccgcttctttcctttccttttctctccgttttccttctccttccccggaggagaaaacaaataaagaagagcaaatagccgggaggcgctcggcatccaggacgttccctcccccgatccaagttggaattagcatcctctcgggggtgagcgcggcgcggggcgggcccgggccggggacccccagcgcagccccctctcggcgggcgggagggcgcggggccgggacgcggggggaattgggaaccgggtgggcggaggaagggggtggggtgggtggggaagtaggaagaggctcggcggcgaggggaggaggtggaagggaagggaggggtagggtggggaggggaggggagcggagggagggtggggagggcgggagggggaggggcggggagctggagagattaagtttttgtgtgtgtgtccctgtgtgcgtgtgtcattttaaggtggctcgggagcggcccggaggagccggcggcggcccgaggagcgagggaccgaaccgggagccatgccgcgctgagggggggccgcacagccgccgccaccgccaccgccgccgggtggggtgggaggggcgggagacgccgccgccgccgcctccagggtgggcgcctttcgccgtggacgccgaccgtccgggacgaggtaa

SEQ ID NO: 6180 - DNA, 2300 bp, Homo sapien
gagccaccgtgcccggccaagaacatgttagtaatactttctaagtcagaattcaaatttatagaacacgtgaaagtgaaggagtgatatggaaaatcaggctttttgtggtttcttcctgagaaaagaagaccactcagaaccaaagacttctgtgaaataaggaagcagaaaatctttatttgtagttcttatagtttatgcctaagaaactccgaagaacaggtactggtaacccggtagcctggcggtggccgcggtttgtttacagccaaaaactagctgaggcgccatgcccttgaggcaaaactgctgaagagagaagcaccctgaagatcagtttgtggagatccagggttgccagaagacgagacaaccgtgattgcatgtgcggaggttcctcgatggaagcgcagcccggcgcgcccctcagctggcctggccaggccctatgaaggtcacgcgaaaaccctgctgcgggcttcttagcgaccgcattacgtggactagcgggcaagaaaagcctggtcggcgctgccctcacaggtaggcggtcttcaatcacgttttaaaatcttgttgagtgattaagcaatcttcgatagtcccggcccctccactgcaggccgctcaggccgcaacgcacctggtgcgctttggcaaacaagccccgcggcgggctggggcaggatttaagaaatgtttaatgaagactgggaggcctggagcaacgctctttgggatgcagaaaagggtcgtgcagctcggtggcctctcctccggccccctggccctggctgtaagtttcctcggctctgcagggcgcggggcactcagggatggaggagaccacaccgcgcggctgggttcgcggaatggcggtccctgcggcctccaaaggcgggacctcagacccctcccactcctttcctgctcgacatctcaatccagctcctaatatctcaatagggtttttaaacaaatcgatcctaagggctcagttcagcccacccagggattcttggaggacgcacgccgaactcagggtagtgagaagagtttggggggccctggggcgcagggagaagaccccacactccacggccaccagctcccttccggagacggcgctcggacgtcgcgggtcacgggcggggaatttagcccaggtgctcgttgggccgcgagcggccgctgggcctggattcccaggctcgctgtgcagactccaaccttgagacgtcaggacggcgtgggctccgggccgccgcgcaagcccaggaccccgagtcgcgggcccccacgccgcagcgcgcctccctcctcgagacccggggctccgacccaacacagggcttctcaaatgccccggcgagatccaggcagcaagagggaaccttttttttttttttcaatgtgtaagaatgttttgcttcttttagggcacagcactgctgcaacttgcagcacagagggcccttccctgcgcacccacagcggtcgccgcctctccggcacggtctcccggatctggatttggggagcgcaagtgccccctgtggccggcccgcgcctgaccccgcgggcctgagaaggcagaagcggccggtgcggggcaccaggaggaagttggagcccgggggccgggaagggggctggttggcgccgctggctgggcggggccccatgggaccggggccacccggggctcgcgttcccccacgtggccggctgcccggtaccccacgtggaaggggcggaggaggatgaagggccaggggagcagcggaccccgagccaccgcgacaggacctcggcccctgccaccgaggcccccgcgcctcccgagggcctcccgggcggggccgggctagggagtgcccgccgcgcccggcccctggccctcccgcccgccgcgcttgtgtgcactttcgcggagccactaatcccccgagagagccgatttgtagtgaggagtatctgaagggggcgaggccggcccatgtggggttgtgtcattggtttgcaaaaagagaccccgcctttgccccccccccccaaaaacaggagcgaggagtgagcgagcggcgaccctcacctcgcctcccgcctagctcctgcgcagccagcgggtaccgggagctgcggccagcgccgcttctttcctttccttttctctccgttttccttctccttccccggaggagaaaacaaataaagaagagcaaatagccgggaggcgctcggcatccaggacgttccctcccccgatccaagttggaattagcatcctctcgggg

SEQ ID NO: 6181 - DNA, 2300 bp, Homo sapien
aaaaaaagtgcatgaatagaaaattaaatttactttgaatttgcactatccataatcttttggtatacattgttgcttgctctcaattatattatcagaagctttcaaaagaaaaaataatttaagtgtggctacctcatcttttaaatattaaaacgaattttttgaaatcttaaaggaagagttttctaaatcaaaagaaaatacacgtaaaatgtgtgacattccaataaaatgtaaagaaattagaacaaggaaacaaaaataattgtgtcactgggaagaagagctacataaaaataattcccaaatgaattttccttagataatattttgggggtactgtggatcagagaagagtcttagttgagtagggatatgaaaaaattgagcaatttactgacattttcagctttcttcataatatcccagcattgaaaaatttgaaagaagaaattgagaaatattaaatcaatctagacactgctttaagagatggctaaaattgctaaatacatggttattgtatatatgacaaaattataataatttataacattttctgcaataatttatcatattacatacatgatatgtaaaattcatggtctattttggcatctaagtattactggaagaagtttattgatgacttcagcagctactgcttcaatttgaagttaataaaaaactaagaactatgataactcaagaaatgttgtctaatttggcattattccatgtgacatgtaaattatatggaaatctttattataacaagataattagtgattttactgaaataaaaatgagaaatataaattttatggaataagtatataatttatgagttatgcatcccaattttattaccaatccatcaccgagccatcagtaaaatgcttaaacatacacaataataattaaatttagttttctttgaaattttgccaactttctgtcatgtacaaactacaaacatatttttaccatatttaacacatttgtttttagcatgcactcatgtgctgggccccaccaatgtcaggagttgaccttcttgtacccagagacagacatttcaccccaggctcatccactgtcgctcctggaactttagcaacactttcatttctcttcaccctttgttttttaactcagcagctgggaggaagtgggggttaggggggcaccgagcattgtacttccctgcagacccccaggggctggggctgctgaggggctgctcagcacctgtcccgacccctctgctgccctcctggctgctgatggctcctgccagatgccctgttgtagcaggatgttgttgggagtatggccaccaccaccacctacctcccatgtggaccacttgtgccacccaagagggcctccctctctccccaacctcggttcagtaaacccagggaccccatgcgtacctccagaagtgcagctgtgttctccaagcccagtgactgacagctccccctaatgccatggctgccgtgagggaggagtagctcccccaagtttccccaaggtgggccctgcagcccccgttcagccttggcgtgttgccctggctccccacatctacggatttggggccttctcttcttattgatttcctgtcactgcaataacagattcccacagacttagtggcttaaaacaacacaaatgtatcatctcacagttccagagggtggaagtccaaaccgggtctccctgagcgagggtcaaggtgttggcaggactgcttccttctggggcctcgagggtgaatctgtgctcttggcttttcaggcttctagaaactgcttcattccttggcagtggcccctccctggatcttcaaaaccagcaatggcaggttgagtcattcccatgtcacctgatggtgactctttcctgcttccgtcttctactcacggggacccctgtgatgactttgggagcacctggatgatccaggaaactctccccatctgagggaatggttggcaaccgtaattccaactgcaaccttcattgtcctgtgtcatagcatattcacaggctctagggactaggttgtgacatcttcaaggggccattattccacctcccacaccttcccaaccctggctgtgctggccctgactgagaggagggggtttccacttccgtcacctggcaagggaacctccacagcccaagaatattaacatttatcaggtgccgggcatgggcctcatgtgttttatgtaattcaatcctcccaacaaaagtatgaggtaagtaaaataattcccacc

SEQ ID NO: 6182 - DNA, 2300 bp, Homo sapien
ctcttatttccctgcctgagttgtggattcactgtttggagctggagtcatcccacactaaggatggcaaaacagaatgctgaaaagggagctgctgatgactcccttgagcagctgtactagcctgggatggccaacttctaggtttcattgttacttaagaaatataaatccctatttggttaagacactgtagtcactttagtcagccttctataaaattcaggctaacaattgtaactgatacataggtaatagctagagggaaagctacttaatctgagcaacttacatttttcttttcatgggaacttagctttatggagttgacattatctctcattttactttggctgccagggaactcagagtcaaatgtggtgcccaaatatctaccatataatcctggaaatatacctaatattatgtctatgttatatgtgttctcagactcagcctcttctctttctaaagtatttataaaactagttataactttctatttgatttatactgtattattttattgtgtacattttccatgctttaaatttttgtggaatgaaacaaggtatacatttgtgtgtatacacgtatatgtacacatacatacaaagtgtatatatgttaagtggtttctatgtgctcactcattgtactgagcacttgttaatgagtcgtgaatcccccaccatggtcttctacccttggtacattatgctcccattttacagacaaagaaactgagacttagaaagactaagctgcttagccaaggttgtatccaagtgggtagatcagttttttaaagccttcagacccaaatttgctgaagtgttttctgtttttctttgaaacaaattaaaattttaacaattttttacctgttgctaccctaaaagaagtcgacgtcaggtttttctctgattatgtttctcattgcgagtctactgctgtgatttccccttaacattctttttgtgaatgaattgtagaaatcagaaatgggaaaggcttgaggcttgtcggccatgaaatatacatgttgaagagcaaaggagagaagtgcttggccgacaaggctaagacctcacacttaggagtgacccaaatgtttcctgaagatggtagaagagtgaaaaatcccacaggctctgtaagtgacatcagaagagcaagagttgggggagagcgtgaagctggaaagggaaagttttcaagtgatgaagatgagtaaatgatgcattcctggactcttctcatttcataggccggaggggctaaaggaattggattgggagccaacaagaatttgtttagaggtttctagtataatataattacttcaacacatatgtattgagtgccttctatgctccagatcctgttctaggcactggggatacatcagtgaataaaatagacaaaaatcccagctccatggagcttatattctagcaaggggagaaaaataacatagataagagaataagttctgtagtatgttagaaaatagatgttaaggaagaaagaaaaagtagagcaggaatgactgcttagtggacattcacgaggttccagtgtgctgagcattttacatgcattatttcattcaatctttgcaagagtgttagaggattcccatgtcacagatgaagaaactgaggttgagtaaagtgaagtgatttgtcaaaggtcatgcttcagtaatagtagaagcaggattggaactcctcagactgttgaccacacccacgtggcatgagaaaggcaccaggggccaccatcttccttacccatctcccatccttgtctgaaggtgggttgaagcgtcgccctttggtcattctctccaggaagctgaatgtggctgagattggctccctcacctctccataagctctacatgtctgggaagctgcttcctaaacttcataagctctacacgtctgggaagctcctcctcctccttgttcctgatctttacttctcagcctcttccaggaggggaaggtgcgggtgcccattgttgtcatggaatgggaactcacccatcacaatgggcaaaggagtcttctaaaccctcggaggattcttgccactggttccttgcagctgtgactccccagggtaagaggcaaagagccaccaggtcccagctgaggaagccctgtggtcagctcagacaggtaaggacaagatgatttgggggtaatggcaaacattttgtaccctctcaatttttgaaccaataatgtttgagttgcatgtccccctggcaactgtatgttccaacctgt

SEQ ID NO: 6183 - DNA, 2300 bp, Homo sapien
tagtaaacattgacgtgcctttcatgtgttcttccttagttttgcaaagtacgttagagtttgcagagtatttataaggtgctatgtgagcacaatgctgagaagtagacagcactgtgcatcgtcttctgcaccctccccctgccctggccaggctaattggaatgaagttaggcttattcttgttagaatttggggaattaaatgatcaaattaaagataagagaacacccgctggggtggcagaaccttcaggctgtcctttgattttgcttctctgtctcttccatggtaattaaactttcggctgggcaatcatcccaccaggacaatgcctactttgcagctccctttacagtgaggcctgactatgtggttgaagtcctggcccacgagaggaagtgttgtatggcagctgccaggaaacttccttaggaggaagcagctgagccaactggggttggcccaatatgatccatggggacacgccctttcccctctacttccctttctgcattctgctgcctggaacgcagatgccatctggggccaagtgatgacagctgccccctggagctggtgagtggtggtaggtgggagggagcctcatctctgagaatcctgaacagcagagccaccatatcgagcctggactacttccctctggacttcactacgcagagagaataaatgtctatcatgtttaagcccctgttagttcgggtttcctgtcccagtcaaatttgttcgtaatcaatatagtgcgtcttggcaaggctgtgagacgacagaactcccttgcactgctgctgctgggagtatttctttacacctgggctttggagagcagtgggcaatgcctggtaaaggtgaaaaatagtgtctgttgcactgggtttgtcagcaggtagcagaaatcctggaagggtttactccacacacaacagtattgcctggtacagcagctctgcaacaccaaaagaggtggcccaccaccttttcctcctctccttaccatgtggcttttggcatcatagtgcaagaggacctgtgcatctccggtgtcacatctaagggccacctctggcccttcagtgctggcagtggataaggtcctctatcactactacagcaactctccttggaaaacctaggagggtgactggaggaggaaagggtggaggacacaatttctgagtgagagagcagctggacaggttgtcctgcatgtgtttactctcgtattcacacggagtagccaagagaattggcaagacacaacattaaaaaaaaaaagaaagaaagaaaagcagaaaacaccttactgagtagaagggaggcaggacgtgtgtgtccaggccccgagagaaacgccagatttcacgagcagcctttgcagccctggggatgccaggtggcccttggcaaggctcatgagctctggagctggcccatgaccttgctgggacttgtggcatcccatccattgctgtatgtcccttgtttcctatttgtaaatgttgaaggttgtcgtggagaaaaaataaaaacaggtgaatgtttagtttagcacagcacttggcatataataattattcatgagtgttacttcctcatggtctcaatgctgtgccaggcaggtaagagtggctgtgagtgagtcctgaggttgggtccgagctgagacacagaggctgccacagaaggagatggtaggcagcgtgggtcctgggtgcagcagtgccactgatgcagacaaggtcacccccagcctgggactcaacttacttctctgaaaactaacaggttggaacatacagttgccagggggacatgcaactcaaacattattggttcaaaaattgagagggtacaaaatgtttgccattacccccaaatcatcttgtccttacctgtctgagctgaccacagggcttcctcagctgggacctggtggctctttgcctcttaccctggggagtcacagctgcaaggaaccagtggcaagaatcctccgagggtttagaagactcctttgcccattgtgatgggtgagttcccattccatgacaacaatgggcacccgcaccttcccctcctggaagaggctgagaagtaaagatcaggaacaaggaggaggaggagcttcccagacgtgtagagcttatgaagtttaggaagcagcttcccagacatgtagagcttatggagaggtgagggagccaatctcagccacattcagcttcctggagagaatgaccaaagggcgacgcttcaacccaccttcagacaaggatggg

SEQ ID NO: 6184 - DNA, 2300 bp, Homo sapien
acaaccaaaaaagagaattttagaccaatatccttgatgaacattgatgcaaaaatcctcaataaaatactggcaaaccgaatccagcagcacatcaaaaagcttatccaccatgatcaagtgggcttcatccctgggatgcaaggctagttcaatatatgcaaatcaataaatgtaaagaataaattttaaatcacttcattttacggctcagaggtctgttttgtggacacagagacagaaatggagacgtttttaaaattaagatcatattgcacattggcttttttttttttatacggagtctcgctctgctgcccaggctggagtgcagtggtgcaatctcggctcactgccagctccgtctcctgggttcacaccattctcccgcctcaggctcctgagtagctgggactacaggtgcctgccaccaaacctggctaattttgtttttgtatttttagtagagacggggtttcaccgtgttagccaggatggtctcgatctcctgacctcgtgatccacccgcatctgcctcccaaagtgctgggattacaggcgtgagccaccgcgctaggctgcatattggctttttaaaatttcacttatcacttaacattatatgatatgcaatttaaatgttcttaaatattcctgaaaaacaagtttatggttgcacagggtttattttctaccaaaaccaaatttgactatcctcctcctagtgttagatattatgttcaacttttcaccataaaaaacaatgcataacttgcaaaaaccaaaaaagaattattggctgcaatattcaaatgaaatgataaaaatcaaaatcaatacatgttgaagtaaatgtctacaaaatacactattatatcaaattaactgttaaatttaattcactattattatttttttaagacagagtctcactatcgcccaggctggagcgcagtgttgccatctctgctcactgcaacctctgcctcccaggttcaagcgattctcctgcctcagcctccctagtagctgggattacaggcgcccaccaccacatctggctaatttttgtatttttagtagagatggggtttcaccctgttcgtcaggctggtctcgatctcctgacctcaggcaatctgcccacctcggcctcccaaagtgcagggattaaaggcgtgagccaccgcgcccggcctgttaaatttaattcataaaattgttttgttacatttgaaagcaatttgtgagttgaatgcttactcatcaggagcattcctgaaaacggacaggacagtgagttgtaagagccaaacgtgaattacaaattgagacagccaaattgcaagagccaagttaatttttaaaaacactttctgtatcttacggcacaacaaaacacttttactacaaaacatgtattgtataacggatgtggctgcgtttgacagtttgagatgacactgaggagtgtgaaagagagcctggaccttcaaagcttgcaaacggcccgggctatttctccacctcttcgctactcaaagcgctggcatcgtttcctgggaacctgtgagaaatgccgagtctcggacccatccagagcgcccgaatggaaacctaggcgttacgaggccccaggttcagcgtctcacgggtcctgcaccacctgggacgccccgcaagcagcgggcatgccgggcccccagaagactccgaaagccacccattccctaaacggggagggcctcgtccgcgcgtcccagcgccctccccggaagccccgccgctcccacacccaggatggggccacatgggcactaaaaggcgggcaggagcgcccagtctcgagatggctggctcgcctttccagtccgggccctcggggtgcccgtgtgaaaagatgtgacactgaagcctggggaagaagtttgaacctctcactaattcacgtaacgggagccgccggcagcgctgacggctgcacctcccctcccacgcggacactacctgcaggatcggacgacccccagaactgtttgccaacaaagacatgcagggggcggagcctgagcgtcagataccgtgagcggcgtgcagagggcggagcctaggagtcagataccgcgagaagtagtctcccgaagaggttcggacaagcgcaggcgcactacaattcccgccctggccgcgaaggtggcacccgcagcgggaggcggggccgggccttcgggacaaagatcgcgagatttaatggcgagtcacagctacttcttcctggcagagaccggaagtgcggtccg

SEQ ID NO: 6185 - DNA, 2300 bp, Homo sapien
atatcttcatgttttaacatcatctattatcagaataaaaagcctttgaaaatcaaatgtgatctttctctaaagagaaatctcgacaagttaataggcattacaaactgaatttaaaagcaaataagagttttaagtgagggtggaggggcaggtaaaaatgccactgattaatatttaccttgaaaatggcttgcttttcttgctgttgccaagaatggtagttcctgctggccctagtttggcactctctcgtaaccagttggcaggtgggagtttcaagtctgttttctcttcaaggcgtgcaaatgctgttcgaggaggggcagaagagtatttcaccacagctcggctcttcacttcattgcctccaagaaataaagctgatccctaattaacacattgggtgaaactttaatgaaaattactaagaacgaaaaatctcacctttataaaaagaaaacaagaacctgtcacaccaggcttcacaaggaacgtatgccacatgttactaacagcacttaataaatttgagcataaatggtaacatttacttagttcttttacaccaacttcaaagaaaaaagatgagtcaaggagtatgatggttatggttatcagctagaaaatggaccacccacatctcttttaaaatgtattcatgtaaagtggagaagcagaaaccaaggagactcaatggtatcatgttaactagatgcaaactttagtaaagcctattttcagtattaaagatgtattttaattctttttttttttttttttgagacgcagtcttgctttgtcgcccaggctagggtgcagtggagcaatcatggctcactgcaacctcggcttctggggtttacgccattctcctgcctcagcctccctagtagctggaattacaggcgtgcactaccacgtccggctaatttttgtatttttagtagagacagggttttgccatgttggccaggctggtctcgaactccccgacctcaggtgatccacccacctcggcctcccaaagtgctaggattacaggcgtgagccaccgcgcccggccaaagatgtattttaattttaataacacatcattcataaaatagtctggtagaacatttgggctttttgttttaatgcaaatatttagtaatcgatgcatcggttcatgcatgcatgcatggttcaaatactcttgagtctctaacttcatagaaaggcattgggggttcgttcctcacagcctgcacttgcacactcccaaagcaagttcggcgtctgggttcaatattctaacctttcacgcagtacctcttctgcatggcaaacattttacaccctttgtgaattagttcggtctcattctcggcgagtcactacctggcaccgtttcttccctcctgctttgcacgactgtgccacgttttggaacgacatatttacatgtaccctccttgagaggaaagatcgtatctaattcacctgtcggctaccagaactgcttttaatacgaatacctgccgactggagcatggacttcaactccctgttttgggggtgtcagggaaacatggagaagcctccagaatctgccgggaaccgtggcatccctccccggtggagcgggtcctccgctcccacatccctggcaggtccccctccgcggaggactcacctgtgcagaagattcctcggattctccctgggacaggaggctgagccctcctcgagcggcggccccggccggcggaccctcggctccggcctccttggcatcccccatcacttcgatccagggcaggcgatacgacgggggagcggaggagcagcagcagcaacgcaggcccaaagcagggtaagcgccagagacgctccgcggaccgcacttccggtctctgccaggaagaagtagctgtgactcgccattaaatctcgcgatctttgtcccgaaggcccggccccgcctcccgctgcgggtgccaccttcgcggccagggcgggaattgtagtgcgcctgcgcttgtccgaacctcttcgggagactacttctcgcggtatctgactcctaggctccgccctctgcacgccgctcacggtatctgacgctcaggctccgccccctgcatgtctttgttggcaaacagttctgggggtcgtccgatcctgcaggtagtgtccgcgtgggaggggaggtgcagccgtcagcgctgccggcggctcccgttacgtgaattagtgagaggttcaaacttcttccccaggcttcagtgtcacatcttttcacacgggcaccccga

SEQ ID NO: 6186 - DNA, 2300 bp, Homo sapien
gatgaagaagtagcctattatataaagttttaaagcatacagtcacagtttccaaaccaaggcttttaaatgcttttaggttttcatagtagggggaaaaatacacgtacacattgtaccaaatattactcagctttcttatgccaccatagtataaacgttttgggggttgtgggtaaagtgtaaagtttagtattttgttgtttcttatagctctttgttggaaagaaacaagagcactcctagacttgagtcttgcagacaacgatgaaatgggcagtaaagttgatataaactctttttttagggttgcttgcaacatgatgatgaagaagaatcaaaataagaaacactatggaactattagaacattgcttcttaattgtctgaaattactggacaaaagtaggcatcctcaagtaagattaacatttatgtattctctaaaacaatcctagcattctaataggagattgttacctagacagtaaagcctcctgattcatattccgtaactgccctattcagtgtggtagccattagcacatgtggctgttgatcacttaaaatgtgctttgtctgaattgacatgtgctgtaagtgtaaaatacacactgaattttgaagattggatgtctgtacctattacatgttgaaatgcaatattacatatattggattaaatatatttaagttgatttcacagattctactttttaaatgtagctactagaaaatttaaaatttctgtatgtgactcatgttacatttctctcagacagcactgctcaatgaatttagaattcatgtaattctaacagtagtgcccttagttctttgttttgtcgctattagaccttgttaccactttgttaatataaatagggttcacattccacacttcaggatattaaagcatctcttaaataaaggccagtaaaatttcttttaaagagaaggggaaaaagcatctcttaaaatattccctcagtcatgctcccaacagttttacaccatccttaccctcggttgtctgattgacaactttatttttcactgttaaggctatttgttgtatcctgttcaaatcagtaaaggtatgtaagatacgcaatttttctttgaagagccaaagtaattttaattgtagccacatttgatttagagataaagattatcctagagaccaaactcagaaatgtttttgaagaaaaatagtaaaacattttgtttctgactgaaatacctaattgctgactgaggtggcagtgtttagtggaacttgagtggtttatttggatgttagaaatggtgttaaagactattgtctgtgattaagaactgataaatagtagaatgggttaaatggtcatatataaatgctaattttaagagatatcagaatggacttttccctttttaatgtaatggttttttttttctagaaccatagattatatgataaatattagttacctattatagagaaacttgaattaatttatagtttgtaaagaaaaattctggtttctcacttggcatagggtggtattaaatttttgttaatattttagttatgacactctgtactcaaaagcttttgtttgtctccagtgaaattcagttgacaccttttaagagggagggctcagggtggagtaatttcgggaaataggaaatgcatcagcctataaagattttgcagagcatacccagagtatcagtagctttgaactgggaacatttctgtgtgtgttacagtctatatggtggaaacagcctgtgtgcagacctcctcctaaaattcgttagtatggtagtaaaattcatgtattttttgatgacagtaatttacacatatttctctctttttcataagattattgcttccgccaattacatgctttcagaactttttcaattggatgaacctaaaaaggaagaaaattcagaatctcctttaaatgagaattctgatgaaagttatagtgaagaggaggaagagatgcccgacagtgatgaaaatggatcctatagcaccagctctgatccatcagatgatagcaaagcagtagctataatcaagtctgttggagaactatcagtaccagaaaaatacaaatctattcatcaaatcagagtaagcctttagaatttatattaaatttttatcaaggaaacataattgttaatcgaatatagttagcctttcaaaagataccattacttcaataaacctttcatggtctagcatctagtaatcattagttttctgaattcttaaagttggttttataatt

SEQ ID NO: 6187 - DNA, 2300 bp, Homo sapien
agttatataaactgtaattttcatttagaaagaaaaaaaaaaacaaaggaaacaagtgcatcatcatgctcagcctgagtcagaaagcagcagcacggattggcttcttgtagccttgagatgggaacacagagtggtcttcagtctactcggaataactttcttcattgaaatattttcattgacttacttttttcatttcctcataatattgtctctttataaattatcccaaaattaaattaacatctgggtagttgtgaagtgtgttttattttaatgcagtattggtatatgtttaagctgagtcagaaatgtacactgttttctcctttgcaggctattgattactatttgaaagcgctaaggtcattgggaacacgagacatacacccagctgtttgggattcagtgaactgggaattgtccactacttactttactatggcaactctacagcaagattatgctccgttatctagaaaagctcaggagcaggtgataatatttgctggagtataaaataagttctcaatctaattcccttgtttaacaaatatttagcgtctgttgtcttttccctaataagcagtatttaaacgttttaaaaactcctacagtcagattagaagcttatttttttcttccccctcaaaacaagaacagattgagaaagaagtcagtgaggccatgatgaagtccctaaaatactgcgatgtggattcagtgtctgctcgacagcccctttgtcagtatcgagctgcaaccatccatcacaggctggcctccatgtaccacagctgtctgaggaatcaggtattgtcagtccaagttaagtacagtgccacatcagtttaaaagtgttctgggtgctttttgtttttttaacatggtcatatatgtcttccttgacgtccactcaggtgaactgctgtcctaaattttctgctgcgtctgtgcctttttttgtgctgtgccacttaaacaatatgtccgcattgtgctccatgttgagcatgggaaaacgaatccgctgttggtgttctgtggcttactgcctgtcacttaacatcgtgtttttgagatacatctgtgttggcacacgtagctgttcattttctcagctcagtagtcattaaatgactatatcttagtttatctagtctatgattagtgaattttggggttattccagattccagtttgatgctattagaaataatctagtgccagcaggattgtacatgaatcctggtgcccaaatgcctgtatttctgagaataatctgaggccgaggataaaggcacttccttccgagagattgcttggcttttgctgcgagtcttgggcctgtagtttctcagtgatgtttttttgtttgttttgttgattttccccccccgtaaggtaagactacttaccttacagtccctttggcatgagtttacttctgggttgcctttattctgaaaagtatcttttgagatacagcttaaactggagaagttctttttctttttttttgagacagggtctcactctgttgcccagactggagtgcagtagcacgatctcagcttactgcaacctccgcctcccaggcctccccactcttttgcatatagatatctagttgtcccagcaccatttgctgaaaagactactcctctgctgcattgtcttggcacccttaagcttgcttttgccctcaggatattaggccatctgggcaaacctgaattttggttgaggacttcctaagtcgaagtggaaagaaatcttctccagttcatgcctgtaatcccagcactttgggagccgaggtggttggatcatttgaggtcgggagttagagagcagcctagccaacatgacaaaaccccagaaaaaaattaaaaaattagccaagcagtagtggcgggtgcctgtaatcccagcaacttgggaggctgaggcaggggaattgcttgagttcaggaggcggaggttgcagtgagccaggattgcaccactgcatctccagcctgggcgacagagcgagaccctgtctcaaaaaaaaaaaaagaaaggaaatggattaaagacctaaatataaaagctaaaactaataagacctagtaagacccacagtgggggaaaaataactaagaagcacttagtgaagcctgaagtagttaccgtgaaggatttgttgcttgttttggtttggttctaggttggtgatgaacaccttaggaaacaacaccgggtgctggcagatcttcattacagcaaggccgcaaagctgtttcagctgctga

SEQ ID NO: 6188 - DNA, 2300 bp, Homo sapien
tcacggagagggaggtcagagcaatgcaccagtcattcacagggatgccagggtccaggacaatggaaggacatggaatacaggagaaccctgcaagaaaaggggcgaatgcgtcttggggagaggacagctactaggaaggctggaagtgacccagaaaactgtcatgaggctcacaggagcagggcacttccctgagtggaggcagccatcagggacaggaaaacccatcctgctctttgacctgtgcagccttcaccagggaggaaagggcaagctgtagtctctactggagacaggtgttagggaatgaggagcatgttacaggtccttctggggacagactaagcatttagtggcctgtattagggttgtctaactgctgcacccaccaaccccaaatcttaggctccacgcaatacagttgtgtttcttgctcctgtcacagagcagtcaagggtttgagggtggccttccacagggggattcagggatccaagccacttctgctggaggctctgcgtctggtcaggagttgagggaagagaaatcacagagaataggagggtggtcttagagttcaggcctgcaagtggcacacatcactctatccactttttttttccttttgaaacagggtctcattctgtcatccaagttgttgtgcagtgacgtgatctcggctcatttcagtcttaacctcctggacacaagtgatcctccagcctcagctcccctaagtagctggaactattggcacgcatgccactacacctggctaatttttgtatttttagtagagatggggtttcatcatgttgcccaggctggtcttgaactcttgctggtcttgaactcctggattcaagcaatccacccaccttggtttcctaaagtgttgggattataggtgtgagccaccacgcccggccgatgccaagctaatttttaaacattttttgatagaaatgaggtctcattttgttgcccttgcttgtctcaaactcctggcctcagtcctcctgcctcagcctcccgcaacgctgggattatgggtctgagccactgcacctggcctctccgtatttctatgattctcaatattcccatggacggctgtgacccagtcagtctgcactctcaggaggacatctgctcagataaaagcccagttcaggggctctgtcttcaggatcccaaagaaacttgaggcttctccatgaggggaaaaagtagtgggctgaggtgattctagtttatccttctataaaaatctttacccacagaatgggacgctgtgcagtcattaactagaacgataaatacttacattcagaaacagaaaagtgcctgtaacgttgtgctggcttgtaagaacagagaatagagttcatgtaaaatgagagacacacacaaatacttctctaggcatctgtgcatatgtatctgcaagaatgttcactgaaatgtcaccaccggaatcacagaatgtctccttcattctcagtacttttacaatttatactatctgctcagaagatctcctttatataaagataaacaaaaagaagaaaagccacacaaaaaatgtgtgagaaacaaactaaaaatctccaaaccccagttcaccaagaaaaaaaaagtgacccaaactgtaagcaaactaacggtcagggtttttaaactcaggctcagctctgagaggcatgttgttaggggcgcagtctcgtgcctctgttaattccacagctcatttagcggcaaacttgcccgcagtatatctccatagaaatggaacccacaggcactggcaactggaggatgtaattatcggaggacatggcaaactctggaggctgagagaaggagttctcacaccaacaagaaaggtgagcctggggtcttcaaaggcagcacgcccagggcctgccacgtggcctcctagcgggcacacttcagggctgggtgagaaatgcttggaaacctgggtgctccctcctgcgtagcttataaaagccaccctaggtcctgctccttaaggagaggtgacggggacggggaagaagccaggcagggagggcaagggttcagaccaggccaatgctcgccgcctccatcttccgtccgacactgctgctctgctggctggctgctccctggcccacccagcccgagagtctcttccacagccgggaccgctcggacctggagccgtccccactgcgccaggccaagcccattgccgacctccacgctgctcaggtaggaggaagctggaagaacagcaatacccccaggcc

SEQ ID NO: 6189 - DNA, 2300 bp, Homo sapien
aggacctgctgtatgtcgtttcacttacagtggcaatttccaagaatctattgttgacattaagtgaggacttactgtacttggtctacataaaatctcctgagaacattatttggttcaataatatatgcatattttaataacattttaatttttattgaaaaagcaaagatggttggcttgtggtttgataccttgcaactcagccagccatatcctaggaaagccttccatttggctgcccaaaggtcaggtgccccaactttcccatctgattgcaaagttggacctgggcgccatttagtaggcactgttgcttggccttgtaaacccagaccagtgatgtcacagaagatagcttagcaattaacaacttggaattcataacacagaaagactgtaccagcctgggcaacatggtgaaatctcttctctaccagaaataacaaaaattagccaaacttggtagtacattcttatagtccctttaactgtggcagtcagtgtcttaacctctcaaatataaaaaatactctctggcaggtttatttaacacagttggagacaatttgaagtttcactgtcagcttttacttgggcagggcccttaagatgggcttacccagccagagtgttggttgaaatgttgtactgacttgaagcagagtcagtcttgccacatgcagggactgagaccttagaccaaatatgcattccccaaacatttcttgagagccatctgtggactgtggggtggaccgggtagccccagtctctgccctcacaaatagagctggccactgcttaatagcttccttccctctcaagtacagtagtaattgttctgttcacagggttgtggtgtgaggatcaaatgagcaagtgcttactttgtgatcagcaaagctatatatgagagttaatgttctggttatggttattattgtttcattacttgggaaaaatgcatatttatgtcaatattgattaccagcgtcactgctaagttcttatgtctcagttcagttcctgtgggatttttacaggtttttttgtttacttttgtttttgatgcgtttagctcttctaagctcagacaggaggtccagcctcggttgccactgtagcataagcaagggcttagttcctgaactgagttacagctttatttttcttttgattcagcatgtttttaatgatccataagttaaaagctgctggtgtttttattaaagctgccatttgttactaaccaggctctgtgtgactcctaagtggaaagcccacagcacttccttcctcagaggcattccacattcctgtgagcaggtagcagtgttgactgagccagtcccttaggcctcccttcatcagcacgctttgtggagtggccaagtgtttgctgtctggaaaagtgcagggggagcctgagtctgttagcttcttacttggttcatgaatagggatctcacaaaagtgctggtatagcccctcatcctaaatgacttgtatttgtagcgctgtgggtccctgttagcagattattatgaaacctttcctccccttccttccattttagtctggccatgtcaagccataacacctttctggatgtggtctggccacatcctcccaaaaaaatgaaggctctgtaatgccgattcctgcaaaaagtaccaaatgcccatcatctccttcctgactgaagagaaaacagcctttgttgagcaccttctagatggcaagcactttgctcttattatctgacacgatccttaaaacagttccatgtggttggtttttccccctcttgtagatgagctatgtggggctcagggaagctagttaaggccttacttacccagcctacacaactggggtgcaggtaccaggacctgatgctttctcttctgaacagacacttgtgatcttccctcagtagctttcaagaaaagacatcctctatgtgatttgtaaactgcatacctgtgtatttgcacgttaaaaaataacgctggaacaaaaggacttcaataaccgtgttaagaaatacatttctttgtggttttccagtgagtaaaattggcctggatacagaaggagaaacctgtggaaatgcagaaaagcttgcagaatatatttgttccagtaagtagaaaaacatcactccaaatgaagccatttattttttgttgacctcacaaccactacctagggaaaagaatatttcctcagtgcattcttggtggtgagattgattggtgagcatcgtataacccactctgggagcatagcctatt

SEQ ID NO: 6190 - DNA, 2300 bp, Homo sapien
aattaataaagatggaaagtagaaaggtcatggagggaaaataagggagttgtttaactacagtttcaattttgctagatgaaaagagttctgccaatggatagtggtggtgatggttgcacaatgtgaatgcacttcatgccactgaactgtatctttaaaaatagttaagatggtaaaatgtatgttatgtatcttttaccaccataaaaaaagtataaagaaacaggaaaaaaaattggctatggtatctcagtgcaactctgttgatatgttcacatggtctttctgagtcttttttctaatcttagccttttgatgggtcttttttgacagcttcctctcttctccattacaggaacatgtttttgcagttgtgcgacccaaagaggccatttcaagctgccccatcagatgtggagcgctgatgtgtaagtattactttaatatccatgacatggctgggtagacaagagactcccaggaaagaccgaaatcacagaacacgattatgggcaatctgggctcctggggacctttagggcacgccatctcgtactgatgaaggatcactgatttatcagatgttaccctgcttaaacagaagcagcctattagcgcagctcacaccattcctagaatcaaacatatccaacccacccccctcattttacagagaaaaatcaattgagaaccgcagatcttattcctagaaagctgatgaaccctgtttctctcgcaatgggaagacctggctgccccaggctgcatccccacctgccacaggggctggcgctcgctctgcagttggccgcagtcccctccactcttctctccaaataggctcgggtctttaacctagactaccccactggccccgaagcatttttttttttttttagatagggtctacctctgtcgcccaggctggagtgtggagtgcggtggcgcgatctcggctcactgcaacctccgtctcctgggggcatgcgattctcctgccttagcctcctgagtagctgggactacaggcgcgcaccaccacacctggctagtttttgtatttttagtagagatgggatttcgccatgttgggcaggctggtctcgaactcctgacctcaagtgatccacccatctcggcctcccaaagtgctgggattacaggtgtccgccaccacgcccggctaatttttgtacttttagcagagatgaggttttgccatgttggccaggctggtctcgaactcctgacctctggtgatccacccgctttgacctccctaagtgctgggattacaggcgcgagacaccgggcccggccccccgccgaagcatttttaactgcggtgccggctttaaaaaaacttttaggtcaagaaatgcgctccagaagctcggcgagggtaggctgggcaggcgccttccgtcaccggcgcagcggtagcggcagcggacatccccgcctgggcaggcccaggtccgcggaagcctcggggccctggccccactgtgtcacacaccgcccggggccgggcccctgcacgcccgcgggcttcggcgtccgtaccggtacagcgggcggcgacacctacctcgcgggaccgtgcccagcacccggcctggcacacagcgggcacccggtcggggggcggtgtcgcgcagtcccagcgaaaaggctgcaggagcaatgacaacaggggcggaagccccctccccacgcagcccgaggggccgcggcggccacccgcgccgggccccaggaccccgcacctcagactggggtcgcgtgggtggctgcgcgcagctaggcgctcgcgcatgcgcaccgccatccaggccacggaatgaggccagaggttagatgggttgaaccactacgggaaggggaggggaagctttgggaggagtgatggagggtggaaagcggaagaaaaaagcaagatgggaccgcaagctggacgtgactgtaaggggtcatggctgcggaatccagcaggggcattggggttgacgtgcactcagcgccgagcttcttcgtagttcctcacccccttggctactatgggctggtccggaaggtcaggcaaggggaagctgcgcaggcgcagtgtgagcggcaacatggcgtccaggtctaagcggcgtgccgtggaaagtggggttccgcagccgccggatcccccagtccagcgcgacgaggaagaggaaaaagaagtcgaaaatgaggatgaagacgatgatgacagtgacaaggaaaaggatgaagaggacgaggtcattgacgaggtgagaaggaca

SEQ ID NO: 6191 - DNA, 2300 bp, Homo sapien
tcggacctctgtcccagactattatggcaccaccagggaaatgggcggcaaatggattatctgtccagcacccttttcctgggtatgggctcatctccacatggcttcagcaggaacagtcacgtttgtagaaaagagccctgtccctcattcccaggtgatttagaattaagactgtggtggtgtgatagatttcccatgttaacacaagcagcattgatttctataacccaaaagtaataaaagagccagtcaaagttctaagtgaaaaatggtgagatggcattcaaggcatagagccaaagtaaaatttgtaagggaaggaagattgatcacatacccacaccatggtgtcacctctaatcctgcatccatgcttctctccatgctcccctccatgctcatcatgactcatgattacctctctgattttatttcctatcactctctcttccttattctgatccagccatctaggctgcctttccgtccctcaattgtgaagactcttgattttcttgtaaatgaactagaaagccaatgcagcaatctaagcagaggcctgagatcagacctataagatctctctgactgtaagtggagtatagactgattgtaggggaacaaaaatggagaaaagaacgccggttaaaagctgttacattaaatagtagtccaggcaagagatgatagaggtgtggactacgatggtctcagaattagtgctgagaaatgtctggataacaggatttactgatgggctggatataggatgaggaaagggaggaattaaagttaagccccaggttttgggttagagcagctggtgactttaggggccatttatagaaatggtgacgattaagagaggggcatgaattattatacaaattctgctttggacaagttaaggctgaggtatctatttaaacattcagtaggctgaaggatcattcagtcctaattgtttactaaacaaataataagtacctatattgccaggcactacggtaggacctagtctgaagaaaggaacacagttctatgagactatgaaaccaaagatttacccacgacttggtcagctgccccaggagccagaaaatacagcctagctgagatctgaagaaggaagggaaaactgcaggataaagaagagcatttgaaaaggcttctacggtagaacgcggcaagagccttcaagaaactgagggcccaagtgagtgccgcccgcagagtgaagaggaggacagctgctgccccgaggggagagggccccctctgcgagcccggggtggccgattcaggatctgaggcttcagcctgagaactaaagaggacgagaagaacacacctgttgtggcgggctttttcggggaggacgcgggttgggagattaactggaccggactagacctttaaaaaataactactatggctgcagtgtgttaaagaccgaggagaaacctgagaaagaacttatctccagtttctcctcacagaccctcagggtcagggaagaccctacactatttttacacagcctgggcttgccaaaaagtttttctcaggtataaaccaactaggggagcgtgtccttctcacctcgtcaatgacctcgtcctcttcatccttttccttgtcactgtcatcatcgtcttcatcctcattttcgacttctttttcctcttcctcgtcgcgctggactgggggatccggcggctgcggaaccccactttccacggcacgccgcttagacctggacgccatgttgccgctcacactgcgcctgcgcagcttccccttgcctgaccttccggaccagcccatagtagccaagggggtgaggaactacgaagaagctcggcgctgagtgcacgtcaaccccaatgcccctgctggattccgcagccatgaccccttacagtcacgtccagcttgcggtcccatcttgcttttttcttccgctttccaccctccatcactcctcccaaagcttcccctccccttcccgtagtggttcaacccatctaacctctggcctcattccgtggcctggatggcggtgcgcatgcgcgagcgcctagctgcgcgcagccacccacgcgaccccagtctgaggtgcggggtcctggggcccggcgcgggtggccgccgcggcccctcgggctgcgtggggagggggcttccgcccctgttgtcattgctcctgcagccttttcgctgggactgcgcgacaccgccccccgaccgggtgcccgctgtgtgccaggccgggtgctgggcacggtcccgcgagg

SEQ ID NO: 6192 - DNA, 2300 bp, Homo sapien
acttagagacaggacctcactatgttgcctaggctggagtgcagtggtgtgatcttggctcagtgtgacctcgaactcctgggctcaagccatctacctcttcagccttcaaagtagctgggattacaggtgtgcaccagtatgcccagctagtttttgttttttgttttttttttggtagagacggggtctaactatgttgcccaggctggtcttgaactcctggcctcaagcagttctcctgtcttggcctcccaaagtgctgggattataggcatgagccactgcacccagccctgccattttttatattaagaagtatgttttaaattacagaaatattctcaaacattttggtgaaacggcagtgcatttgccttaggtgtgtcacattttctccagccacttgcctagcaccacacctgctgtgaattaatctctgtgattcacaggctgccctgtgtcttggcacttaattgagacttagagccctgaatgtttagcgtgttgtttcctatcacctagctgtcttttaaccggaagacaaaatatgaaataagcagaaaacatacattgagatttacgataatatgtagccagattactgtacagtaataaactatcacaaaggtgtttttaggttggaggttttcctgggaaatgttttatgcagttgtggatcttctttcatttttggtgagctagatgtctgctagatatcgtccttcagtgggtgttgctgttttccgtaactgtgcaggtagttataggaaagttatgcgtatgtaaataaaccacatacattgaataagaatcaaggaaatgaataaacaaaatgtctgaagtaccagatgcacattttttaaagcttttctgccccaaattctgcagattatggccttaaagccctgtatcagctgtgcttgaggagcctaaactatttatctatttctgttttgctctgctttttcccttctgaagattttaaaaattcttttttattgccatttggaacaaaattcaacattagaaccaacttacaagacagccaaaatagctcagtgagagagcattagaccgaagaattcacctatgactaaaaagttttagcagctagaaccaaataaagaattagtggccataattatttttcccacatcttctaggagaataaaagtaaatatttcagtgcaataaaaagtttatcttgggccaggtgcggtggcttacgcctgtaatcccagcactttgggaggccaaggcaggcagatcatgaggtcaggagatcgagaccatcctggctaacacggtgaagccccgtctctactaaaaatacaaaaaaaattagccggccatggtggtgggcacctgtagtcccagctactcgggaggctgaggcaggagaatggcatgaacctgagaggcagagcttgcagtgagctgagatcgggccactgcactccagcctgggcaacagagcgagactccatctcaaaaaaaaaaaaaaaaaacagtttatcttgataggaaattgctcatgaatgggctgctggaatcaaatacccctttccaaatccaggttagctgttaagttgcaccagtgagaagcttgcttgatggactcatctgggaggaatgaatgcgtgtcctcctaaggccaagcagcagccaggttcaggggatgcagctcagctcaagtactcattcttttccttttaatttcttttttttttttttttgagacggagtctcactctgttgccaggctggagtgcagtggcacgatctcggctcgctgcaacctctgtctcccgggttcaagtgattctcctgcctcagccttgtgagtagctgggactacagacgcatgccatcatgcccagctaatttttgtatttttagtagacagggtttcaccatgttggccaggatggtcccaatctcttgacttcatgatccgcccgcctcagcctcccaaagtgctgggattacaggcgtgagccaccactcctggccttccttttaatttctaaacaatccttccttaatatgtggagtaaaatgaagtaatcagaattataagaatggagaaaacgttttgttctcattattccaattggcaagttttcactcattaggatcaacagccatgctgtttgcttggtaaaaaatctgccccaagtaattcaattatatgtggaaaaaggaagtgcaagcaagggaccgtacctgtgtaccagctgatgtgggaccccctggagcggcctctgcccagcttcctgggagccacttagcagacc

SEQ ID NO: 6193 - DNA, 2300 bp, Homo sapien
gaaaggttcatgggattcagcatattatttacatataactaaggtttattgcattgaaaagatacaaagcaacatcagcaaagggaaatagtggatgggacgaagtttacaggaacccaggcgcaagctcacgagctctcgcccagtgaagtcacaaaccgtgcacttcattcacagctcgtgaaatggtgccctaccagggaaactcaggctcagtgcccagggtttttattgagggctggccgtagaggcaccctctgcctagtatgtttcaaaattccagactcccagaaggaaagcacatgtgcagcgtaaaacatattgcctgtacaaatggttcaggcacagcaaactactcttttctgggggagtctcgctctgtcgcccaggctggagtgccctggcgcaatctcggctcactgcaagctccgcctctccagttcacgccattctcctgcctcagcctcccgggtagctggtactacaggcgcccgccactactcccggctaattttttgtatttttagtagagacggggtttcaccgcgttagccaggatggtctcgatatcctgaccttgtgatccgcctgcctcggcctcccaaagtgctgggattacaggcggggcaaactactctttatcagttctgggaatggtgaggaccctccccaaatctaagttcccaaatgctagccaagggctaaccttgcaggcaggcctgtcgaaggatagcaatctcagaattgccatgtacaagaataaataaaagtaaataccttaaatgggtaaaaaacatatgggattggggccgggcgcggtggctcacgcctgtaatcccagcactttgggaggccaaggtggctggatcacaaggtcaggagatcgagaccatcctggctaacacggtgaaatcttgtctctactaaaaatacaaaaaattagccaggcgtggtggcgggcgcctgtagtcccagctactctggaggctgaggcagaatggcgtgaacccgggaggcggagcttgcagtgagccgagattgcgccactgcactccagcctgggcgacagagcgagactctatctcaaaaaaaaaaaaaaaaaaaaatgggattggtttcttcaagcagtaatacaggtaaatatgtaaatagtgtcagaaagttattttcattaagcttagtgactaataggtggttattttaattttaaaaaatcatcccaagaagtatgggaaaagcccattaaaatcactaatgacctctccccactccaggaattctagccagttttcatgctgcccttaaataggtggttactttttagatccttctgtttgcttattatttggatgacatcttaatgatatcatctctcacagtgaatcaccaataatagtgtctgtcctaacagtgggctagcaggaccatgagcctgagccaggatggttattcttgtatcctttccttgaaaagtgtataattttactcaaaattctttcattgatgaattcgagaggaaaaattgaccagggtgttttatgatactactttttatgtataaagctcagaacaaaagttagatgcaggcttttattaatatttgtaataaacatttaggcagaggtctttaacttagggttcagaatggtctttgtagggggcagtccatgaacatatacaaactgggtataaatcttgtttatctgtgtttttttgtgctataattctgtagattgtatcaacttaaaggaattttggccccagtaaaaatttagagttactgatttagagaaatgaatataggaaaggcatttttcttgttaggaagttttttgcatgagttagcataagaatattctaactttaatgtttcttctttataggtattgtactgatgatatgctgcaaagagaaatgatgtccaatccttttttgggtagctatggggtcatcatcttagatgatattcatgaaagaagcattgcaactgatgtgttacttggacttcttaaagatgttttactagcaagaccagaactgaagctcataattaactcctcacctcacctgatcagcaaactcaattcttattatggaaacgtgcctgtcatagaagtgaaaaataaacaccctgtggaggttgtgtaccttagtgaggctcaaaaggattcttttgagtctattttacgccttatctttgaaattcaccactcgggtgagaaaggtgacattgtagtctttctggcctgtgaacaagtaagtaagtgatactctaaccttacagtaataaggtatttcat

SEQ ID NO: 6194 - DNA, 2300 bp, Homo sapien
gggaatatcttggaagtgattcagtatcacttaactgcattattttagtcatagtgacactggtcacagggccagctcagattcaaggggagaggaaatagactctacctctccatttggaacagtggcaaataatctgtggccatctttaattccactataacagagaagtggttaaggctaatgtgtgtggatacattgcacaatgtgtgatgaaggggccaggtaagtctcaggtctttagaaagaagactattcagaaaacttgattatttcctcagggttcaaagtggtcagtgctttataagtaagaatttactgtaattataagattattacactcttagggagtattataaataagagaaacatttctttttggtaaaaataatagctgttctttttttaaggtaaaacagttaagaaatactacctaaggcaatcattggttataatatttaatagcaatttaatttacatgtaggctgagaacccttggaagggattctaatcagaacaaaagaaaaatagaatataaaattaaattttaacttctctgaagagtggaattttctgattcttggataccttcccagaattagcttgtgcgatgatctcaagctaccatgcttcctggagctattctgtgggtctactctcaccttatagaggcagtgaagagttctgaagtgaatccatattacaacatttctattatgcctttgtaattccattttaattttgaaacactggcttttagatgaatttttaagaactttacttgggaagagctatgaagttcttctgcctctctggttacttacctctaaactagcttgttcatctgtgaattttaaaactttctatcctgctcttgctgccatcttcaaaatatcctttatgtgtgtatctagtgcctagtttactcatctaataagcccttagaagacactcagcaaatgttttttgagtgattgactgttgccctggagcctgtcttgaccaatagagagagagcttttcttatcacttactaattaggaactagctgttgagcacactggctccaaccatctaaagcaataattaaggtaaaccaggtgatccgaaaagtgcagtaacttacaaaatatcatgaactgtattttattattctttttaacttgagttttctttttcatttttatctggttaatgtgaaaaggagcttatttccagcaacactaatggaatttttctttttaatcactagtaattggaaggggaaagacccttcacctgacatgtggggactgagttattggtataaatcttgctctttcttgggtgatttctcttcttcatttaaattaaaagttgtccttaatggcctcttggagctgacatgttgggctcaagacccaggaatctcaagaaatatgctagagatttctggtttaattaaacaaaagaccttattaataaaagccagccagctgggcatggtggctcacatttgaaatcccagcactttgggaggccaaggaggacagaccacttgagcccaggagttcgaaactagcctgggcaacaaggcaaaactccgtctctacaaaaaaatacagaaattagctggacatagtggtgtacacctgtagtcccagctactcaggaggctgaggcagggggaaaacagcctgggaggttgaggctgcagtgagccatgatcacgccactgcatccagcctgggtgacagagcgagaccctgtcttttttatatatatataaaataaaagccaaccataactacatatggaaggaaataataaattcattcccctcacttggctttctaaactgacataagcaaaaggaaaatgaaaagttttaaaaatgtttttcattaaagtaaaggatttcttaataatagattttcctgtagcctgtgttagaggaacactcaccaggtcatcacagttctttccttttatagggtccagctcctcttttgacatgggattaggtgaccacgtgattgattagcctcacaatcacaatcctgtccctcctgttgctttccattcacagttgatcaagacgcagagcctgagatagaggtcaggcagagagcacgaggcccagtgcagaatcattttctgaaccagccaggaaataccggaacccaccaaactttaaacaccagcctaaattattcctgttcttttaagcaggcagcagaaatgacagaaacccgttaacagaaaaaaaaaaaataatgcttttcatttgaactcctgtgcattttctttttaacttatat

SEQ ID NO: 6195 - DNA, 2300 bp, Homo sapien
ttctttcacaggtaccctgtcccctaaaatcaaatgttgcttttcacagttgcctttacttgtcacctaaagtatttcaattcaaaatttcctcaaagtcaacttaacagctgctgataaaataatcattctatatgattacaaagtgtttcaccaatacatatccccattttttccaaacttaaaacttcttcagtccttattactttagcatagagacctgcactgttgtttcttctttttaaaaaaatactaatgctaatcctttactgtttgagcagacttaatcctaccttttcttttgtcaataaatgccaggtgttttttaaatcactatcttgtcacttttgattatgatatactgatcactctatttgtatcttgaatgaaaagaccgctttgtgattttgctaatgatatgtaaactagaacttgagaaccactggatacaggagtactgctgatctttatactttctgtctaaaaatgaagcccctgtctctaaatttcaggaacagggagttaaggttccatgaagtgtttactttccacccttaatttattaccttaatacttcagcttaagaattatgtgttctgtatatatcacgctgcttgtcaatatccacacataaaccttcttgttttgacaattaatctgaaaaagtccccatatagtctgagagggggaaaacctaatttggaagaatataataaatgtcagtttccatcacagaatatatgcttctcaagttcaattaacctctcaatgattccctaagaggaaagtaattctccttagtgtccttgtcatccatggagtggaaatctttctactggcaagattagtaatcacttccatgacccccaaaacggctcttccttccatttccctcaagtactgtctggagcagcggttggaattaatagaggggccataatctccagacctgaataccaaatcaatcctgcagccccccacacccttaatgcccctgcactttcttgcttatcctttttctctcgtctccatttttctttcctccttctggtgttccggaacctatgatactctcctggttgtttgaatttttacaacctaccagataataatctcttgtgatcctcaaagcttccttaaagcaaaccctgaatcactgtgttttaaaaccagtatgaaagactattgtgtgggataatgttacattgtttcacagccctacaaagtttggccacaaaacgtgtgggcagattccgtaactcaaccggaaacgcgaaggactgaaacaaatcaacacacaaaaaacgaagccagcgagaaagatccaacccgggccccctgcctgaaatgggacacggggatgacggggcaaagccgggcaaaaccgtgctcctggctctcgcgattcaggagacgcgccaggctcactggggacgacagcgacgacggcggcggctcgcattgctccacgcttcccgtcaggggggctcgagggaccgccccaggcccggcccatgcccgggctcggagggagcccctggtgcgagggctgcccgcagggctccgtcctcccgctgaggcgcggctcccggagcaggaggcgcggaggccgccctcggcgtttcggagtcggggcggggaacgtccacggccaactgcgggcaggggacccccaggcggctacaacaggtgcgccggggccgcccacccggctcggggcgcgcccgcccctgcgccgacccccgaccccttccgccgccggggccccgctgttacctgcagcggcggctcccgattcccgggagggcggcccagggccggcgccttacccgcgggcaggcccactcgcccgacggacgccgcgggtcggcgacagcggggaccgcgggtcggcgacgtcggggcacaggtcctgcggggccgcgggggccgccagggagggcgcgaccgcctgaccgggcttcaggagcagtgtcctcagccggtgacctggccgctaccctcgctcagtgtccccggcgacgcgcgggtcctcacgcgctccctcacttcctgcggcttttggtccctcccgctcgccgtccctttagttctgcccacttcgcctccgggttgtcagggcaaccgtagcgacgccggccctggctgagaggcgttaggagtccgggggttcgcccgcggaggccggggagcagccgaccatggagccccagagtaagggaggcccgggctggagctgggaccggggcgggcgaccgggctggggctccccgggaacgagtgtgggcgccccgcgcgcg

SEQ ID NO: 6196 - DNA, 2300 bp, Homo sapien
gtctcagggcctatgtacaagtaattcccactgcctggaatcccttgccctcattctttgctgggtcattctgcagacccagtactacttcctcttgggagcctttgtccatctcctcttcccccaatctccgaaccccaccaagacctcaggagttcttgagcaagcctctgcttagttttcctgggatgaccaaaactaacactgtccgatccgttgttcaatcctcaatccctagaacagagctgcaacataacaggcactataaatgaatgaatggataaagacagcactgaagaacttgaaattatagtttacacatgaaaacagtaacataaatctgaagaaataaagttcttttttttgttttttcgagatggagtctcgctctgtcaccaggctggagtgcagcggtgcaatctggcctcactgcaacctccgcctcccgggttcaagcgattcccctgcctcggcctcagcgtcccaaatagctaggactccaggcacgcgccaccacacctggcttttttttttttttttttttttttttttttttttttgtattttagtagagatgggtttcactatgctggccaagatggtctcaatctcctgacctcgtgatccgcctgcctcagcctcccaaagtgctgggattacaggcgtgagccaccgggccaggccaagttgctgtttttaaaaggtatatttcaactcacttctctaaggcgggaatatacacagcctgccatcagtttgacataaaacaaaaattttagcgttcttgtatgctaaatttcttttactaggttaaaaaaatgtagaatccaaagagctgtaaatgcaaatgacaaatactgtacaaaatctatcaagcaactataagtcacaacttgcaagctttctcctcagcaaatgagttaaaaggaaaagtatttgaaactttcttggtggaaaacgaatgacctttaaaaatgccaacattttccccagagaatagatttggtctgagttcttcatttctgaaattgtacaagataagacgacttggtttgagagtcaaactgcatccttctataaaggttttagataaattttaagtctccatacaaaacactccccttattttgagaacaaaaggaacaataagacagcttaggcggggcagagaaagaaaggccttgaaacaaagtccctggaaaggtaaaaacaacaacaaaaatagtaagttagagctcgtgtttagatctgataactcaaaactgcacaacttttgccatacatcgaaagcaacatgggaaaacagaaaaagagattacaaacattttttgagtgtcctaacttgtagaacccctaagaatgaatcaaatacacttggacaaagctcttcttttctctctctctccttcaagtcgcagactaggggtgtggggcggggggcggggagtaagacggggtctctaataaatacaagacccagcctcggacgtgtttaattgctgacattttagaagaaaaatgggctacttacaattaatgaaccaaactaccaaactaaaatcatgagtaggaggaggagtaaatggaaccgtccgggcgaagtttcaggaagacgcacgctggggtcgctgcgcccttccccacccatacctcggggctctccagtcgctcccagcccccagcgcggactctagggcgccggcggcccaaccatacagacttggcaggatgtagcccccttctcccctctccaggagagaaaagcgcgaggagacgcaaaccgtatttccgtgtccgagcgttgaaacctgcggagtcgcgcgcggggcgcccacactcgttcccggggagccccagcccggtcgcccgccccggtcccagctccagcccgggcctcccttactctggggctccatggtcggctgctccccggcctccgcgggcgaacccccggactcctaacgcctctcagccagggccggcgtcgctacggttgccctgacaacccggaggcgaagtgggcagaactaaagggacggcgagcgggagggaccaaaagccgcaggaagtgagggagcgcgtgaggacccgcgcgtcgccggggacactgagcgagggtagcggccaggtcaccggctgaggacactgctcctgaagcccggtcaggcggtcgcgccctccctggcggcccccgcggccccgcaggacctgtgccccgacgtcgccgacccgcggtccccgctgtcgccgacccgcggcgtccgtcgggcgagtgggcctgcccgcgggtaaggcgccgg

SEQ ID NO: 6197 - DNA, 2300 bp, Homo sapien
cacgcctgtaatcccagcactttgggaggctgaggcaggcggatcacgaggtcaggagtttgagaccagcctggccaggctggtgaaaccctgtctctactaaaaatacaaaaaattagccgagcatggtgttgtacgcctgtaatcccagctacttgaggggctgaatcaggagaatcactagaacccaggaggcggaggttgcagtgagccaagattgtgccagtgcaatccagcctgggcgatagagtgagactctgtctcaaaaaaaacaaacaaaaagtcatgcagacaattagagttctgtttgaatataatttaaaaaatgaagttttcttcccttagcaaaggtcattctaaagacctttgagtgcttgggaaagcagtatgaacaccctaaacccagcaggcaggtgctgcaccatgctgactgtcttctgggggtctccaagaaatgagggactgtgtgaggacatgcagctgcagagttctggcgccatctcagctcggctgtgccttgccttgggggctggatattccagttatcactcagaggctttgcacgtttccctattgagaagatcttctgttttattttccaactctctattttgaaatatttacacatttagaaaaaatgaaagaatagtacaacaaacacctgtataccccccacctaggcttggcagttgacatttggccatatttgcctctccttttttttttttttttttttcattcttgctgaactattctgaaattagtagatagcataacccttcacccctcaatacgtcagaaaatgtttcctaaaaacacagtcattaacctgcatagtaatcgtgtcatatcacttctaagacacttcaactaattccttaatatcactgatacacaaccaccctgcaggtctcccaacctgttccccaaaggtcttccacagctctatttgggaggtggtgtggggttttgggggtgttgtggggtgagacgttcccacatttcatctggccattctctctctttatagtctctggttctagaccagtcctctctttaaattttttttttttttctcatagcagtgactctttgaggagagcagaccagttatcttatagaatgtcctatgttctggatttgcttgtctcccggttgtggggcaggcatttcacttgttcatctatccctttattaacaataaagttaaagacaggcttaagggctctattaggttgggtgctgtggctcctgcctgtaatcccagcactttgggaggccgaggcaggaagatcacttgaggccatgagtttgaaatcagcgtgggcaataaggtgaaattttttaagaattaaaaaaaaattaaaggcttaattagactcaggttaacactttagcaagaatgcttcagagctagtgttgtgacttcatgttacatccattgggaggcctgtgatgcaggttgtctcacaggtagtgattctaggtttcattattttttttagaatgatgacagcaaattttcttctctgtaaagatacagttttcccattgcacttagaaaataatttctgggataattcattgccatgtgaatattccattccccattaacttttattttttatttattttttttattttttgagacagagtcttgctctctctcccaggttggagtgcagtggcatgatctcggctcactgcaacctccgcctcctgggttcaagtgattctcctgcctcagcctcctgagtagctgggattataggctcttgccaccactcccagctaatttttatatttttagtagagatgaagttttgctgtgttgctcaggctggtcttgaactcctgagcttaggcaatccacccacctcggcctccaaaagtactaggattacaggggtgaacctctgtgcctggcctccccattaacttttacccaatcatttcagtgccaataattttattgcctgaatcaattatttaattgggaattgcaaataagggtttttctaactctatggttccttttatatttattagttggcagtcttctgtgaaaaacagcttccccccaccaactggggatggactacattttatccttaaaaaaaaaaaaaaaaaaaagaaaatatttaatttttaaataccaatttttagagtaagaaattggtttgatagttatctctaatagtgtcaaatgagtattttttttcctttttctcttttttgaatatcatggactttggatgttttaaaatccaatattttaccctcagttacagtcactattc

SEQ ID NO: 6198 - DNA, 2300 bp, Homo sapien
accagatgcagctcaagagatcccaagtagaatctcagttgattttctggattccccatctcaggccagagccaaggggcttcaggtccaggctgtgtttggctttcagggaggccctgtgccccttgacaactggcaggcaggctcccagggacacctgggagaaatctggcttctggccaggaagctttggtgagaacctgggttgcagacaggaatcttaaggtgtagccacaccaggatagagactggaacactagacaagccagaacttgaccctgagctgaccagccgtgagcatgtttggaaggggtctgtagtgtcactcaaggcggtgcttgatagaaatgccaagcacttctttttctcgctgtcctttctagagcactgccaccagtaggttatttagcttgggaaaggtggtgtttctgtaagaaacctactgcccaggcactgcaaaccgccacctccctatactgcttggagctgagcaaatcaccacaaactgtaatacaatgatcctgtattcagacagatgaggctttccatgggaccacaactattttcagatgtgaaccattaaccagatctagtcaatcaagtctgtttactgcaaggttcaacttattaacaattaggcagactctttatgcttgcaaaaactacaaccaatggaatgtgatgttcatgggtatagttcatgtctgctatcattattcgtagatattggacaaagaaccttctctatggggcatcctctttttccaacttggctgcaggaatctttaaaagatgcttttaacagagtctgaacctatttcttaaacacttgcaacctacctgttgagcatcacagaatgtgataaggaaatcaacttgcttatcaacttcctaaatattatgagatgctggcttgggcagcatccccttgaactcttcactcttcaaatgcctgactagggagccatgtttcacaaggtctttaaagtgactaatggcatgagaaatacaaaaatactcagataaggtaaaatgccatgatgcctctgtcttctggactggttttcacattagaagacaattgacaacagttacataattcactctgagtgttttatgagaaagccttcttttgggggtcaacagttttcctatgctttgaaacagaaaaatatgtaccaagaatcttggtttgccttccagaaaacaaaactgcatttcactttcccggtgttccccactgtatctaggcaacatagtattcatgactatggataaactaaacacgtgacacaaacacacacaaaagggaacccagctctaatacattccaactcgtatagcatgcatctgtttattctatagttattaagttctttaaaatgtaaagccatgctggaaaataatactgctgagatacatacagaattactgtaactgattacacttggtaattgtactaaagccaaacatatatatactattaaaaaggtttacagaattttatggtgcattacgtgggcattgtctttttagatgcccaaatccttagatctggcatgttagcccttcctccaattataagaggatatgaactgagtttttcttttgttgtttgttcttagctgtaattcctatgcttctatttcagagagccaggagagtttgatattaaaggaggttaaaactgtgatcttatgccatgtcatcaatggccacttaggggccatggctgatgacacattcttatctctacagtactaatgtgttattatagagccatgcattttatttctgaataagaacatatttaaactaatattcccttacaatatggacagtattaatccttccaagatgcagtatttatcaagtgaagcatatttagcagcaaattccattttaacataacttaggaaccaataaccagggtgttttgtggttgggggaggcacggggtggagtattcttttttatatcctcaaaacaaaaaaaatcaatacttatatttcaatggcaatctagtatttttttaaaagactgtataggcatgaataatagaggtggtttgagttttgtagggccatcacctggaaagtcaatgtgactagacacaaagtagcccagaggctacttttcttcctacagcttattatagttgtaggttctatgacctcacttcatgggttccaggcaattccgctgaaaggtttgtctcctgaaattttttaagtttgttttcctgacacatgtaatcagatgtgtagcaaccgagggaaacgaagcctaacattctccat

SEQ ID NO: 6199 - DNA, 2300 bp, Homo sapien
aaggttggaactcagccttaaagaaacaggctttatctttaacagatctgaggttgggctctgacctacttcactgtgtggtggtgggaaagctacatctctatgctgcagtttcctcatctgtatattcaggacttaaaaaatgaaataatgcaggtgaaagacgttagcacaatactccgattatacgaggtatgtaatgaattatgaagtagtaaatagtctgttttcgtgctgctgataaagacatacacaagactgggtaaaattatacaggaaaaacgtttaatggacctacatttccacatggctagggcagaagacatgaaggggcaagtcatgtcttacatggatggtagcaggcagaaagtgagagagagcttgtggaggggaactcctctttttaaaaccatcagatcttttgagacttatccactaccatgagaacagcacaggaaagacctgcccccatgattcaattacctcccaccaggtccctcccacaacacatgggaattcaagatgagatttgggtggggacacagccaaaccatatcagtaaacaagcctaatcattattaactaggttaagtaactagctcacactgtccaataatgatgatttatcagtttgatcagaaagaaaagtctttgaaggcaagaggctttctcgtttagtttcccaagttctaacatagggttgctcatgtagattgactgaatgaatgaacaaaagaagtacactgcaacgctggttggtagtacggttagatatgacacagggcttgaaccaggcctggtttccagatctggtactgagatatggcagcattgggaagggggctggagagcctgtgcttcccactaaggttttttaaaaagaaagtcctgcaccttgttaggaggatcgacctgggttttgggaacactgcaaaacctgccgtgggagggaactcctgagaaaactcctctgcagtgggaagagatggtatggaaggcagcttcctcaaatgctggataaccgcctcctaggagtgggtgctccgtcaggaatcggtgcgaggtcgcaggaccaggatggaatttctgcaggtggtcctaggtctgagcagcacagtagaatcacctgaggctttgaaaactattgagctccacgcattgtgggaaactgagttaactggtgtctggggctggcaatgtctttaactcttactattctaataagtccccaaggttgggaatcatggtaacccgcagggtgggcatcagccatcctccatagctccagccatttctgtctgtgcgggccccctcgctgctgcttttcatggtctccctgagggccgagcgaggctgaagaggtggggtcagcccggaacaaggatgagaaggcaaggcgcaccattctttcattggtgtttctccaaacaccctgggctcccctggcctcacagcctggagagtctcattctgaaagcgtaggagggcgcccgggaatctttttaacaagccaacccaggtgcttcttacaatcaggaaagtttggggaacgtcactgtacacccttttctgggtccaggtcatggaatggaaacgtgagccaatctatcaacgtaaaacctaacactgttgatcaaaagtaacgcccaggtgtcttgtgcctgcgagtccaagcttgtttctcgggcgagagatgcccctttgggcgcttagggccgggcggggtcgcgcgccgggctgtgggccgcggtggagacctgacccgcactccgagggttcccagagagccggggagcgagtagcagagtcatcgtttccagcttcagcctgaaaagctggaccgtgccgccgcatgtgcgcttggcagccgggcgccccgggccctgcggccacatcatcctggggcggggacgtgtgcgctccgggcgcccggacgccactgagccacgtctgagccgcccaccctcgggggtgagcgagccgcggctcggggcgggaccctggcggggggacccgagcggtctctaggacccgcgggacgccgccaactggcgggggtgcgggggagacaataatttgttccgcggtaataagaacggtgactgctggccgtggatccatttcacaggcctgccttctctcactaacgctcttcctagtccccgggccaactcggacagtttgctcatttattgcaacggtcaaggctggcttgtgccagaacggcgcgcgcgcgcgcacgcacgcacacacacggggggaaacttttttaaaaatgaaaggctagaagagctcagcgg

SEQ ID NO: 6200 - DNA, 2300 bp, Homo sapien
ttgccagctgatacaatgttaggctttgtcagtagagagagctagagagaaactgcaggagaaaagggtgctgcttcccagagacagtgcatttgctcagccagctccagcaccaggccctgcaggtagcatgtgaccagcagcactcatggccagctgcttccccagccccctccctgaggtggtattttagcagtgtcaccaaggagacagttctctgtggatcctagagggcagatctctggcaagttccagaaagacttgtagattctcaacaagttccattggcacaccaccacagaaacttctccaccacctgccgagacactgtggttccctctcagcccagggctaggaggaagactcttcctaggactccttgcatctgctgtacccacctatattcttcagggctatctttacaacttactagccaaccttttgctactctaatctgctattaaggttaatgattaaacatattaaacatttccattcaaatgactgtgtggtttctctctcctagttggacccagactgacactcttgcctgagggcacagaccagggagcagcaatcaatactggacaccaggcagcttccacgcttgacagtgttgccagaccctcgcgtgggcaggagggcacaggtctgatgccgtgtgtgctgatgtgagatctctaattcatactggagggcaaggcagagagggcacgtgtcaggagagaaccccagggtagagttttaaacagtttgcagcagatatgtaaaagaaaggcatttcagaaagaggggacagtatgtacagcagcgggaggagggaaggaagggtgacaacttcagggaagggacagaggtatcaccaagctcctgcttcatccctaaaccttttgtttcattcccagggagaatcctagtaagatttagagtctgcaggatcctaaatcttgttctcaatggttttaccagcttttctcttaccagctctctaggaggcaacattatccactggagcatctagaagcacaagtacttccatgatggtcagaggcagaagaggatgcggagcaggtcagtggtgcctgctgggtcttgggcagcattttataccttatgttatctatcctggccacctacttcataacagaatatataacagagaaatacttgaatttttataataattgcatttatttccatttgtgttgtaaaaactagcttgttcttagcttcccaaacagacatatttataaataatgtgtattataaacatttggaagaacagacagcaaagttggaccattaggctatttcttaacaaaagaactgttttaatggggcggggcaggaggagtattgtagaaaacactgaagttacgtcagagcttccatagaaatggattcttttctctggtgaggaatggggcggggtgactgagggccctctgactgctccaggtcacaaagagatgggctgattgttccacagcctcgggcattgcacccaccggtttccaagtcagcctctagcattgggtggtgtacatgttcagaaaggtttcaaatatactatatgatgacccacattttggcatttgcataactggcaggtgctgagattgaaatttaaaaggagatggatttggatcccaaaagtttgatgtaaaagattccccagggatgtaaacaaacttgcttgtatcaggcctctctgatgggcaggaaacagcaggggagaagaaatcagaagcaaaaggtacaatttagaagcaaaaacattaaggggactgtatccagtgggttacatggaggtggtttccccacaacagattgttgacctattttctcgagggttattgtttctgtttggcttgggtcagtaattcaggaagtgatgttttcctttatggaaaaaaaaaatcgaaagtaaaataagtgttttcccatgatgaagataatgctaagtttaatggcttatccagcattcgaagtcctcccaggtccaggtagtgtggtcagcagggcagcctgtggttagaccgcattcctttgaaggagctggtccagtaattgctagaggaaaagggaaacaaagatgtcaagttgagattcggcatctgtgcaccacacacatcacacctgctggtgacgaggccattacctttttgaagacttcggcacggagtctgttactttgtaagatcacccttttcctttgttcttcttttttctttttaacttccggcaagttatcatagattctgaaacagattcggaaaacatttggaatggtagcttga

SEQ ID NO: 6201 - DNA, 2300 bp, Homo sapien
ctcaattttcatatttgagatttatataataatatagatatgttgttatatacaatataatcatataaattatataaaagatataatttgttatagaaataaactgattacagaaacctaaataatataataataaataatttaatattagtccattatattattgccttacctcaattttataggtgaggctggaaagtttaaatgtagcagaggtgggatttgaactcaagtactctggccccagaatcaaggtgctaactcactctattgctcactgcagataatgtaatatgagctcctaaggacaccaccaagcacagtctctttcaagcccaatccaagacagcactgtatacagatggccctcctaactgaacttgcagtgctgtactcccccccaagtctgtcccgagaaaagcaccatgtgcggtagaagtcagtacattagattggattcataagagattttgagcacaactctcgttttatttttagtacacacaaaagtattttctggaagcagcaagaggcaacaaggagaagtatgtatgactgtgtctgctcctccagtggaacagaagcccactagacatttccttcccattggggatagctctccaagcgatgactgtctgtctagagacctttctgagcccacagagagacgacatcaaagcttcctgaaacccagaatcctttttcctgggtttctttgccccttacaagatgtatgtgcatctctgcaggaagacaatggtgttcagatagaaagcaagttccccaaaggtaaggagcgagggtggtgggtgacatcatttggtcttgacattcgataaaaatttgttgattgcctacctggacctcgtgcatactgtcaccgttcacctgatgaaacctccccttctccaactgggagagcagagaggggacaaatggttgccaagtaggaagctcccaagcacccaggaggcagccctatgtgggtcggggattttcaagaccactgtgggcaaggccagtactcccttgaggctgagagaagaccacacccaggtgcacagcagattctcaggctcagctaaggaaggttggagatgcaggtgtgtgtggctgctctgaaggcagcaggtcctctgggttgactgtggccctgtgactaactagcagggatataatgactaaggcacggggcttccacaggtccccagcgcttaacaagcatgagacactggaactcacgtgcccaaaaagtaggtcccaaactcagcctcccacagaggaagaaaccaagaattagaacacagtcatcatttctctggggatcaagttgctgaccactactaaatggtgcaacaaagaatgttatagaaaggacacaagaacacattggaaaaacgtcctgtggtgcccggttatgtcagcaggaaaaatgtacatttcctatcattctaaagatgttctcaaagaactatggaaaaggacagaaagaaagatatcagcttgggttgtaaaatttaaattggttatggcaattataaaagtaacaagttaatccctagcttctcattcattaatcgtttagagaagcatttattaagcacctactgtatgccagatgctgtgctttatatcccctgccctctaggctctccgttggcacaggaaacggtcagcagcatagccgtgtctgtgtggtgggccatggggaagccgaggacggcccctgacactcagaggagggactgtgcagaggcatctttgccaaggaagtgatttgagcaggaacttgaaagtatatttgacgttttcaaatcagacctgagggcaaagagcattgcaggctaagggaaaggcacacatgacgcaagtggctgggacaggaggaacatggttgatctggggacctgcagagggtggggccagggcgcaagggttgtgggggtggcagtggctggcgtgagtctgcaggggtcacgtgcatcaggttggaaggcctttctaaacccacttaggaagtctggattgaaggcagagccaagcctttgaagaggaagagacataattagatttgctcaagaggaaactactgcctcgtgcgcaatgtggaggacagatgggagaggagcacggctgggggctgaggcccagccggcaaggagagcgtggagtcactgtgaaggaggggctgcggctgcagagacgctcaggatccagggatgggtctttgagcagtgaagaggtgggagtgttagggttggcccttgggtttctggttctggtgctggggagaatggtgg

SEQ ID NO: 6202 - DNA, 2300 bp, Homo sapien
atgtatgactattgtcagacttttcctgtctgtaatattttgtacttaaacagaaccaatgttttgaaataaaagtttggaaacatattttctgtacaatttagcaaagccaactttataataggtagtcaaacgtctccaaatgacaaaggctgataacagtttctttctttttggtactttctatgtatccaacactggggcctgcaggtactttggacctacattttgtttatttgtgcataagaacatggaaagctgggtttcttcccctcttggtgaataagaaaattgatggctctcaggtggcctcacctgtgctggatcccatgtccaggaaggtgctttgggggccctctagccccagactttttgctcttccctctgtactacacagcctggccccaccccacacagcctgcttccactggctggagcagggggcactccaggacagagggtgtggaacaaattgcagacttctgagaaattgatgagaggggttggtagtcatgagctcaattcctttttatatgtaagacatttgagaaaatacagcaagaatattcttttgtgtgtgtgtgtgtgtgtgtttgtgtgtgtgtgtgtgtttttagtagagacgggatttcaccgtgttagccaggatggtctcgatctcctgacctcgtgatccacccgcctcggcctcccaagcaagaatattcttataacttttgttattccagggattcccaatgtgtttttttctgtcccaacacacaggaaggctaggacgcattcccactggcagcaatggtggggccatttctcttgggtggcatcagcatggggggttgaaaacatggtgcagtccctcccttacttaaaaagagtagctctttaaaaaacgtatagggcattccaaaataaaagaggtttaaaaaaatcaagagtacaaaatggatggtgaaaagaaagcctgtcttccactcccaattcctagtgttacattgccctctcctgagacaacagtctcccacatcttctctgtcctttgagagatttctgagtctaaaagcatttactggggaagcacactgtcctgcattttgctttgctcattagataatgtatcttacagattaacccacatccacacaagagcatctgcctcattctttttaaccattgcagagcatgaatgtaccataatttatttaattagtcccctatcaatggacatagggtggttcccaggcttttgatagtacaacatggaaacaagtgacatgttgtacacgtctttaaacccactgctttattagagctatgcacgttgacccgataaattgtttcctatctctgtattcgccatagtacgtaactcagcaccaatgcttctgcaatagtaatcataatgaacatttattcaagctgactgtgcatcaggtactgtgctaaccactctacataaattactatttcatgataacattacctcaattttcatatttgagatttatataataatatagatatgttgttatatacaatataatcatataaattatataaaagatataatttgttatagaaataaactgattacagaaacctaaataatataataataaataatttaatattagtccattatattattgccttacctcaattttataggtgaggctggaaagtttaaatgtagcagaggtgggatttgaactcaagtactctggccccagaatcaaggtgctaactcactctattgctcactgcagataatgtaatatgagctcctaaggacaccaccaagcacagtctctttcaagcccaatccaagacagcactgtatacagatggccctcctaactgaacttgcagtgctgtactcccccccaagtctgtcccgagaaaagcaccatgtgcggtagaagtcagtacattagattggattcataagagattttgagcacaactctcgttttatttttagtacacacaaaagtattttctggaagcagcaagaggcaacaaggagaagtatgtatgactgtgtctgctcctccagtggaacagaagcccactagacatttccttcccattggggatagctctccaagcgatgactgtctgtctagagacctttctgagcccacagagagacgacatcaaagcttcctgaaacccagaatcctttttcctgggtttctttgccccttacaagatgtatgtgcatctctgcaggaagacaatggtgttcagatagaaagcaagttccccaaaggtaaggagcgagggtggtgggtgacatcatt

SEQ ID NO: 6203 - DNA, 2300 bp, Homo sapien
aattcccagcccaacaaagcctatgccagcctctctcttacagaggaacaaacagaggccaggaggttacgtggctcgtccaaggctagacagcattaaaatgtggtggcaccaagagtcaacctggaccaggcgtcaaaactcaagctgttctacttttaccttctcctaatcatgtacagtgattattcatattgcaaactcgcagctttagtcttactggaggggtgacacctggtaagagacttaaatggagctcaacttcctcatctgtaaaatgagtagtcatagtgccctctccacaaggtcatttcttccattaaaggagataacacctgtccagcgtttagcaggtgtgtggctcatgataaacgtgcaatgcgttttagccattatgacatgacggagacactgaccagacgcaaggggcttgagattatccagtgaaatttacatttgtcttgtgtttgtgaaactgcttacaaagccactatgcatttatgtaatgactgaggctttatcccaggagataaaatggctctccttataaaattgtgtatttcattggaaaggcaataagttatgcagtttctcacatttccccttttgcttcagcagtggggaactcaccctgtagttgtgattcatctgtaccagtgccatctctttttttgtttgtttgtttgtttttgaaatggagtttcactcttgttgcccaggctggagtacaatggtgctatcttggctcaccgcaacctctgcctcccaggttcaagcgattgtcctgtctcagcctcccaagtagcttggattacaggcatgcgccatcatgcctggctaattttgtacttttagtagagatggggtttctccatgttggtcaggctggtctcgaacttctgaccttaggggatccacccaccttggcctcccaaagtgctgggattacaggcatgagccaccacgccaggctgccggtgctatctttagcccaggcttttgggtttgagtcaatgacttctccagctcattatgtgctttttttaaaagtcagttttactgtttttaaactgcattattaactataagctacctcaaatttggttgggtataaattataaaacaatgctcattataatttagtgtcaaagatatttcactaaattgaaaaccaatcagtcttataagagcttgcatggtaaactgttatattgctcaattttctacataaaccatttgtaaaaaaattggtaacaagtagattaatcaccagtgtgacgttatctggatgtattttaatactaagaaaacttttaaataactctcatgcaaacttgttttactcatcaaagaagcctcaaatgtaaacatcaaagagacgattgctgctaacaagaaatgtcacaaggtgggcttgtatgccacctcccctggttgccctgtaaacattccggtgacttcattacatatagagctttgaggttctttggccgaggctggaaggtggaagcctgactcattctgagcctagccacagaggtaaactccggacatttttttctttcatgtcgccaaatacatccttgtcattaaaagacctttgaaactgagtaaaatggctttgaaacctcagtagaatatgctcaaactgtctggagaaggtatgttctaatttttttccacagatataacccttattaaaatataaagtaatctgttcattctgtccacgctgagtatcttctgggcccagtactgtatgaggccccaggggaaaggagatgaaccaggtatctctaaagacctgggccaacttggggagacactcaggaacagatcattacacaacagcatgaaaaggatgcacggtagcgcctgttgggggcgctggtgtgggctggctgaatagtgttctgaaaaagatacgttccaggcctaacccctgatccctgtgaatgtgaccttattgggataagggccatttggataaggacctttgcagatgtcatggagttaagatgaggtcacactggagtagggtggggcttatgtccaatgactggtgtctttataaaggagagagttttggaggcacattcagggaagatggccatgtgcaggtggaggcagagattagagaggggctgtcccaagccgagggacacagaggatgccagacaccacgggacactgagaagggcaaggaagggtcctcccctagggccttcagagggagcacggtcctgacacctggatttctggcctccagaactgggaaggagtaaatccctgttgtatcc

SEQ ID NO: 6204 - DNA, 2300 bp, Homo sapien
gaaaatggtcagatccgcaatgcatggaaaaatatctctttatgtgtgtcatctcctcaagactgtgagttcttccaagacagggattccttgtgttctctgcatctttgctgtctcagcacccaactcaggccctcaaaagtgctatcttctccataaatgtttgctgcactgagatagtggcatgatcacatcagtgcggtacccatgagcggggtgctttcacgtgcattattgtatttggctgttgtcatcatccttgagtctggtgcccctgctctgtcaccaggagagacccacactccagccacagggaaagcaaagctggaacaacccaccctggctgccaagggccagaagactgtgcttcacactccaggggtctcagattcagctagagcccaagtgaccacaaaattcagtagaataggcttttaaaatgtctttattataaaccataattttctgagagagatggaaactatgtgtaaaactgtatctaataacacactgttttttgagggagcgttccatgatagcactgtgctgagcccatgaaaacctttatttgcctcatttaataattcccagcccaacaaagcctatgccagcctctctcttacagaggaacaaacagaggccaggaggttacgtggctcgtccaaggctagacagcattaaaatgtggtggcaccaagagtcaacctggaccaggcgtcaaaactcaagctgttctacttttaccttctcctaatcatgtacagtgattattcatattgcaaactcgcagctttagtcttactggaggggtgacacctggtaagagacttaaatggagctcaacttcctcatctgtaaaatgagtagtcatagtgccctctccacaaggtcatttcttccattaaaggagataacacctgtccagcgtttagcaggtgtgtggctcatgataaacgtgcaatgcgttttagccattatgacatgacggagacactgaccagacgcaaggggcttgagattatccagtgaaatttacatttgtcttgtgtttgtgaaactgcttacaaagccactatgcatttatgtaatgactgaggctttatcccaggagataaaatggctctccttataaaattgtgtatttcattggaaaggcaataagttatgcagtttctcacatttccccttttgcttcagcagtggggaactcaccctgtagttgtgattcatctgtaccagtgccatctctttttttgtttgtttgtttgtttttgaaatggagtttcactcttgttgcccaggctggagtacaatggtgctatcttggctcaccgcaacctctgcctcccaggttcaagcgattgtcctgtctcagcctcccaagtagcttggattacaggcatgcgccatcatgcctggctaattttgtacttttagtagagatggggtttctccatgttggtcaggctggtctcgaacttctgaccttaggggatccacccaccttggcctcccaaagtgctgggattacaggcatgagccaccacgccaggctgccggtgctatctttagcccaggcttttgggtttgagtcaatgacttctccagctcattatgtgctttttttaaaagtcagttttactgtttttaaactgcattattaactataagctacctcaaatttggttgggtataaattataaaacaatgctcattataatttagtgtcaaagatatttcactaaattgaaaaccaatcagtcttataagagcttgcatggtaaactgttatattgctcaattttctacataaaccatttgtaaaaaaattggtaacaagtagattaatcaccagtgtgacgttatctggatgtattttaatactaagaaaacttttaaataactctcatgcaaacttgttttactcatcaaagaagcctcaaatgtaaacatcaaagagacgattgctgctaacaagaaatgtcacaaggtgggcttgtatgccacctcccctggttgccctgtaaacattccggtgacttcattacatatagagctttgaggttctttggccgaggctggaaggtggaagcctgactcattctgagcctagccacagaggtaaactccggacatttttttctttcatgtcgccaaatacatccttgtcattaaaagacctttgaaactgagtaaaatggctttgaaacctcagtagaatatgctcaaactgtctggagaaggtatgttctaatttttttccacagatataacccttattaaaatataaagtaatctgt

SEQ ID NO: 6205 - DNA, 2300 bp, Homo sapien
attattcagccttaagaagcaaggatgtcctgatacgtgttatagcatagatgaactttgaaagcattatgataagcagaagaagccagaaacaaaagcccacatattatatgattcaatttataggatatgtccagaatggataactccagagagagacagttgttgagtggttgccaggggctgaggtcaagggatcatgtggagtgctactaacaggtatgggacttcttttggggatgatgaaaatgttctggaatttggtgatggttgcataacttggtgaatatacaaaaaccacggaattgtgcactttaaaagggtaaactgtatggcttgtaaattatatctcaataaagctgttattaaaaaaattagttggccaggtgcggtggctcacacctgtaatcccagcactttgggaggccgaggcgggcggatcacgaggtcaggagatcgagaccatcctggctaacacggtgaaaccccatctctactaaaaatataaaaaattagccgggtgtggtggtgggtgcctgtagtcccagctgcttgggaggctgaggcaggagaatggcgtgagcctgggaggcggagcttgcagcaagccgagattgcaccactgcactccagcctgaacgacagagtgagactgagtctcaaaaaaaaaaaaaaaaagtcaattgcagagagagaagagatcatctcaggccatcaggaagggctgtgtttagaagagaatgtaactaaaagtcagagacatggggacctctcttagacttgactgagggagcctgactttgtgacttcctagctggggcctctctggagagccctgcccctctttgcctctgcttcttttgtgtgtgtgtgtgtgtgtgtgtgtgtgtgtgtgtgtgttgtggcaggtgtggacaagctatttaggcagctttggattcttatgtgcctacccatttaagaggacggtttccctgttcttgcctaaattgaaggtctgctatacagcagggaatagcagaagacaggcagtgcagggctccttgctccattaaacaacaacaacagcaaaaacaaaaagccaaagaactcaaaaccaaacccacaccagggagaagaacaaccttgttctaattgtctggctttgctgataagccgttggagagttctgtagagaggccactttgagtttctaagtggggacacaggataatggcagtggtgtgaacatcttgagcctgggtttttcctttgatgctaggctctcggaccatgtccagtttcagtgtctctccagacccccgatgtgcagcgtgtggctaatggctcttataatgagagatttacaacttgggctttcacatgctgccccaacctcatttgtccagctcacggcggagcctgtaatcatctctgcaggctccggctctgggctctagacattctgctccggccaattcagctgaacagatgagagacaagaagccccacagtcccacaaacaagaatcacattgttgctggggaaggagaggaaatccattctgacatcttatgaaaatatttttgtgtcttgtttacataatgaatctgtctgttaacgaaagaatctgaggtgacaaattctttggtctcaccgacgtgtgtggctttgcagtgggccgaatgcgcctccagatcctcttctgcaggaagtttcaaggacgtcccatttttcttcctggtgggttgcttgttcaccagtcctgaactaaaagcaaataattcatccgtgctcatcctacagaaagttgcctgactaacgggtctggtaattgggaccctgttgcagcatggatctcccttagggggaagctggggtggcagttgagggtggcatctctttctggccactcttgtccacagaagcatcccaattttctgccacccacctgcaagggcagaaatggtcccctctgaaatcaaaccacactatgactttcaatactatgtaataatgatgcttgttcagtgagcttgacaaaggagggagtacatagtgatggaaataatggcgttttccacttaatgggagaagcaagctaaagtggagactgcctccctctcacacatgccctccctcgatggcccccagctcttgtaggacaagccctcatggcagagctagatggcaccctaggggccatacaggtgcgtgcactccttgcctcgcggatgaggaagatgagcccagaggaggagctgacatggctgagtggccaggtgggatctggagcctagtgtccttgccgtctggacccc

SEQ ID NO: 6206 - DNA, 2300 bp, Homo sapien
aatgtatttacccttgatgtgctcattttatttcatttctatgatttttgacgtgtttatttttcccacgtctagaacagaataggtgtgctggcagggatgctgttaggaactgtgatagatgtatttatggttcctgaaggtttacgaatacggtcatgctgagctggggaagtccagcctctgccctgggcttccttcacctgatgcagttatttcttgttaaagattcactgtaaaatgccaaataaacttaataactaactaataaccatctttgtcagttgaggacacttacattttatgaattttggggaaaatataggaagatacctgaggaaatagaattttcaatatcataggtctagcttttgatattacagaatttttgtgcacatgtggcaatgtgcttgctttggctttctaaaaagaattcaggtagcggtagacatcttgatagcagtaaaaaaaatacaaccaaaaggaaggccttcaccgttacctgagtgttcaccatggaccccattgtgccagatccaacaggggcatcattttctctaagacacaaaacacacacgcaattctacgaggtcagtatccggtccttattttggccattgaaaacctgaagatagagcagatcgtttgccagagggcaggcacccaggggctcggggaggggtgctgccctacccactttagctgtctgtagagaccatgaacgtgaacaccaggaggctgcgtgcgcctgaaattctggactttacagcctgaggtgcagctcaggcagctcaggtttatggaggccattccttgtacggctaagcaccttcctgtccttggaggtgtgggcaggaaatgttgaaaggtgggtggctctgccctctggtggcttttctttagttggggatgtcttaacacacacatctgaaataagactggctcatgcagaacaagagatgggaagctttgcgtggtgccagggctgtttggaggagcggagttaaaagatcaaacacagacttgggtctggctttcgtgatgaggtgcacccagtgggaaggcccagctggcgagggagaagttggtacccaaagatgtgggctggactggcttctttccttcagtagaagcaagggcccagggaagggagtgtgtggtgggaaggtacggtggcccgtgcttgccagaggagtttgcacatgacatggtttaattttagagaattttagaggtgtgccacaatgcaggtgccttttgtgcatagcctcgcctggctgggctgtgcaggatggatggatgagagctttgatccgcgattttgaagatgagttttatattgaatgctatatcctattaggtagaggctgttgggtaggaggaacattaatatatatttttttaaattgagagtgggctagttgaatactttttgggccttaaacactttgtagcatcctttttacacctgtgactgctgcctttattccataatgcatgagcaaaagtgtggttggaatttaatggtgtgactttttaggggcttatgtaggagcactatgatccttttgcaaaataggagcagctttatgtcaggataaacatgggatttcagacatttcttgcttatcattgtcagttttaaggatttcttctaacacaggacatatttttgtctactgtgattgtaaaatctattggcttaatatcaacattgctatatgataatttttttattaatttggtttccaaagaatattcactccatgtgcaattgattcataggcagataaaaatctattagtggaaataaaagatagtattgaagtgtcaatcaaaatactgttaacaatgtcttcttatgtcacttatggtcatctggtgtcatgggtagttatgaatttctcctccttaaactattgaccctttatatttgtctgaaagaaaaggtcacttctgtgggtatcagagaggatgatgcaggcagcgactgaatgtatttcaatattaaaaacaacaacattaaaacaagccaacacgactcagcatggtcacttctatctttactattactaatatatttccccttttttcatcacagctttttataactatgatgccagaggagcggatgaactttctttacagatcggagacactgtgcacatcttagaaacatatgaaggtgcgtatgcatcttggtatcttttctcttacattttgggcagatggcacaccttctcagtgcctgctgggcaaagcattcctctgttacagacacataagacagtcatgcttcc

SEQ ID NO: 6207 - DNA, 2300 bp, Homo sapien
agcttgggtgggtcatctgcgttctctgttggccgagtaatcactggccgcgctgtgggcaccagagagagagagagtatgggcggttatcagtctgtctcgctgtctttagcctgcagaacctgtgtatcacccggttttgtcactgtctgcagggatgcgcgtcttctttggacagcgcagagcctgtcccatcacccagcggcctgctctgctactttctcatagctcgttggactcctggaatccttatgaaggatccaggcaggcgatgccaagttttcctttgagctgggaaggtagcaggagtccactatgtctgcttctagttccttcttccccagaatgttctgtaacctggggaggcatttgatgagggtctatggtgaatgcccatttgtggggtttgcttactgtaaatgaggtcttacttctgtgctggccctggagtaacgcacttgaggtgtacttgggagtgaggctgtgggagtttcgccctgtcacccgggctggagtgcagtagcacgatctcagctcaccgcaacgtctgcctcccagtttcaagcagttctcctgcctgagcctccggagtagctgagattacaggcacgcactaccatgcctggctaatctttttattttaatagagacgggggttcactgtgttgcccaggctggtctcaaactcccgagctcaggcaattcacccacctgagcctcgcaaagcgctgggattacaggcgtgagccactgcacccggccttgaagttcttttttgatgatggtgtttgtgccttgatagaatttttaggctgagagatcatggagtttatgccttccttatcagtgaggctgtttagtggtgctggccttggaggctaagtgacttgtccaaggtcacacagcaaatgagcaacaagtcttggttgggtggccttgcacctgcccctcgtcctgtgctccacggttcttctcgtggtcagtatcagtgggcggcagccgcgcctccttccacacagctactgtggctgtggtggcaacccactgggattatgatgataatgacttttaaatgaaagcttaatttaatagttggatacattaaaagccaaaatagagcagtttaaaagaaaaaaaaaagccaaaacaagaaagcaaggagcaaagagagttattttccttaagggatccttggtcttcagccagaatgggcatttgctgctcttgacggaaccgctctttggctccttgggagagcgggtggtcagggcgtgggaggtggccaggcaggcagcagaggagcagtggctgggaacgaggcttcctctaaatcatgttactaatgaagcttgtgaagttctcccagttgggccattaccaggggcttcctatgttctcagtaggaagaagagtcttgagctcatttcttgcgttttttttaccccctacaattaaaagcccatctcactttaaaacagacaggtctgttttgttcttctctctgtggtccccattcgggatcctgatagctgcctgccagaagggaagagccatgcagaaagtttctccctagacccgtttttcctccctgattctaggctggtgatcctcattctttttttctttatttttattttattttattattttaagttttagggtacatgtgcacaacgtgcaggtttgttacatatgtatgcatgtgccatgttggcgtgctgcacccattagctcgcttttgagacggagttttgctctgttgctgaggctggagtgcagtggcaggatctcggtttgcggcaacttctgcctcccgagtagctgggattacaggcctgcaccaccacgcccagtagctaatttttgtatttttagtagagatgagggttcaccatgttggccaggctggtcttgaactcctgacctcaagtgatctacccacctcggcatcccaaagtgatgggatcacaggggtgagccacctcgcctggccggtcctcattcttaatcaacttttagttcaactcttggagtcatgcttttaagaagaatgcataggaggcaaccttgccagttacctgggagtgccagtggatactgcgatagtccttggctactgaggactcagacagccgtagccagccgtctaacaagggacaatggtgtgggctgccatgggtcatggatgccatcaatagtattggagcccctctggttgtcggctaccctgagaggggtagagtgtcctctgcccagatgataaccaagcagatcattggaaactttgagatttttcctct

SEQ ID NO: 6208 - DNA, 2300 bp, Homo sapien
aaacatgaaatcctattgatttagagaaccattaatcctagacaaattttgacattttggaaagacagaaacagccaagctatattatctggagttttaaaacaagttcaggacccatctaatgggccatttcatgttttaaatccactgttccatttttctcattgtcagtgactctaatattactcaaaaaattaaaaaaaaaaattgccagagaagtttatggctagtgacctcctgctcccaaaacaagttatccttttcccttttttcgaagagcctctttgagttatgctctaatttataggaagtagaataaaatctcatgaatttaagtcttgctaatccagactacgtgatgatggaggcatagtctcttctaaggacagttgtgaaaagtgcagtctaaggctgtgctgcattaatgaaatccgggcctcagttccgtgatgtggtgcactagaaggacatggggtttccaccctgcctcttccacctgatgctggtttgggagtcgggggctccttaaacttcaattctttcacttcaagggggagaaaatagttccttcccaggctgtcgtaattactgaattgtggtgacaatctctccccactgaaaaatgcccatgaacgagcctcctaaactgtaagatgcaatttaaatattattgtaccattattatctattgatcactaatcttataatggaaacaagagctaagtaataaagatatctattagggatctcttcaacttggacatttaacaaggaaaacaagagcctgtcaatcgagtctgtgaatatacggtatgttaggtatagaagcgtaattctaccaaggtgctttggtaatattgaaggtgtgttctccagatcgtaaccgtttcaacagccccagattggttttgggttattagaacagagagaaggcgctagcatctcctaggctaacagtacaatttcggctacctgtaattattgaattcccattaagcaactacactgggaatcctgttattaaccaatttatcacaccaaggaaccatgtaatcacagagtaatctaatctgagttcttgttaacaaaatgactcgactttatctgtcgagttgattcctgtttgcactccccattatgctgccctgggaatctgcaaccagaggcaggttccttggtagagggcacttatgagtctgtgagtgcccacttggaaacgcctgccagcaagttgaccctgaggtccgccccccagcccatctccccatctgtcacatgtgagttgcagtggatctgcgtgtgggatgacgcccgtgcaccagccaggcaacgtgtgcagaggtgtgaaggaataatgtgcattgttctggacactgcttcctgctcaaggacttttcttggggaagcacaccaagtctctcggttgagtttgacacaccaagtctctgggttgagtttgacacaccgagtctctgggttgagtctgaagcagaaacctgactggaggaggcagcatcagaaggttaacggtctggccaactctggctgacatcgaacaaaggtccctttagtcttaatagctaaatggatcaaaaggcagcaacacctgctcttctggttagagtagtggacttggagaaaagctgccggtagatgttccagggcactgggactgccctgcacacagacctccctctgtatttgagacagcggcttgttcagatagtgcctgggggcctgcctggtggagggcccatggctcttgcttcagcttccccttcctgctgcccggcagacctgtggtgggagtgttggttgccctacctggggccacatctttgtccggtgctgccagcttcatgattatcactttctccccacctgaaacgcctttctgggctcatggcatggctggcattccttggcccactgtttctcaggtccacataacctccttgttgtctgaccaccttcccaaatgttgcccaatccatcctgtcttatttgtttttgcactaaccacagataattattcgttcccatattacttgccttcatcttcctaaatgcatcttctcgaatgcaggcaccataatcagagatgccatgcggtcatcctctttctgtttccagcaactatagcaggggctgggtcctagcagttgcctacgtaatattgctagaattaatgaatgagaacagagtcttaaaaggcaaattctggccaggcacggtggctcatgcctgtaatcctagcactttgggaggccgaggtgggcggatcacttgagatcaggagt

SEQ ID NO: 6209 - DNA, 2300 bp, Homo sapien
caagggaacatgctggagagtggcaacttctcctatctggttttaaacgtccccaactcctatacattcccttcccaggccccttccaggcagaagaggggactgcagtttccatactgctcacacaaaattaagcatctctttccagccagctcccaacagcctccctggtaagctggaaaatcagcttgggggatctgagttaagaagaacaacaagaagagtgaggtgggcagagtttggatccacaggctcaggactcccgtcctgggcatatctggatccccaaggctggcaaaattgtataccaaaggatgctgcggggtaaagagggaaatagatgacattttagatttttttttcttctgaaatgtctggacacactgcccaaagcatccacatacaaagaaggtatttcgtataaagtcatttataaaaaacagacactctataaggcagtgataggctcagttcagctcagcgaacaaggatggagctatggcttggtcacaggcacagagctggtgctaggtgcagagactcagggatgtataggcaaagaggtctcactgcccactgatgtgtctggagaggtgggtgggtgaagggactttccatttgtcctcccaatttcctctccgaagcctgtcccttccctggggtccactacttctctgacctttcctgagaaacagactaataaatgtggctacttacattttacattacattctaggagcaaatccagggggccaggagccctgcactcggctggctgcttagtccctggcccagaccccagggcctgacaggcatcagaggggcccctgggtctgctgctctgagctcaaaacacccaatactctttggtgggtgggaaattaagggcggggatagctccgtgtgcatcctaggtcttttcctctcccaagagaattctactctgccacaaaggaactcagcctctgcgccctgtggcttctgctgacgggtggtgtgtgctctggatggggggtagggttcctggctaggagtggcagtggcgcctgctctggagtgtccctaaatgtcagcatgcaacattaccaggcaggccctcccacttcagtcctcaggccactcataggacctcctgtccccatgtagagaggctgacaccaggttggagccagcactgaaaggatccccgaactcctgcttctacaaggcagcatccgcaggtgagcggccaggcacctacaagacacgcacccttcaagcctggcttcccaaagccccgccgggccaggctggctggcacagcagacagtcatgcagcagggtccccagcgaccccccatccctgagagaacacacggagtcccccgcccgccagctgctccggaggcggctccagggtagactcaacaagttcccgggccatgcagcgccgcctgcagcccagaaacccggaggacgcgctgtggcggagccccgcgcgcaggcggcagccggcggcagccggcggcagctccttccacctcctcctcctcttcctcctcctcctccagctctggcggcggcgggagggggctcctccactccctccctatcccccaccccacgcacgcggcccggcccggcccggccccgcgccgcccccgccccacctccgccccgcggggcccggggctccgcccgcctcggtgccagccgggcgcacaggcggcaggcgcgcggcttggggcgccctcgcctctggccgcccggctccgcggagtagctgggacctggagcagcggaaaggacttccctcctgctccctcctctgccccgcccccgcctcctggccctggctctgagatctcgccgaagacaattgcagtaaatgaggacatcggaggagcgcgaagccgggtggctgtggctggctccgccgcgtcgcgagcaagcgagcgcgcgggcgtccccggagctggcccagccgctgcctccccgcgcgcgtcgctaagcggggccggagggacgcgagcgacgcgagctgcggcgcgggggccggccgggccagcagggccgggccggcagcggtggagggggcgggcagcaggcgcgcagcgggccaagtccccggagccgaggcttcctccgcgtgagcgcggcgagtctggccgcggatgccctgtccggagtgctccgtgccgccccaggcttgccagggtccgcagcgagacatgcccgagccaggcgctgcatcgacctcgacttatctgtaagcagcggaaggtaagcggagccccgcgtgccctcctcccgcgcccccg

SEQ ID NO: 6210 - DNA, 2300 bp, Homo sapien
attctcctggctcagaataagacataatttgtgtggttcacaaggtggttgatcccttccccctgagtttctggcatttctggtggaatccctaatgagaagtttgcataagaagaacctgaagagagctgaatcccaccgcagaaaacctacacggttttctgcaaggactcagggagagccaggggcaaccaaatactctagcctccctgaggcctctcatttgggccagagcctgaccttctgagccagctctttcatccattcattcattcacttactcttccatccacttattcattcattcctgtgtcagttacctagtgagcatatactgtgtaccaaatgctgacttggcactgaggacacttaggtgaacaagcaggtgttgccactgccttcgagatacctatgctttactcacaatctggagggcttctcttacctaaacccaactccagcagtgtccagcacagatagagttgtcaggatgcagagtcaggcgcattcataccccacacgccctcgaattgcctgctgggcaaaggactatgatcctgcactgtgtggagcccctcatttcatttggcaaggcatcctcccatccaaacacttggcttagcttgcaatccttctcatattcctctgtaacagaaagcggattggtatgcaaaagcttctaatatgattttcttattttccctactttcacatttattagaaataacttatgaattacagtaactaatagattttttttttttttgagatggagtcttgctctgtcacccaggctggagtgcagtggtgcagtctcggctcactgcaacctctgcctcccgggttccagtgattctcctgcctcagcctcctgagtagctgggattacaggtgcacaccaccaggcccagctaatttttttttttttttcttgagatggagtctcactctgtcgcctaggctggagtgcagtggtgcaatctcggctcattgcaagctccacctcccaggttcatgccattctcctgcctcagcctcccgagtagctgggactacgggcacctaccaccatgcccggctaatttttttgtattttttagtagagacggggtttcaccatgttagccaggatggtttcgatctcctgaccttgtgatccgcctgccttggcctcccaaagtgctgggattacaggtgtgagccaccatgcccagcctgtaattttttttttttagtacagacggggtttcaccatgttggccaggctggtcttgaactcctgacctcaggtgatctgcccgcctcagcctcccacaccacactcggccgactaatagattttcttacctaaaagttagtctctggttatgtttctccttgcctcattgggtgattggcccggggcatagctgtgtttccgtcccgtcaggtgtgggctgtaggatatcatttatgcatgtcctggaagtttctgtgcaagtgacgcagcccttgatgcattgagcccaagcatcatctgatctttgtttactgcactgattatggttttatttgatctttccttcagctttcctcatgctacttgaatttccacgttgtttttgtcccggcatttaaaaaaatttatagggaatctgaattacagaatctacctctcagccctgcactttctcagtcgtcagtttcttaaaaggtttttgttcagccttcacattattttagcatgacatacatagttttttttttttttttttaatttgagacaagtctcactctgtcacccaggctggagtgcagtggcgcaatcctggctcactgcaagctccgcctcccaggttcgcaccattctcctgcctcagcctcccaagtagctgggactgcaggtgcccgccaccacacccagctaattttttgtatttttagtagaaacggggtttcactgtgttagccaggatggtctcaatctcctgacctcgtgattcacccaccttggcctcccaaagtgctgggattacaggcgtgagccaccgcgcccagctgacatatttctttaagtcattttgagaactgtctttatttaactagctgcagttgtcccagagcttaattcgaagcagcatattgcaactgtttgggtgctatcttgaggcacaataattaccctataataataatgtgtgttttagtaaactggtcattattgtcatagagggctggaaagagtgtcttcttaaagctcataaggaccctagggtactctgcaaatagcagagttctaaacctgaaggaaaaaattaagg

SEQ ID NO: 6211 - DNA, 2300 bp, Homo sapien
tgggaaagggggaaggaaaagggggcagagtccagccgaaaagccgacctcaaagaaccattttggggtatttcttttctcttgactgcttgggaaatgccttcggttcacccaccacttctgaaggggcttcacttctaaggcgagaggccaacgtcccaacagagggactctcacttctttctgccatttgttaaattgttccataaattagttgttttacataaaatttggaactacgatctgggaggccgaggggctgcaccaccagtaagtcgctgactcaaatgggccctttaatccccaaacccaaactctttcctcgatcgaaccgctggcctcaacctacaagcctcctccaccgccaaaagtcgggaagggttggtccttttgttttacaaatgaattaaaattagatccacaggcccgcgtaacgctggggaatacccagggcgaggccagcttccaggaggtcagcgccaacaccgccggcaggaatctggggggatggggaggtctcctcatctctgagccttgagcaccaggcctgaattttcgcctctttcgcacaggtgcccgactcggagtccgggaggcgggccctctttccaggtacccagcccagcgtcagcctgggtccatcctccgccaccccacagcgcggggagcaggggaggccgaaagccgggcagcttggggggccgggataacccgggctgcagcaaccccgggcggcagcaggactggagagctggtgtcggacgcactgcagagacgtccctgttttcggcgcgtcctccgacacccagcagagagcttggcgctctccgctctgcgcgcccgaggtcacagcgcggagaaacctggcggggccccggactccccggcttgggaaaagcgatgactgccctgaactgctggggcgttcgaaatttccagggtcccgaccctccgtggggtacgcgcgacttcggcgcagatgtcagtccgctgccttccgggttgagggagcgaggactccagacgaccccagggccgctgtccaggcccagccccgcgttctccacctcgccacctcgctctgcggctccagcctggagatctacggacttcattgcgatctcttgcgcagtgtagtcgccctctatccctagccccgagtcccgggtaacccaggggccccggcgaggcgagtttctttggggcgagatgtcccgagccgagcaaaggggccgcgcattggacggggctcccaagccacagccctgggggccttgaggagtcgtggtacggtccagggcagtcggggctgcggggcccgtgaagccagacgaggctacggacttagggtccctgcaaccaagaccgcgagcgactgtggactcgggacggatcgcacaaaggaggaagggggaatcagaggggcgtccggtccaggacgtgtcaggcctgggcggggcggaaaactgacaccagggcgaggacaaggatttcgctcctccagggctgccaggggaggggctcgccaccgtcactctccatgggctctggccccgacggtgtttaaagggcggagggctgggccgggctggtcgcacccgggcgctgctggcggccaagctggatgggtcgccagtgagtttcggtgcggcaccgctggcccaggcccgggcgcggctggacatggccacctactgcgacgacctgggcccctcctcggccccgcccggccaggcccaggccaccgcgcaccccccgggctatgagccaggggatctgggcgcggtgggcgggggccccctcctgtgggtgaacgcgccagcgctcagccccaagtcctacgcttcgggtcccgggcctgcgccgccctacgcggccccgagctacggggctcccggcccgctcctcggcgccccgggcggcctggcgggcgccgacctcgcctggctgagcctctccggccagcaggagctgctgaggctggtgcggccgccctactcctactcggcgctcatcgccatggccatccagagcgcgccgctgcggaagctgacgctcagccagatctaccagtacgtggctggtaacttccctttctacaagcgcagcaaggcgggctggcagaactccatccgccacaacctgtcgctcaacgactgcttcaagaaggtgccccgcgacgaggacgacccaggtaacagcggcgcgccggctcgctccgtccaggactccccatcttcccgccgggccgcgggcactccgggggtgggagcaccttagacaacctaatttctccctgc

SEQ ID NO: 6212 - DNA, 2300 bp, Homo sapien
gcccccggctctgcgcttcctcccagggcaccaaggccttcaacgccaacacgtggggctgtcaccaggggaaaccggaggcctgagctcagcacctctggacccgcacccggctagcctccagcctcccttcaaacttcggtcccttcccggctgtagaggaggtgactgaggcggaagccggcggccgcggtctggtggccaggggcgaagccaggggaggggttaagggtctggggagcgtgggtggcgactgtcggtggccgcctcccgaaagaaaagtcgcccgccaggcccccggggaaggtgccaaggccgccagccagagcgctcatagcagaagcgaaaccggagaagcaggtggcggcctcgggtgcggatggagagggcgaggcctgcaggtccaggcaagccgcgctcgggggctccagcgctggcgcctcggcccctcccacgctcctggctcccgagcgcacggccgcgctggcttcagctctcctcttcctcttccttcggaagttcccgttgtcaaacatcttctcgcagttggggtccagggtccagtaattgcctttacctgcagaagaagaaacagcccagttcagaaggttcgagctttgacgggccgtggtgtgagccagcgaggaggtcagcttcagaaagatcccctgctggcccttacagagggtctgagtcctcgcccccattccacccttgacgggcactctgtacccgatgggcctccacagcaggactgggaagaaagtgacaatccagaaaggaggaggaagggagccctgggaaaggccgagccccgttaaggtgaaggaaggcctgcgagatgctaatggtgggactccgccagccgctctgccaaggacagcgcagaccacgccaggcccccaggtaggctccagagctttccaaacgggcatcctatttgttttgcccatccttggggtaggcgctgtcttccccattttaccaggtagggcactgaggcccagggaagttgagtcactcccaaggtcacccagcttgctggctctcccgcttcttcctccgaaggagcgcacagagattgagagccccgggaccgccgcactgtaaacgcgggcctgtggtgggctcagccgctgtctgagaacctgtccatgcccaagcacttcttccccttctccctcctccccgggtatccccaaccgcgcagggagaaattaggttgtctaaggtgctcccacccccggagtgcccgcggcccggcgggaagatggggagtcctggacggagcgagccggcgcgccgctgttacctgggtcgtcctcgtcgcggggcaccttcttgaagcagtcgttgagcgacaggttgtggcggatggagttctgccagcccgccttgctgcgcttgtagaaagggaagttaccagccacgtactggtagatctggctgagcgtcagcttccgcagcggcgcgctctggatggccatggcgatgagcgccgagtaggagtagggcggccgcaccagcctcagcagctcctgctggccggagaggctcagccaggcgaggtcggcgcccgccaggccgcccggggcgccgaggagcgggccgggagccccgtagctcggggccgcgtagggcggcgcaggcccgggacccgaagcgtaggacttggggctgagcgctggcgcgttcacccacaggagggggcccccgcccaccgcgcccagatcccctggctcatagcccggggggtgcgcggtggcctgggcctggccgggcggggccgaggaggggcccaggtcgtcgcagtaggtggccatgtccagccgcgcccgggcctgggccagcggtgccgcaccgaaactcactggcgacccatccagcttggccgccagcagcgcccgggtgcgaccagcccggcccagccctccgccctttaaacaccgtcggggccagagcccatggagagtgacggtggcgagcccctcccctggcagccctggaggagcgaaatccttgtcctcgccctggtgtcagttttccgccccgcccaggcctgacacgtcctggaccggacgcccctctgattcccccttcctcctttgtgcgatccgtcccgagtccacagtcgctcgcggtcttggttgcagggaccctaagtccgtagcctcgtctggcttcacgggccccgcagccccgactgccctggaccgtaccacgactcctcaaggcccccagggctgtggcttgggagccccgtccaatgcgcggcccctttgctcggctcgggacatctc

SEQ ID NO: 6213 - DNA, 2300 bp, Homo sapien
ttcatggactaatggattaatggatcgatgggttttctccggggtgggactggtggctttataagaataggaagagagacctgagctagcactgtcagcccacttgctatctggccaccatgatgcgcgccctgtgccacctcaggactcagaatcctcactagcatgaaggccctcaccagatgcagccccttgaccttggactcctcagcctttagagccataagaaataaatttctgttctttataaatcacccagcctcaggtgttcagttatagcagcaggaagctaagacataaagctgtaggtatgaaagtctttgcccaactgtgaacacaattacttcttgttggataaattatttattatatttactttcttctttattcttgccagttccatttgaatacatttttgtaataggcctatgtaatacaaaatacaataataaatacaaaattattttccacactaggaatagggccagaaggaactaactactgaaattctgtcccaccctttaaaagtgtggtcaaaataaatagacttaaatggaaaaaatagtaaattttcccaataatatacatgttttgaggatgtaggaaagtgtgcaccttcattgtgttaagggcatggtgggtgactggtatctttttctaatgagcagctgggcaatgtgtagcaacagcttcagtaacattcacagactttgactcacttctagaagtctaaccaaagaaataatcagagatatggacaaaggtttatgcataaggatgttcatgcattgttcttccttaatcataattttaagatagaaacaacataagtgtccacagtagtagagtatgtgtgtacgtatctccaataatttattgaacaaatgtttgctgagtgtcttctctgggccaggctctttgagagttccctggaatccagtggtacacaaaacaaacatgtccacctcccggagcatgtcatctagttacaataacggaaaagacagatgatcagctagttccacaaataagttaggtgttaatgaagaaaagtagaggatgaagtaattgcgtttttttgccattaaaagtaaatgtaacttttaatggcaaaaactgcaattacatttgcaccaacttaatattatattactaaataatcaaagaatacagtaaaaagcggtatggaaaacatgctatgaatgtctatttatcatctcaagaaatgatcttttcgccaaatgggagagtttttcgaaagtccagaaatgaccatttataaactatttaccattcaacagagtggatacagctataacgaccaaaaacaagaatgttcagaaccatctctatcagagtactaaaaagtaataaagatgaaacttctcaagatataatttaaataatacgcaaatatgatccaatttgaaagaggaaatttgaaagccaaacctctctgataaagtctaaaaatagagaggtataaaacataaggaggtgtaagcttttctctttccactccacagtacatttgacaaaggtttaccctccttaggattcctcttggaacaattataagagtcaaatcactaatgagtaaagaaactgagcaatgcatagcaaaaacttcagaaaaatccacagacttcgtcaaacttctagaagtttaagcaaggaagcaagtggagatatgaacaaaggtttatgcctaaagatatttgggtgttgttctttctcaatcataattgtgaaattgaagcaacataaatatccacaatagtgaagtatatgtttacatatttccaataattcttggaggagttggggtttcatgttgttgtctgctagactcagcaacgctttgggaatacagatcctccacgccctattatttaggaattctactcctgtcatgatatggtaggctaaacttgcttccatgacacttggccaaggattataaattaattgcatgattgaggaagtccctgggaagaccatgcccaccccttgttcatgctggttggctgtaaccatagcagcctcttactccagaccaaagttcagctactgttaattttatggccatgttcagagttcaatgtccattagcataacccttcctcaggaagagtgagattttatatttgacaataaagtgttagactccatttctaaataccagacttcaaaagataaggttcaaaagtgttataagaagatattcctttttttgtcctagagaacttattttcctgtgaaaatgcctaccacaaagaagacattgatgttcttatcaa

SEQ ID NO: 6214 - DNA, 2300 bp, Homo sapien
actgtgcttagcagagctttgtaattatggccttcatgtacataagcctgactctgtagaccacaacagcagaaaaatccaaagcctggtgacgtcatgtgctacctggccccacctcaacctgggctgttccttggaggtgcactcaggagggagccacccgccctgctgggctccgaggtgaccaggctgtctgctgctgctggctggggcccatcctcctctgctctgacagcccagacgccttcactgagcacctcctggctactgacgttgctttaggagcttgagtctgagaagccatggagatcaacagagcctaggctgctggagcttacagccctgggggtaggggaagagggcacgacagacacaaaaggagccaataaacccacaaataattccaaactgtgatggaggatgtggaagagagtggcagaagagatggatgcagggcgatcttccagaagccaccagtaagaaggaaccaggtgcactggttggaggagtcccaggcaggaaggagcttggctctggcactgagagaaaggagccgtgattggagcccagcgggcaggggtgagaggctcagagcagccagggaagtcaggcagagcctcgtgggagtttgggttttaatattcctggaggcttttaagcagggggctagcaggacccggtttacactttgtgaggtgcctgggaccaagtgtgaagaatggatcatctgggagagtgggtcagaagctggggagccactgcaggttttggaggggcgcaggcagtgagatgaaagggcaagatgcatggagaagccagtgggaagtggacttgggccctctgggaggtggacttgaggtgggacacggaggcagggacagggacgactgcagagaaactaagtaagagcaagaggcaggtctgagacagcaggagacagccaggaggagctgagcttggaggagagggccccagagtggtgctgcttagagtcattcccatacggatggtgtttaaagctttggggctagacaaggcccccagggacagaaatgggcagggcagggcagggaggtggagctcaagttctccactggtttcgcagctctccggcccctgtggaggggaagtcccactctgggcaaatcacgtgggggtggcctctgccaggaggcacccattgctctgcagcctttggggtccgtagctctgtctaaacaggccttaagtatgctaagagtcgtcggctggcaatcggtgcaacgtggggtaacacaccgtaagtgccactttctccccatccattcattcattcataagcctaatgagctgggtccctaccacagaatgcagcttccctcatgagggctgggccgtggccccatccagagggcacggcacaaaggttcagaaccaacatgccaccagtgtcttttctgctccttccagggaactgccttttctctgaaagctccctaaatagcttgagtgaaattccctggaagaagtcggctagacagcaggcccagtgcctggctctgtcgctcttctttctctttgtgcgtttttaactttgacagatactgccttcgggacaagcgagccctcttctacatcccccagacaggcgccttatcccctcctctttccagaggaggccaccaggcccagcgacctcacagctctcccagcttcctcgcaccagaagcgcacggggtgccctgcgtgtcccacacctgctgcaagaccagggcgagtccctagtcaggccacttcctggtgcacagggatagggcagggagaggcagggccttgcctttgctctccaccaggtgtgagtgcctgccataccctgaccctctgtctacgcacctgggtcccggcggagtggctggaccaggcctccccggaaggggcaccagccttgagtaaacggatgcccacagtgtctgggtgctcccagggcagggccgcagggcctcagggccatacccgcctcgcaggtggggcgggcgccctggatgcgctccccgcgccgggcaccaggcgtcgcccccgctcctcgcagcgcccaggcccccgcccccgccgcggagccacagccggagctggagccgaggcggcggcgggacgcggccggccggacaaatttcctgctaggctgcggacagcgggcggcaggagccggcgcgagcggcttcaggaacccacggcctctgcgcgtccccgcgacccttcttcgcgcccggcgaagacagccgggcgccccggagggcggcgggcaggcgcccgggagatgc

SEQ ID NO: 6215 - DNA, 2300 bp, Homo sapien
agggaaaattcatttcatggacatcttgttgccaggaatcagtgtgattcacttttcatttcaggatgatgttgagtcctctgtgttattcccagtgtggacgtggagtagtgactgatgtctaattatttggaagggagagagcttctctaagaaggacatgcaatgtcagaagcttccgttgcttggcaacacgtaactttacctatgtttcaccaaaggcagtttaaagggctaaagatgcccattcaggcaatagtagattacaaggaagatctcgaaagctggcccgtcaaaatcgctttccaccatagaaataaacacctaagagagggtttgggacgtgagtggttgcgtgttgcacaccagcaaacagggtgagaaagaaggcagtggtgccatttttccagaatcatactgtgtacatgccctgttaaagttgattcaaattgctcattccttacagtaaaacctccaacctgagactccccttcagaatgtatgcccctgcagcttccccagtttttatgactgtggcacctcactggaacccatgccagccccttcccatccagctagtatgcctcccggcattcggcttcagcctccagccttgtttcatgtcagcagctgagctcatgaaaactcttctttccaatgaaggaggaggctgagaggtgcaccaatggctggatccaggcacacgcaggctccgagttcacagaagcagggccatcatgtcccggctgttgggagttcctgtgaatgttgcaactctcatttctttttgaagtgggtgtgtaagaagcatgtctgttcattgtggcagcctgagttttggaggccccacaacattctttcctatgtggaaagagttttctttttaattcagaaacaacaaaccttctcagcctcaaaccaggccaatcttacagtgtcatggcaaaacaaagaaagaaagaaaaagaagaaattaaaacatgcaaagcaaaaaacaaatagaaaaaaaaagaacacagtgcaacagtcaaaatcaggttaacttaatgaatttgggccgaacttagatttaacatttccttgaagtttggctcccataaatcacctgtctttttcaaacagcagcctctgaagtacaatccagattatttctccccttttgatcaatgcttttcccgggaatcaaacccagctcttaagagcatttataatgaaagctaaagacagctgaccactaactggccctgaacacccaggtaaactctgagtttgcccacaaggaaaagttatggcgtccacatgctccaaaggggactccatgttcaaggtaatctcccaagtccctctgctgctgctggctgtgaggcatcaacatcctcccccaacctggactcaggggctgcagcctcagaggaccagcgtcgtggagttcaagttcagttcagcacttgaatagtacatccttcaggaagccagggcactgaagactgaaaagcagaatcctaacattcatgtatattttaaagccagagttcacaaatcggagaccttaggaattaatataagtacatgtacatgtatttgtggctatgtgtactagttacaaataagagacaagaaaggagatatacaaataggagaacaaagcatattcaaaaatgaatatggcaaaagttcaaatgaatgtgaactaacaacaaaaaaatatagtttctcatttctaggcatattacttctgctttttcaaaaccatttctcaagttattgataataatacgaattctgtccttaaattgctcagtgaaggagagtaaattaatgtattttaagatgatctttctgttttgaagtcctgctgcttccgtcacatttacaccagcagacacggacacttccatctgtccccattcgtcatcactgtgagatgaagctaagagttcgattcactaagttttatatagccagtaccatgtgaaacacaggatttgatttaagtgtgtggtgtgactgcaatgggaagcagtcgaacacacagcagcaatactgcaccatcaccatgacaaccagtggaaataatggccccctttgggaataaaagagatctcaaatcctgttgcagtcagtagcgctggctgtctgcagtagagatggttttcaatgattgtttcagaaattccttatcaacagaaaatgaacgagacggggagttttcagaaaataaatggatttgcagacaacttaacgtcatcatcgaagtcaccaaagaaagcaaagcagcgactggggaagctgaggctgaa

SEQ ID NO: 6216 - DNA, 2300 bp, Homo sapien
tctgtgtgatgcagaagtgggaagtttcattgcctggggccccgggagatgagggcagatgtacctgggtacattcgagagggaggagggggaccgaggcccaagctttctggctgagtctggagtgtgagcagcagccaggccctccgtggggctgggctccaggctgcccctccctccgtgtcaggggtcttcccactcagcctgtcggagttgctccagggccctggcagagtggagaggggtgctctctggagctgcaagtgtggaagcctcaggccagctcacttccccagggaagctctgctgtgggcaggttggaggtcaaaggcgggggactgtggcagccacacccagccactcatcctagcaccaaccgaaccttgtgtggggccagaaccagctcctctgggccagggtcacagacacctgagtgtgggggctgcagaggacagccaggctgccaggctactgacactgctagccagatgggggaggcacggaccccacctggaaggtgggcacttagtgggtgggccaggtgaacagtgccctctctcacggctggggccacctccgcatcacagaccagctgtttcctctgtgaacttcaacatctaatggtcacccacgtccctaaaacttcatcatttatgagaaacgatggtgcggaccactcatagggtgccagagtcagtgccaggcctgggagggtaggggatgagggaggaaaagccacaccttccctggggagtttataacctagggtgcaaggcggaaggcatgagggtcccttttagaatccagatgaggggtgtgaggtgagcggagcctctggggctgcggagccctcccagtgcccggagcaccctcgggaggccgtgccagccctcaggaggaagcgcatggaccctgcgctgggctcagggcaagtgattggtgcttctgggaacttaaagagttggaagcccggtcgttgccttcgaggggcttccccagaaacccgggagccaaggcagtcatgctgaggcctgttcactcatggcagagcgaggtttgcgctttgaggcatccagggcccctctgggtccacaagagaggagtccagtgggcttcttggaggtgggggcctttgagattgtcctcgaggagtgggaacattttggtgatgagggggctgtgtggccagcgggggaggagcaggaacaaagtgcgacgttgggagagtgggtggggtccaaaggtggcagcgaggccaccagtgtcccttggaatttgggctgatgagccaggggtgggtcctgagcagcaacaaagccacttagctgggcctggggctgtgggtctctttctgggtgaggaaggtcaacctgtcaggtacaaaggacacagtaagaggccggtggtggctgggcactcggcctctgacaggtggaatcgggacctggaggctctgaaaggtggggtcacagtgcgccagggccacaggcctctgcccagccccagggccaggccgcctccctgtgcctgagctcctgcccaagcccaaggggccctaagagctgagctacgccgagtcagcctcccgcgctgtcctaggaccctgcagtggacaccggccccttcacccttctccagcttcttagcaggagagccaggcagccaggccgtgtgggggtctggggaactcacccctgtcatgcctgccccagggattttggacaagtcacctcacccactcctcagtcccggattctttctctgagtcaacagcaacaactaaagtcgcttctctgttacctcgtggggccttttcaggatgatggatccactttacaaaatatagtttggggttctggtgtccaggaagaagggcttatggagggagactcttttgcaaactgtgaagtgaggtcaggggttagggtctttctgcttctcctgcaggccctccggacccgggcgcctcccagccgctgctggcctggctgctactgccgctgctgctcctcctcctcgtgctccttctcgccgcctacttcttcaggtaggagtgtcccggggcactgacttgccccaaccagctcagaggaggaaatgagccttctgatgctgtgggcgtgggctgtgcagcagagggcagctgagaggctgggtggctgggcctgggagacacacagaggccaggccttagcgcggctcagccatgagcaacaggagtagcttttcccggctcacctggtgggtatcactgtgccgagcgctgttggctctcggggaacctagaagtgtggaaacct

SEQ ID NO: 6217 - DNA, 2300 bp, Homo sapien
cttggccaatccctgagagggcagatggggctggggcctgttccccggcaggcaggcgacgctgagaccccctctcctccctgcagccccaggcccgccaggaggagcaggtccgagtagtgcgccagtttcacttccacggctggcctgagatcgggattcccgccgagggcaaaggcatgattgacctcatcgcagccgtgcagaagcagcagcagcagacaggcaaccaccccatcaccgtgcactgcaggtgagcccccagcccgaagccctccaggtggggtggacacaggctgcacccccccagtacccgcagctgtgggcagcagagcctggtcgctgcccctggccatggtattccctagagtctcctctctacctctccttacacacatgcacacacgacttcacttaagtacatacatgtcatcgtatcatacataagatgcatgtgtgtcatcttaacataaatgcagaatgcacttcagagggtggagttgggaaaccactcaaacacacatttccatgtgcttttgaagtcatcaaaaaattgccaggcagggctcggaggaacacactcctggacttcaagttcctgggtgggttttgagagactgccttactgggctgcattggcctacacccgccctctcccatgggctgggattcctggccatatgaggagtcccaactgggattgtagccacgctggtcctgcagcctcagcctggctcccaagtcaggcccaaaggcagagggacaccctgggcaggtgggacatgcttagtccgcaggtgaaggcgtgaaacacagcacgcccaggggcagatacgcaaatctggtcaagcccactggccacccacttgcctgccttctgtgcctctgtagttctgatcctgctgcacacttctgctggcagggacctcgacacccggcaaggttcttccaagcaggagcttggggtgtttctatccttgggtggtgctaatgtgctcctgaaactgcagttccatggcttgtctcacactggtggcgcccactctttgtgactgcctttcacccccacccactgtcccaccccttatagctggcagagctctctccctgcctggaccccaccggggtgcactcctggcctggccagtaggtggagcacacacctcggtttttggttttcctggtgccttccaagaaatcatttaggataaacttgaaatgagttccatagggcactggagatgcagaggtgaacaagatcccacctgtgagaacgcagatgcggggccgatcattgcggcaggacaggagccttggaataagcccacatgtgagattatggagcacagagggcagccaggcatctccagaagacctgctggaagaggccggtccaccccacctcctccagcccagtacacctgggctctcctacgagggcctgggctctgctcttgtggggtttatcagcaaatgaccatggtaaatggagatgactcaaatcggccttgctgggaagtgtcagttgactgttcctggttgtgaatgtccttaaactgcccctccctttcagcatcacctgtttcagaagacacccctggcacagtaaggagagggtatgccaagattacctccttcctagacctgaactgggagggtttgcatttctggcaagttcccaggtgccaactgtgctgctggtccagggaccacactttgagaaccattgccctacacaaggaagaggggaaatggtgatacttgcttaaaaacttgtcactggtcctgtctcattttataaaatatcggtctcctgtaattagggaggtgttttaggaattttacatttgctaaatcttgctcagaagttacactacatacaaatgatcaaaaaaaaattcagtcaaactcagatcattttcagcgattgttgcttcagtgctgatatgcaggggttggctgtcagctctccatttctcatccccaagtgcaagtcggatgatctgcattaagcgctttttctctgcagtgccggagctgggcgaacaggtacattcatagccctcagcaacattttggagcgagtaaaagccgagggacttttagatgtatttcaagctgtgaagagtttacgacttcagagaccacatatggtgcaaaccctggtaagaatctgaataaggatgttaccagaagagtggagaattatttcatgttgtatttgatgtatgtttcattaaaggaccttaagtacatgggggaggtgggaaggtaaaattcccaaggaaaagagccagctg

SEQ ID NO: 6218 - DNA, 2300 bp, Homo sapien
gtgggctttgtttgatcgtttaatgggggaaaacatggaaactcatgccccctaaaacgtttatataatagtatccccgcactgaatttttctacgtcagacttggcccatacaatttagagttgctgtcctgtgcttttatgttgctttcccagtttctctatttccatcagcagctgatatctttgtagttgctctagagcagagggctcagtcttttcaatcttgtggtccctttacactcttaagaattattgagaaccaccaggaatttttgttaatgtggatgggttatatctagctatatttatatattttaagttaaggctaaggaatttaaaaatattcatttattgattcattttaagatagtgatgcacctatttcatgctaacaccaataacttatttttatggaaaaaaaacaacaaaatgaaaacagcgctttagttcacatttttgcaaatctctgtaatacctggttgaaacggagacagtgggagtctcctcactgcttctgcatttgcagaaccacaccccacactcttgggagcatgagaatgagaagggcaagtaacacagagggtcattagataaatggttttgaccttatggactctctgaaaggaataggaagtcctcaggggtcccctgcatcgaggcctccctgatcaagggagccaagctccaagggttgctggggagctggaggaggtgagatggggcagagaggccgttgtcaccaaaagcgtgtttaggctccattcacttcaccccaggtggcctactgagcccacatggccaccagcgcaactgaagcagaccccgatagaatcctgtgtagaattattttaggattcacccatcttggcatgcacaagccatttcaattgaagaatgttttctaataacaaaacattgtaaacctaagtatgtggcaatagtaatgattaagtaaattatggtttcccgaagcccagtgctctgcagccatcagagagtaaaagcgagaatgtgttcagtggagatagcctcaggatatttaaaagcagagagcacaaagtatagaatcgtgttgtgtatgttatgacctttttttctgtgcttttgaaaaagagaatacacgtatagcaggaaaagacacaccaaactactttatataattggttgtttttgtgtttggtaagatgtatgcactgaagaggaaggtttcgattttttttttttttttttttttttttttgagacagggctttgctctgtcgcccaggctggagtgcagtggcgcgatctcagctcactgcagcctcgaccgccccggctcaagcgatcctcccacctcagctgtcccagtagctagaactacaggggcgccaccacgcctggcgaattttttgtagagatgggttctctccaggtggcccaggctggttctgaactcccgggctcaagggatcttcctgcttcagcttcccaaagtgcggggattaccggcgtgagccaccgcgtcccgcctgtttttaatttttagcagttttaaatcttctggcaatgagtaatgttatagtgtcccagatgtttggtcctttaagaaaaggatagcaggacgggttatctcggtgggagcgtgttccacctctgccctccgccagccgccctcgccggggatgcacccaggtattttcctccggatgcgtgagtggctcgcccgcggacacgccagccccgccccgcgagcccggtttccccgccccctccccgcccacgccctgcgctcccttcctattggtcccatgccgcgctttcccgttcaatcgcagcgcttagcgccagaatttgaatcttcgttttcgtttgaattgggcgggcgcgccgggctggaagaaggaagtggagggctgacgctgcgggcgggcgggcgggcgggaggactcgactcggtgggagccgctagagccgggcgcccggggacgtagcctgtagggccaccgggtccccgtcagaggcggcggcgggagcagcggggactgcaggccggggtgcagcgaacgcgaccccgcgggctgcggcccggtgtgtgcggagcgtggcgggcgcagcttaccgggcggaggtgagcgcggcgccggctcctcctgcggcggactttgggtgcgacttgacgagcggtggttcgacaagtggccttgcgggccggatcgtcccaggtgagctgcggccgggactcctgggagctgtccggggtcgagggctgagccgcggggaccccccgagctctgcggggacgggcaggggacagac

SEQ ID NO: 6219 - DNA, 2300 bp, Homo sapien
atatgtgccatataccagttcacacggcaacacctcactgtacggtaagttcgacataaagcacttagtacaaaacttgggctcttcctttcagttctgctagattcttttattaatgagagtgaggcaaaaacacagcctcctttctccagttacatttctggcatcagatgctccgtcatacatcatcatctgcagcaagtgactttggaaatagctgactattagcaacttaattgcccttgaatatacaatgcacacttgtgcagacgattcgtgaagacgactgccaacagacagtgaaattagaaaaaatggcctcttgggttacgaccgtatcgaagttttaaagaaggagtaaaagaagatgtggctataaatggaagttttagcagagtttaataagtgtctgccactccattttaggcaccgactaggatttttgctatgggttaaaggccagttgatgtctaatgtatgaataaacaggtaatgagtatcatccaaacatctattagttcactgaccttttggattatagatgtaagaaagatctttaaaatacgcatttgatagtaatggcttcataataaagtttttttttctttttcttttcttttttttttttttgagacagagtctcactcttgttgcccaggctggagtgcagtggtgcgatctcggctcactgcaacctctgcctcctgggttcaagcaattctcctgcctcagcctcccaagtagctgggattacaggcatgtgccaccatgactggctaattttttgtatttttagtagagacgggggtttcactatgttggccagactggccttgaactcctgacctcaagggatccacctgcctcggcccctcaaggtgctgggattacaggcgtgagccacggtgcctggccataataaagtatattcattatgtgtattttataaggctctgataattttacctgggattaaataaatgtcagtacctacatcaagacttcaattatagggcttttgaaaccatcaagtattcagaacaacgaaaatcaggaatttgaacagccagatatgtggggttccgtttatacccatagttgcttaatagatatcttgtttttcctggcagtatctctagggatgagcgaatggcaaaatttacatttgggcaaactacaaaaagacagagttaacttagaaggctgattgttatgaggatttttatatatgacggtatgatgttaaacgggttaatgagattgatgttgtatccaggcctttgttttttttttaagacagagtctcactctgttgcccaggctggagagcaatggtgcaatctcagcccactgcaacctccacttcccaggttcaagcgattctcctgcttcagcctcccgagtagctgggatgagtggtgtgtgccaccacacccagctatttttttttttttttgtatttttactagagatgggggtttcaccatgttggccaggctggtctcaaattcatgacctcaaatgatccacctggcttggcctcccaaaatgctaggattacaggcatgagtcactgcatccagcctgatgttgtatccaggtttttaaatactattggtcttggattgttatggatgctaacataagaaaatattttgaattctgatacacatcaaagagcacagaaaataatagtgaaaaggaagtttgttgaggagggaagcaattgagctggagacggttccaacagttgagtctatcattcattttgtagaaagcagttctcgttatacttcaattaaaatgctttccaaatgaacatacaataaaattgactttgtgtgtgtgtgtttagttctacgagtttgaaaacatgtataggttcatgtaaccacccccacaatcaggattcaaagtaaactcattactcaaaaacctgtttcctgccatctgcccttcctttgtggtcaaaccctcctcgcctctttaccccgtgatgctccttgtcactacagctttatgttttggagaatgacaagtaaattgaacgaagcagtgtgtaacatctttaagaccggcttcactcagcacagtgtctctgagattcatcttagatgctgcgtacgtacaccagtcagttcttcctttttatttctggctagtcattcgttgtcaaggtatgttcagtttgtcatccattcattagttgaaggacttttgggttgtttgcagtttttggtgtttataaatatagctgttataaacattcatatactgatttttgtgtgaacacacattta

SEQ ID NO: 6220 - DNA, 2300 bp, Homo sapien
agggattcgtcttaaaatattattcagataaacgtatgagtcatgtgttaactgcaaaactacttaacagcacacttgttagaatatcagtcggcactctgattccatttcggcattgtttttcctttggttctattaagatcccggttctaactgggtcctggtagtaacaggctgtaagtggccaggtgtatagcattatttcttagtagtgtggtgtggtgctggtggtttattttccctatgcacacatgccctaatatggaaggatagtttgtacacacgtagggtacgttatcatgagactcctttacagagtatgaaactgaggattagagaagtcagacgagtttcccgaagtcttatagaaggctaatggaaaaaaccagagccaagggcaaacatgtttcatctgtccttccacattagtttaaatgtgaatggctgcttggaacacagtgttgagaaggattccgaggctgtgtccaggttcagtggggaaaaagtgccttgatttgaccattatatcgtgtactcagggcctagtttatttcccacaagcagctatttaaaacatgtctcatccaaggcagggtcggggtggggaacctcagaggatcaatgatgcagcctgtattgtcaccagggctcatcccaaagcaaatcctgctgaagttctcctctgaacaacccttatcactcatgctaatatgttggatcctgcaagtcacaaatacgaaggtatgagcattggccgaatcccaacagggaaacttcaccgggaaggtgaagacccctttccattaagataacaaacagaacctagaaggcccgtagcatggtggcttagaacatgtgggccttggatgggatcctgccaaggggtgtgtgacctctccgaagcctccagggatgatactactccctggggtgcttatgccaaccacgttagagacaatggtttctgtacccattgcctggggctgccataataaagtgccacacactgagtggcttaaaacaacagaaacctattgtctcacacttccgggggccagaagtttgaaacccaggtgtgttaggatcctgctccctctgaaggctccagggaagagtgtcctctgctccctccgaaggctccagggaagggtctgtcctcttaggcttctggtggcttgcaggtgcagccctccaatcctcctccccaagcggccttctgcctataaggacacgagtcatactggatgaggggcccactaattgatggcttctgtaaagtccccatctccaaataaggtcacattgtgaggtactgggagttaggactccaacatagcttctctggtggacacaattcaactcctaataacgtccacacaaccccaagcagggcctggcaccctgtgtgctctctggagagcggctgagtcaggctctggcagtgtctaggccatcggtgactgcagcccctggacggcatcgcccaccacaggccctggaggctgcccccacggccccctgacagggtctctgctggtctgggggtccctgactaggggagcggcaccaggaggggagagactcgcgctccgggctcagcgtagccgccccgagcaggaccgggattctcactaagcgggcgccgtcctacgacccccgcgcgctttcaggaccactcgggcacgtggcaggtcgcttgcacgcccgcggactatccctgtgacaggaaaaggtacgggccatttggcaaactaaggcacagagcctcaggcggaagctgggaaggcgccgcccggcttgtaccggccgaagggccatccgggtcaggcgcacagggcagcggcgctgccggaggaccagggccggcgtgccggcgtccagcgaggatgcgcagactgcctcaggcccggcgccgccgcacagggcatgcgccgacccggtcgggcgggaacaccccgcccctcccgggctccgccccagctccgcccccgcgcgccccggccccgcccccgcgcgctctcttgcttttctcaggtcctcggctccgccccgctctagaccccgccccacgccgccatccccgtgcccctcggccccgcccccgcgccccggatatgctgggacagcccgcgcccctagaacgctttgcgtcccgacgcccgcaggtcctcgcggtgcgcaccgtttgcgacttggtgagtgtctgggtcgcctcgctcccggaagagtgcggagctctccctcgggacggtggcagcctcgagtggtcctgcaggcgccctcacttcgccgtcgggtgt

SEQ ID NO: 6221 - DNA, 2300 bp, Homo sapien
cttaaagccaggagttgaaaccagtctgggcaacttagcaagaccttgtctctctaaaaaatactttaaagattggccaggcaggtggcacacacctgtagtcccaactactcagaaggctgaagatggaggaggatcacttgagcccaggtggtcaaggctacggtgagctatgataacaccactgtaccccagcctgggcgacagagaaaaaaccctgcctccaaaaaagagaaaaggggaagacacagacgcaatggagaaagccatgcaaagacagaggcagagatggaagtgatggcagccaccagctgagaaacacctggagtcaccagcagctgggggagggaaaggagactgctcccctcacgccttcggagggagtctggtcccgccagcacctgattacaaactccagaactgtaggagaagacatttctgctgctttcatccccccagttggtggaatttgttgcagcagccccaggagctcctgcagccacctcacctgcagaacagggatggcagcggccgccctcacgaggccatacccaggttccagtgaaggcgacctggcttcctggcatgtgcagagtgctcagattgtggtggcggctccttggcttcctggcatgtgcagagtgctcagattgtggtggcggcttcaggttagatttttgcatcagacaagcccaggttccagtccctaattcctagctgtgggaccctcagggatgtatttgctctcagaagccacagctgcctcacctgaggaaaagcaggcacgtgtccaccctgcaggtcttctttggcatttaatggaaagttctttccgttgcccatgcaacgtgcctgtcattttgtatgacggggtaatgcccagaccactgacttcagtaccctaggccgtccctgaagggtggggaatttatgcagcgtcttttctggatggaaagctgttgaacatggaggttcgtgggattgtgatgtgcacctggcatgggtgtgtaacatcacaactggatctttgacgaacctataactggggttgcagcttaaggtggccaccctgcgagactgtgccctatgtcagggacactcagaagggcctctctgacagcaaatgccaggggcatttatgagccacatttttaaaagcagcaacaaataaggattcccaaagcccatgccccccactggctaggcctgcctctgatgtccacgacaacattcacagctaagcttggtcactggggacatgtatttgctcaaaaacagcaaggtacatttttaatactaatggcatcaaaatgaatcctaaagccactgtaaataaagcattgtagggccaatgccacaacagacataagtagatcaatggagccaactggcccgtccagaaacagccacaggtctgtggaatctcaggatgtcatcatatggcatttcagttccgtggggaaaggagtcatttaatacatggtatcaggacaaactggccaagctatttggaaataacgcaattccagaaaccttagggttctaaacatttgttaaattgggttttaactgttactgtatcagctgaaaataggagaaacatgcatccatgtctgcatttgcaggaagtgcctgagaacacggcaagaactcagaagctggccgggcacagtggctcacgcctgtaatccgagcactctgggaggcaaaggtgggcggatcacgaggtcaggagatcgagaccatcctggctaacacagtgaaaccccatctctactaaaaaatagaaaaaattagctgggcgtagtggcgggcgcctgtagtcccagctactcgggaggatgaggcaggagaatggcgtggacccgggaggtggagcttgcagtgagccgagatcgagccactgcactccagcactctagcctgggtgacacagcgagactccatctcaaaaaaaaagaactcagaagtcataaagaagaaggttgacttgcctgacctcatgaacctgttggaaacagaagacaaatggtaccctaggagaaaccattggcaacatgtaagacagaaagattgtgtccacaatatataaaaaacttctacaaatcaataaggaaaaggcaaaccacccagaagatagatgagcaaggaatatagacaggcacttcgtaaagggaaacatacaagcagcagctggaagcctctagaaagagcagcagaaggacccagtaagcttgagagtgatcacctggagtgacctccaggggacctcccacctcacgagtgatcatagcatgaca

SEQ ID NO: 6222 - DNA, 2300 bp, Homo sapien
ggtaatcagatttaaatcgccttggcgcgtgtaatctgaattaaagatactgtaaatgattttaagcatgatactttcgttagcgcaaggaaggggcacctctagcacaggctggacattttaggaagtgtgctataaaggaagcattgtttcctatttccaacttcatctttcccgaaaaggcactttgcatattctgacaataacgcttgcctggccgcttgccctgcgtgagcccccgaagcagctaaacacgcagagacaaagcgtttctcaaccccaccctccctcgatggccaactttattttgcgttgtttctccacgaagaaagtgttccctcctacaccagtgtctgccgagagtggaaagcgctgggcttattaggaatacagaaattttcttttaatttatcatgaacagtttccatacactttgatttaaggttattaacattctatagacagtggcatctttaatatgtggctatcgcttctaaagactaatctcattaccctcaaatagtcataaaatatgattttattatacttacgtatttaattagacggccggcaccgtaatggattttgagatgggactggcgcaacagctttgataattcacttatctttggcaatagtcattaacccccaacaccagcaaaatagatctctttccaacacatcttttttctcactccttccaagaggcgtgggggtccccagacaacgtgaatcggacttcgactttcccgattaattaaaatattaacgtacacacgctgccaattcacgggaaaagggagtgctgccccagacccggcgggaggaggctgccctgcaacacacttgcgccctgcaatcttttttttttttttcttttaatcaaaagggcctgatttctcttggcagggaagtgcctaggacagttcctggtcgtcccctgggtctctgctccgtgtcgcgcagacgtcctttgggcgggccgcgctcctgggcgcggagtcccggctacaggagctgggccgcggggcccacagtctgcccgcgcccggctgccctcccgattcctagaaaccaggtcgggaagccgcgcgccgcgcgctcacccgggtccggcggctccgagggccgggccacagcgcccgcggcgtccgcttggtttttggagcagttggctccagggcggtctggccaccgcgcaggtcgcgcagccagacacccggctccgggtcgccggagaggccgggcgcgcttcccgtcggcccggagagaccggagccttctttgtcactcgctgtgcgtaagaacaggccaggggccggggtctgccgcggccaccgggggagagggagcatctggcagaccctgcctccgacgtgattccctgcccggcactcggcggcctccgccggggtaggaagcttggggtacctggcggggctcagaccgggaccggccggccctgcagcagccttaggtctgcttagaaatcaggctgagctgcgcgtccagccttggccggggagccctgggcacccctcctcccagtccgttgcccgctcctccctccggcgccctccctgcggtcgacctgcctcttcccacttctccttcgggcggccccaggacaagctgcagccccttgcatttattgcatgcatctgggcaacttggggcgcctcagcattttacagccccccgccccgcccatcgtgttcgactgtgtggcaggttttgcagggaggtattaaggggccaaactgcaattgtgcagtggctgcgtttgtttcttttcaagatttatttgggcgagtagtaacttccttggccgcggctggacgcgaggagccgcggtgcgtggcggggggcggcggcggcgctcggtggcgctcggcggcggcggggctcgcggggctcgcggggctcgggccggctcgcggcgccgtcaggcagtcagtcggcgagcgcggcggcggcggcggcgaggggcgcggcgaggggcggccgctcccatatatggcgcaggcaccgccccccgacgtcaccctctgacagcgccgctcccgggggcttcgagttttggctcccgggaaagggtccattcctcggggagagagggctgagttttgtgcgcctccgtccgctgcgcgcgccgctccaggccccgccgcgccccgcctgcgcccgggactgcgccgcagcactcactgccccgtttatttgtctttggagcaggcgggccgcgccagaagcgggcgatcccgcagtgtcctgcagccgcggacgccgcctggctagga

SEQ ID NO: 6223 - DNA, 2300 bp, Homo sapien
gcacttaccaagcctgtgtagctctagaagaaaaaaaaaagcaaatatgcggtatgttggctgctcactgctgcccctagcgaggaactttgaaataaacgaggttaagtaagaactggccaatttgcaagcagaggtggaagataaaatacaggaatgccaagcagctctgtcttccagctccaatcctgcagtacttctttcagtgcccctaagacgctaagctccttcctccaacactgttttttgtcacctcccatcctgcctacccccggtcatccttcaagtctcacacatacctgacttacccacgcaccctgggatcttgtgcaagtctccccattaccatctcatcttaccctctgctcatcagttaatggactcagcccaagaagcactaacacgctcaatgccgggtaattttctgcgcgtgttcgctccccacgtactcgtcccccaacacccagccctgggcctggcacgtggcaggcgctcagtgaacgagactcaggaacagtcaggtgtagacggcaggagaagacatgacacggataccaagcacccgaggtcctgcaatgagtctcggcccatgttttagggagcctgggtctggagccccagtgagcgtgtgggtcaggaaggtgcccgagctccgcgcccgaccgcgcaggcgcgaaaccgggagagcggcgtcacaaccccgccctaacaggccacgcccatcactggccacgccctcccagggacgtacgcgagcgtgcgagtgtcttgggccaggcctcctcacaggcagggccgcgccggcaaaaacgaggcgcggtgggaacccgcccaggggccatccgccctcccgtccctaacgcccaggccccgggggctcaccacgtcccccggaacctgcagatcctccgccctccgctgtcgccagcggccgagcgctaagctgtccatgcagccccagggtcaaaccctcccggcatctcaggcctggccgaggcccgcgcaccacgcccccttccgcacaaggccctggggagccaataaggagagggaggggcgggacgccgcgggaagcgcgagagcaccaaggcgaggaccgcaggcaggagtagcagagaccagagtcttctgagactattgggatgctgtgggcgttgtccgtctgccccaagtcattacttcgcagagaggtccctgcatatctctgcttgtcgcttctcccttcacaggagcagccgtggggctctaaagaaagcattctttcaggatcccgccaaacttttgacaacaccccgtggatcggctggaggagcgcccgcctcctctgtcttatgattggttgttaggcctcgtggggagccgtctccctgtggctggttggctaatagatggcgcagcgggtcaattagcttgagcgagacagcgggtgtttctgggagttgtggtccgcagggctgcctcgcttccgggtgggagctgctgttgccgcggtgggaagacgcagagctttcaggccagccccgcgcggctcacggcttttgtggctggtggctggtggctgctggttgggaggccccggaaggacttctactcctccgtaggctggagggcactaggaggtcgcaggtgctgagctgccggggcctttgggctgtgctgaaggggaaaagcgcagccactgtcgggagtgtgtgctgtggaggcagttgccgcggtgatgttcgctccgcctggcccctgccggggattcagccaaccaaccctcaacagccggcggcggctcagtctctggcccggcgcggtgctgagcaccactgagccctcatcttagggcaccgaggcccggactcctgcagccgcatgtccaggcccctcctgccttagcacggagctcccttgactgctccaaacagcccagactggcgccttttttggataaattaaaacggggccaatccgttgccagcgattggctaacgatgggtacacgacctagtacgggccagggagaagtaagcgaggtctgttgaggcagagtttcgggaaagatcttctagttaaaaggggagttgggtgggtgggggctgttttcttcctgttgtccttgcccagtgtaagtttcctggagctgcagcagcctttttgtcaccatgagggcagctggtgggaaccctaggaaagcaggaaatcacctagagccggaacagcctgagcctctgaaccaacccacagctgactacccgtcactttgtcgtgtctctgtgatttgagtccatcattctgctgcagttgaaggtatc

SEQ ID NO: 6224 - DNA, 2300 bp, Homo sapien
tatgagactatttacaacctttatttatttattgtatttattttatttgagacagggtctcactctattggccaggctggagtgctgtggtgtgatcacagccaactcactgcagcctcaaccttccaggcccaagcaatcttcccacctcagccttctgagtagctggtactacaggtgggcgccatagtgcccggctaattttgttatttttattttgtagagacgggggtctcactgtgttgccgaggctggtctcaaactcctgggttcaagcaatcctcccgctttggccttccaaagtactgggattacaagcatgagccactgtgcctggccctatttacaacctttatatatcccacttagggtgaatatttgtgaatactcacacatttctgctatagaaacattgtttgactacgggggcatacaatatatctcaccttttttaaacattcaaaaaattctgaatttcacaaacacatctggcctgaaaggtttttgataagggactgtgaatcagtggtggcataattagtcttaggagtactaactaataggagaaatgttacatttgttaagtacttagtttgtgtccagcattgttctaagtatcttctaggtaaatgcctcatgtaatcctcacgatctctatgctttatcatcctatcctttataaatgaggaaactgagggagattaactatttaatttgctgaggatcatgcagcaaatagcccgaagagggattcatgcgtttcaccataatggttaagaacagggctttgtcaaaggataccttcaactgcagcagaatgatggactcaaatcacagagacacgacaaagtgacgggtagtcagctgtgggttggttcagaggctcaggctgttccggctctaggtgatttcctgctttcctagggttcccaccagctgccctcatggtgacaaaaaggctgctgcagctccaggaaacttacactgggcaaggacaacaggaagaaaacagcccccacccacccaactccccttttaactagaagatctttcccgaaactctgcctcaacagacctcgcttacttctccctggcccgtactaggtcgtgtacccatcgttagccaatcgctggcaacggattggccccgttttaatttatccaaaaaaggcgccagtctgggctgtttggagcagtcaagggagctccgtgctaaggcaggaggggcctggacatgcggctgcaggagtccgggcctcggtgccctaagatgagggctcagtggtgctcagcaccgcgccgggccagagactgagccgccgccggctgttgagggttggttggctgaatccccggcaggggccaggcggagcgaacatcaccgcggcaactgcctccacagcacacactcccgacagtggctgcgcttttccccttcagcacagcccaaaggccccggcagctcagcacctgcgacctcctagtgccctccagcctacggaggagtagaagtccttccggggcctcccaaccagcagccaccagccaccagccacaaaagccgtgagccgcgcggggctggcctgaaagctctgcgtcttcccaccgcggcaacagcagctcccacccggaagcgaggcagccctgcggaccacaactcccagaaacacccgctgtctcgctcaagctaattgacccgctgcgccatctattagccaaccagccacagggagacggctccccacgaggcctaacaaccaatcataagacagaggaggcgggcgctcctccagccgatccacggggtgttgtcaaaagtttggcgggatcctgaaagaatgctttctttagagccccacggctgctcctgtgaagggagaagcgacaagcagagatatgcagggacctctctgcgaagtaatgacttggggcagacggacaacgcccacagcatcccaatagtctcagaagactctggtctctgctactcctgcctgcggtcctcgccttggtgctctcgcgcttcccgcggcgtcccgcccctccctctccttattggctccccagggccttgtgcggaagggggcgtggtgcgcgggcctcggccaggcctgagatgccgggagggtttgaccctggggctgcatggacagcttagcgctcggccgctggcgacagcggagggcggaggatctgcaggttccgggggacgtggtgagcccccggggcctgggcgttagggacgggagggcggatggcccctgggcgggttcccaccgcgcctcgtttttgccggcgcg

SEQ ID NO: 6225 - DNA, 2300 bp, Homo sapien
gtttgtgttctcaccaccacaggcaagatacaaaatggttcctcatcactctcctgttgcattttaaataacacaatttaccgtgttcaataccatgtatttctccaggtgaggtatacatgtgacaggctccaaaaggcttttaaacaccacagtagtgctgcccaagaaaattcaagggccacgaatgaaagttgcctatgaaattagacatttctcaggagccaaaggtaaaagagaccaatttaaataatatatttcagaaaaccgaatatatccaaatatcctcatttcaacatgtaatcaatataaaaagtatgaatgatatgctacttttctcgtacgaagtctttgcaatccagtgagcccagtcctctggcagctgttagcatggactgagtacctcctatgtgtctgactctgatccaggcactgagacacagatcagctcctgccctttaagaacacaggccaatggaggacaagcacagttctacaacatgagacaggccacggtagaagcaagcaaaggaggcctgggaacacctggctagtagggaaggctctgtgggggcttggcctcaaagcccagggacagcagggggaccagtcagaaggagccccaagtgtctgggtgggagcgatggtgttccctgagatgggaaccaagaggagaggcactttggagggaaggcccagtgtggtttggggatatccaataaaagatggcccctcctcaaagttagtggatgctaggctctgggatgcaggggagggttctgggcttgctattgaggtttccctggaggttgatgtcactgggggcatggagattactcaggccagaaggtgtgtgggaagcatggggtgtggggtacagagtacaccacatggagagccaacatcagggggattcccaagggagaaagacaagccagggatcatccaaggaggcaagacgggaggagtgcagggatctgtggacccacccagccccttctgttctgaggttacaatgggtgatggctctgtggggctgcaatgagtggcggcacgcgcggagggccaggggaggagggacatgctgtgggctccgggttcaggtcccaggactgaattggaagcaccctgtctgtgttgaagttcaagatctaccacttctgttcccagacctcccagttcttcctcacctttatgcaatttcatttttgataatttcagcttcctaaatgtacacatctgacttcactttcactcacatgtctcacccccacccctccaccggccccttctattacagacccaggagacacaggaagtgcaaggaaggtctggagccccaaaagccaggagcctcaggagtcaggtgtcctgacagccaggaaccctgacacccaggagccctggcacccaggaaccccaacagccagaagcctctaccaccaggagccctgacagcaaggaaccccgacacccaggagcccctactacagccaggaagccaggaaccctaacaccaggagccctgacacccagtcaccccgacagccaggaagccaacagcaagaagcctctaccaccaggagccctgacagcaaggaaccccgacacccaggagcccctgctatagccaggaaccctaacacccaggagcccctacagtcaggaaccccgacacccaggggtcccgacagccaggaaccccgacacccaggggtcccgacagccaggggccattacggccaggagccccgacagccagggacctcgacggccagaatccactacatccagaagcccttataaccgggaacctccatagccaggagcccctacagccaggagccccttcagccagggagccccgaaagccaggagccccgacagccaggaaccataacagccatgaaccccgggagccaggaggcccgcagcggagtgcccagacttggcagggtcagagccccccagcgggatccagagcccgccgccgaggccccttttgggatttctcaggctcggcagcctcagcgcaggcaggggcggggctttccctcgcgcagccgctcagctccccgtggccccgcccacatccggccgccggcactggattgcttctgtctggcggcggcagcatggcggcgggggcggctgaggcagctgtagcggccgtggaggaggtcggctcagccgggcagtttgaggagctgctgcgcctcaaagccaagtaagcggggcggcgagcggtaggagtgaggagccggagcgggagcggccgcgagaccgggccggtgtggggc

SEQ ID NO: 6226 - DNA, 2300 bp, Homo sapien
tatctgtcaccaaatcctgccccttctaccttcgaaatcctcatgctgctctttgcttctgctttcctgacactttattgtaggcttattctcttctcgctggtattatttgatcagtttttacagtttgttattcctttccttacccataggttagttgtccttggttctttttgccatggaacatatttctgttcgtgatttttcagatttttttgggaggtggtattatatttgaacagaattccataaaactgaaggattttttagttggatatgaccatagatatctttgccaagataattttgtgtgaaaactaactaaaatagatactgagttattaatatattctgtgtgttcatactataaatgtttagaattttttttttttaaatgggtcttgctctgttgcccacactggagtgtagtggtatgatcatggctcactacagcctcgaccccctgggctcaagtaatccttccaccttagtctgccagaatgctgagtacaggcatgagccaccttgcctggcctagaaaaatcttttttttttttttgaggcagagtcttgctctgccatccaggctgcagtgcagtggtgtgatctcagctcactgtaacctctgccttctgggttcaaacaattcttctgcctcagcctcctgagtagctgggattacaggcatgcaccaacacacccggctaattttttgtgcttttagtagagttggggtttcaccacattagccaggctggtctcgaactgccgacctcaagtgatctgcctgcctcggcctcccaaagtgctgggattacaggtgtgagccactgctctgggtctagaaaaatcttttgtagcataatattaaaaagtataaaaaaaagtctttgtgaaaagcagttctattcttttcctcgttttgcactggcatgccttcattttcaacacttactgctgtttctatggtcacggttatgtctctccatcactataccacatttaaaaagtaaataatgatattattagtaatgtgtctacaaccatttttcacaaacattgtgccattaatacagaaattcagtttccactttgcccaggggtctgaaaatatggttgatttgcctggctttttttttttttttttcgtttactttaagttctgggatacatatgcagaatgtgcaggtttcttacataggtatgcatgtgccatggtggtttgctgcacctatcaacccatcatctaggttttaagccctgcatgcattaggtatttgtcctaatgctttctctccccttgccccccaccccctgacaggccctggtatgtgatgttcccctccctgtgtccgtgtggtttcattgttcacctcccacttatgaatgagaacatgcaatgtttgtttttctgttcctgtgttagtttactgagaatggtggcttccagcttcatccatgtccctgcaaaggacatgaactcattcctttttatgactgcatagtattccatggtatatatgtgccacatttcctttatccagtctgtcattgacaggcatttgggttggttccaagtctttgatattgtaaatagtgctgcaataacataatgtgtgcatgtgtctttatagtagaatgatttataatcttttgggtatatacccagtaatgggattgctgggtcaaatggtatttctggttctagatccttgaggaattgccacactgtcttccacaatggttgaactaatttacactcccaccaacagtgatttacatgacttttaattgaggtggatgaatattcagatctacttcaaatgggcttcacttgaaatatcattgaattgaaaatttatctgaaagagtctcaagaccttgcagagtgcttttatgttccagtgttgtatacaacaaaattctagcaatatgaaaaacttcagacggttcttttaaagctttcttttttttctttttggtaatttatatcagtatttgtgtatttccaaaattggtataattttaaataaatgcatttaattgatttacaggtccctccttgtggtccatttctgggcaccatgggctccacagtgtgcacagatgaacgaagttatggcagagttagctaaagaactccctcaagtttcatttgtgaaggtatttatatttcaatgtcatgtcttttgtgaatttaattctgatttatgggttagattagggctgggtgcggtagctcacacctgtaatcccagcactttgggaggctgaggcgggcagatcacctgagttcagta

SEQ ID NO: 6227 - DNA, 2300 bp, Homo sapien
gccgtaattctgccatctagatatgttcattatcacgactttcttctattttttaaccacatctgacatcatagtgttaagtacctcctatatgcctccaaatgtctagctctagcctggatgtcttccttgaaatagggactctatagggtatggcactgagcccatctggaagcgatgctgtcccctgcgcgtctgttcccattcaagcaggcaggatgaagacattcagctgagactcagagctggcctctgcactgctccgcaggctccgctccctcctgtggctcgcctcgcttggagtaaaaaccaagtcatcccccgcctatgtctgccggcaaagcctggctgtcccctcaccccccacttcctcatctccctgtatgctgtgcctcgaacactgcacctcatccctgatgatttccttgcagctcctggaaggcaccacacaggcactggccacggggccttcgcacgcctgcttcttctctaggggtcagcagggagtctcgccttgcctcatgcagacttttacctattttttccttctcagtgaggactttcctggccaccccagtcacaattgaggcccacacaccaaggctagatgccctctccctgctttcccactatgcccaccggcctggaaagtacagaaaatcaacaagaagaatgagcaccctgcctcttccctacctgggaggaaccttccccgaaggccagccttcccagtgttttgttcactgctctgtcccaaagagctactgctggaaaatgcctggcacttgtcagctaaataaagactggttgactgaatgacgatacattgcaggaacctatatgatttttagcctgttttctttgcctactgtatcatgagacctcgctctggcactaacgatcttccctgatgtaatcgtgctgaccactgaccgtcctgtgcacagcgcaccatccttcatgcagccgtcctgcttttgctgatatttctagctcctcattctacacctgtatcctaaggcactgggcatgtgggtgggtcacacgacaggacgtgccagatcaagagtagtgaattatatcaaggttttagaaacatatttccaaattgctgtccagagctggccagactaagtttccaccatccatataaaatggcacctacaaaatacttcttagataccacatttatttgggaaactgaggagtcttttaaaagaaaaaatgttttactgaaaaggcagaggaagaagcaaactttcagatgcgtccattgatgtcagaaaagatgcctgattccaagcttgcagtctgactcctctcaaggagcgacccacgctgagctgggtgtgggtgtctcctgcagcagctggtctggtgaccggccactccctgcagggcccagctgagcctggtgccctctggaaacctgtccaccctctccctgcagggcccggctgagcctggtgccctctggaaacctctccgccctctccctgcagggcccagctgagcctggtgtcctctggaaacctctctccaccctggcccacagctgccccttcttccaaaccacccccacttttttatgtggcactcctgggccttcaccggtttctgctccaaatcactgagtgctgttcatggtcacttctgattaggtacttaacacactggcaccagggacaagcagtttctctttaaggcacccgggtcctggctcgtcccctggtgactgtaagccttgcagctcactgggcatcacacggctctgtgtgtgcactggttgcatggcagcgtttgactgatggagaactcatcagaagcatttgttctgcggacggtggcacatactgtgggcctccattaaagaggggtagcgcccccctcacctgttttctgggggctgatatcttgcggtagcgagatgggcatctgtcacccatggccctggtcgtccccttgctgaccctctgcatccctcttccgcaggtggctgccataacagccttaaggtgaccagcagccccgccattgccatcgccaccgccgccgccgctgccatggtctccgtggaccctgagaacctccggggcccgtccccctccagcgtgcagccgcgccacttcctgaccttggcacccatcaaaatacccctccggacgtcccccgtctcaggtaggctcggagcgccgtcccgacgcctggtgctgccttagcgagcgcgcggaggcttcctggttagatgcccctggcctgggcccaggcgctgtgggacctgaagcccggctccggttgag

SEQ ID NO: 6228 - DNA, 2300 bp, Homo sapien
gccgctttgtggttgagtcaagagctgctttcgactttccagctcttcttcagagccaagtagtggctcaaggggtcctgagctcagagcatcaggaagcccggaggggtgctggcaaaaacggacttcagcagaaccctttctaggacagtggggatggggctgggattccccaaaggagtgctacagctcccacagactgtggccaaccctaccttcccaggaacctgggggccacacacgcaaaaccctgcttttgcagagaacagcatgcaagccaggcacgagcacccctggccttctgtctctgcctccaagcagaaggaaggagaatctcctgtgcaaaagggactatgcggtgggggaggtggggggtggcaggggcatgtgagcctgcctggagacgcctccccaatatcctgatctggctctgaccattaaactaacacatttataacacatgtgcacatactaatatatgcacataaattaagggtgtaagtgaatagtaacagccttctaatgtgcagagctttctgattttaggtgaataaaaaaaatgccagtacttttgcatcaaagagagagataaacttgctaattgaaaactggttttcgtggaggaaaatatggaggcgccagctatgtaaatcagcatatgcccagatctaaaagaaatcaggccaggccaagaggaaattaagcaaatcaggataatgaggaaacaaccctagacgcaaattaaaagcactcgggtgctttaggccatctcaggaggttggcagtggacaggtgggaggtgatgcgaacacgggtttggagtaccaggcgtgtcagtgccgctgggtgggtgggtgcctgctctcccacccaggtcagggagggtttttcatgcaagttcttaaatgcatggatcataatgctgccttttgcatccagaaagacccttcaaatgcctctaacaacactggtctcgcgctggcattagctgtgcttgggtttcctgggtttagcgacctaaggggtttacagcgcacggaagtctctgcccagctgtcagcgcgcgtcgccaggggctgcactgaagctgtggacccgggatggggaggaggctggcggcctccgaagcagggtctacagcgggggagggctagcgccgtctggcggtggctgcgcgtggccagtgcggacccaggctcggctcggccggcgctgcctgcgtgtggtccgggcggagcgagggtccttggagcccggttcgtcctgggtcccaggaagctcggcgtgcagcgtcagaggccgcgtgtgctgggggagggaggagtacagactgtgcctgggggcatccaggacgaattcacagaggggtggtcctgccccacccagggggtgtcgtgggcaaaggccctggggccacctgcctggtgccttggagggcgtagggcaggagccgccgaggcccgcgggccactgtggggcgcggaacttcagaccaggcacccgcggctcaacttccgggccaggggacccgcgggggccttacgaacctgtttggcccatttgtgcaacagaaatccgcccgcgcctagcagcgtccggggccgcctgcgccggatccgcagcccagtaccctccgcgccctggactccgaggaggccaggtagagagcggctcgcgcggtccccgtctgcgccctcagccccgcgctgggcagcgggacatgcctggctccggcgccgccacctcggcttccgcttgcccttgagtgcggagcccggagcctccctcgcggtgcgctgggtcccagagggccagaggccaccagggggccggcatcggcgggagcccagccgggcgcgccctcggccctctcccacccacgtcctccgcggccgcccgggtccaggggcgcagcggggaggagaccccggccagggccggggagcgcgagggcggggcggggtccggcggggaggggcgcgggcgggcggggaccggggcgggggccgggtccgggggcggcggcggcgcgggcgggaggaggaggagcttcccgcgcggggcaggggcggagcgagcggccgcgccgcggagccaagtgagttcgctccggagccgcgccgccgccggcccagcatctcgggcgcccgccgcccccgccgccgccgtcagcgcggggatgtaggatgcaggcgggcgccaggttccagcggcggcggcggcagctgcagcagcagcagccccggcggcggcagcctctcctctggccgatggacgcagagccgccgccgccgccgccc

SEQ ID NO: 6229 - DNA, 2300 bp, Homo sapien
gtactgacccccttttgggaccttctgtgagttgcccaattcaattgagtgtcctgtcctctatgcaggctgggatggagttgagaaagacctgttcgaccctcattcaaatcctgcttgctgacatgtcctccgctctttggtgctgtggccagccaggaccagctcccctcaccctgtccctgcacccactgctacccagacgcttttcctgctgtggccacggaatctgaatggccggggtcctgccagctacatattagggtgggcttccttgtgtttgtctgggagcagtgtgcagatgtggattatcaaaaaccacgttctaccagcagatctgggcttcaaagagcaccttctattgtgtaaatggaattgaaaaagctcatcatggaaaacgagaagcattttcagctcctaaattagagaatttatggtgataaatcaagagtgtctgctctaataatcacaggaaaaaacatgataatatgatttaatcttaaaatatttctaacataatattagaaaaattatatttcagctaatgtctggttagcctgttgtgaatgtatgcaaatatctcaggaaatattaatatatactgccagctttagctaattaaagaaatagttttaggagtaacggcctcctgataatttaatcaccgttcagtctttgcagataattatggtatttgttattaagttctctctgattttccgaggaatgagaaatctgatataatcttttactatgtgagccaaaaattaaattttatttcattgtgaaaattgttgtgatctgaagattttagagccaagctccagaaacgcttctctcttctagaactgcccagtgttgtgttttacaggacttgaaccctgggttgctgaggaagtgaacagctctatggccaataaaaggcaattaggctgagataaattgttgtggaacaaatgatctcataagaaggtttccttatgcttacgccttatgaataatcttcttacaaagactttttgaggtataattttaaaaatgatactaatcatagcattttaaaaaataaaaaagtgaaatgacccaaagtgtttaatgataataagatggcccaataaataacctgcactgatgtaatccacattaaaggcaatatgattcagtctttaaaattaaattttcaaagagttcttaagactgttgtagttataactttaagtgaaaaaaaagagaaaattatttaagtcggcatgaccaaaaaaatccatagaaaaaaacggaaaggaaatatataaaaaatgttaagtaggtcccccagagtggtgaaattatacaggttgagcatcttgaatctaaaaatctgaaatctgaaatgctccaaaatctgaaactttctgagtgctgacatgatgctcaaaggaaatgctcactggagcattttagattttagacttttggattcaaaatgctcaaccattaagtgtaatgtaaatattccaaaatccaaaactcaaaacctttctggtcccaaccattttgaataagagataacctgtaggatattttcattttcttattttctacttctatttattctccacattatgtacctggcacatagaagatgtttaataactaagtattgctgagtgaatagtcaggataagaactcattactttttagtccatttttgggaacttaggttacaaagtctgcagggccagtgttgtggaagtcactgctctctccgactcttggcaggaaaaagagaagtagactgcctgtctgccaatgatggcagtccctgtgggatacaaggatgagtgtgcctggtgccctctctactggagctccagtccagagctggtgatgtgtcggtggacaaaggaccgtgataaaagaaagaatggagcaaggacagtcatcaagttctcagggtgatttgctcactgaacatccctgctcctctgaagcaggcaaagcaaggggacttgccttggccaatgaaattcaagtacaagtgtcatgtggcagtagggccatgtgacttgccttggccaatgaaatgtgagcagaagtgtcatggggctctgctgggcagaagctaagagccagcacttgttcaccatgtgctcatttcctgtctctatgacaggctgccgtgctccagtttgcgaatgcccatccacctgtgaagggctgagccaagccctgggcacgtggtgagtgacaggcagatctttgtggagggaagcctctgtgattgcaggacatttgttactcggtataacccagcctg

SEQ ID NO: 6230 - DNA, 2300 bp, Homo sapien
agccatggtgaagtttatggtagtttaaaatacctaactcactttgggaagctgaggcaagttgatcacttgagactgaagcgggctgatgacgtgaggccaggaattcgagacaattctggtcaacatggcaaaaccctgtctctactaaaaatacaaaaattagctgggtgtggtggtgcacgcctgtaatcccggcgacgcaggaggctgagacatgagaatcacttgcaccctggagatggaggttgcggtgagccaagatcgcgccactgtactccagcctgtctcaaaaaaaaaaaaaaaaaaaaaacacacaaaaaaaacctaacttggtgcctttagtaccatatttatgccttcagcatcagtctggtttttaaaaactgtctccatcagattaatttgatgttgataatttaaacgttgttggttttgtaattttgtgtatttagtttgggtttagagattgagcactgcagtgtttctaattttaggttcacgcgtgtttgtgtagcttaatgaaacttcccagcaccgacagttacaggagtttctcttttaaaagactcagtccattataattaagtttgaaaatcactgacagagctagaatacaattaattatgtaattttatacaccctctgggtataaatgacatagatttagacctttttaatccaatacataatattttagtttcatttaagcaagttaggttattttcagtaatttaatagtgacgcttctaagaaacaacctaatccttcttccaaagtctgaagattttgaaaagaaagaactcccaggccagggattcccgtgtgaggccagcgaacagtgccagccgcgggagcttgctgtgtagatgttggtggaaatccttcactaacacgattaaaacgcctttgcagacctgtcagaattgcattctagccacttttggagggagctgtttgagtcacttcagctttagggcccatttcttcttagtaggttgtttacaatagccatttagttgtttttttacttcctactataaacgtaccgtgggccctgggtgtgcccaggtcactgcgagcccttgagttggtgcccagcagggaggcgagcttgtagtgttctagctgttcctgagactcccccacactgcagggtaaggcgaggagtcccactgtggccataggacaagctctgatggcccctcgggaggccacgccaggccttatcctcagtccgcacgcgacacagcagcactgcggagaagccagcctcctccagagtctgtcatggaactccccctgaaaacagaaaatctttgtccaagtcacagacctgggattttttttttttaatttaatagttggtcataaatccagacactcccttcccaacccgaagggttagcctcaggacacctgaggactttctcactgcttagtggtggtgttccttctgccccggggtcttggcctctgttgagctggtgtctggggtctttgttatgctgtcagagatctcaaggcctccctgacagttgtctcacttggtaatgatgtcatcattatcagtggtggtaactgtatccagacaatgacatggaacttctactgtctagaatattacattgtacagaagccaacaaaagttattgcatagaatattaacaacatttttattactattatataagaatcagatttattttaaaagttaacattaggtatgcattataaaattaggcaacattcttcaggacccatttttttcctctatttttttcttttacagatgaattttctaaatttctaccctttatccttttatcaagacaacctagtctagataaatcctggtgctccaggggcccaggcatgggggtggagtaaaactcgcccattcacctgtgccggcaggttctctgcaccagaaccaataagtggccacttggtaattacaagtttgccaagacagttttgctttagtctcggagaaagttgtatatgtttatcgtccttttgctcttttttattaattttttggtattgtgactcctccccaaaaccgcatccggtaaatcgcttctgtattttgttgacagcggacatcatttccaccgttgagtttaattactctggagatcttcttgcaacaggagacaagggcggcagagttgttatttttcagcgtgaacaagaggtcagtaattttcagtccacaaatcaaatgcaattattcaacctttcgcatataacttagaagggaggaagcaaaattattttctcattgtctcatttca

SEQ ID NO: 6231 - DNA, 2300 bp, Homo sapien
ccgtggaggcttcggtggaaggaatgccctgcacgtcagactcagtgcagcgacgcggggcaggcgaggcgctcagcttctgcccgtggaggcttcggtggaaggaatgccctgcacattggactctgcagcagtgcgggtgtgggtagcttcttgggatgtcttctcctgatacttgatcagattggaaatatcaaggaacatctgtttagacttgaaagttcgtttagttccattcctttagcatatgtactaaagtgttaaacacctaagatattagatattggttatagagcaagaatgaaagtactggcgtccttgattttgaattatgaaatatttaatacttaatagaaaatttcacttagggcatacagaagattcagaggttaatatagatgtacctgcaaacccaccacccagaggttatcccttcatcaaaggaaggagaatgctcgggatacagatgaagctcctgttgtcccctccccatttcagcctgctactttcctcctggtctttttcactctccctctagcttcccagagttgctcatgattttgaagatggcatatgtcttcccaagcatgtttctccacttctgtaacagacttgttctgtacgtacgtaagcagcacctcactctgggcacctgtgcagcctgcttcacttgtgcagcactgtgcggttgtctgtgctggctcatttatctcagcggcttcgtggtggtccctgcatggccctgtggcttactgttgcccttcgcctctggttggcatatgtgtggcgtctggttcactaccactgtgttggagctgccacatcgctgtgtcacgctcctcaggcccgtgctggctctcctctagagcagactcagcagacactttctctccagggccagattgcaaacatttttgcctctatagctcatgcggccttttcacaaccactcacctctacccagatggtgcagaagcagccagagacagtatgtgcacacatgggcctgactgtgttccactaacacttgccttaaatacggcaggctgcattcagcagacctgctccagaaaacacggcaggctgcattcggcagacctgctccagaaaacacggcaggctgcattcggcagacctgctccagaaaacacggcaggctgcattcggcagacctgctccagaaaacacggcaggctgcattcggcagacctgctccagaaaacacggcaggctgcattcggcagacctgctccagaaaacacggcaggctgcattcggcagacctgctccagaaaacacggcaggctgcattcggcagacctgctccagaaaacacggcaggctgcattcggcagacctgctccagaaaacacggcaggctgcattcggcagacctgctccagaaaacacggcaggctgcattcggcagacctgctccagaaaacacggcaggctgcattcggcagacctgctccagaaaacacggcaggctgcattcggcagacctgctccagaaaatacggcaggctgtatttggcagacctgctccagagaacacggcaggctgcgtttggcagacctgcttcagaaaatacggcaggctgcattcagcagacctgctccagaaaacacagcaggctacattcgacaggctgaattcggcagacctgctccagaaaatacggcaggctgcattcggcaggcctgcttcagaaaatacggcaggctgcatttgacagacctgctccagaaaatacagcaaggctgcattcggcagacctgctccagatgcatacctagaagtggagtcgaagagtcggaaatcaagttcgttcttttttttttttttttccctgagtttcatctgagatttttttgagccaggattttttagctttaaaaaatatgtatggtcatttgatattcaaatttatagtactgaaattttctctacactgtgctttgttcattaaaacagctctcatgtttccttgcagaataaaagccgccctcattctaggggagaatataatgtttacagcacctttcaaagtcatgaaccggagtttgactatttgaaaagtctagaaattgaggaaaaaattaataaaattaggtggttaccacaacagaatgctgctcattttctactgtctacaaatggtaagaattgtgttctaagtggctgtttgatttagttttttatttttaattttctgtgtgtgtgtagattcctttttattttagaagttattcctgctttaaattttggggggagggtaagttatctagggtagcaa

SEQ ID NO: 6232 - DNA, 2300 bp, Homo sapien
ctagtttatagggtcctaatttgaaccaagatgttttgatccaaaatgttggtgatgtctgatacacagtgctgccgcctttgcacccctgaattagtgtaaatcacttttagtgacagtaacacgagttgtgcagttccatcatcatgaaactgctgatcctaaagtagaagtgtgatgggacccccgagggtgggcacttgaccccctccagccttgtccatctcttctgcagccaacaccacctcccacccagttacctgtgcacaccccaccctcagaaacccctgttcctcctgatcagaccctgccacaacccatcagctcacgtgctcattttgggagaacagtaggcctttactaggcccagtcttggttttattcaaggctgcttttgtaggtttagcctaaataaaacgggtataattggtggccctactgaaggtgtgtgagaagtctagttatttcattagttggtgcatggggaagagaccacagacaggtaattctgtacattgacttaggtcggtatttgagatcttacctctctaacagttcagagtgggctatttatgtatctgagcctaactgggtaagagtcagacatgttgctgtttttaaatttttgctcttaaattattttagtgccagaaaagggatataattaaaagaagaaatcttggccaggtatggtggctcatacctgtaatcccagcactttgggagaccgagatgggaggatcacttgagcccaggagttcaaagaccagcctgggcaacatagccagaccccatctctaaaaatgaaagcaaattattttatatgcaaattaaaatgttttcaataaaagaaggaatctttgtaagtattgcagctatcatatgttttgattaatgggaaatttgttagaggattggggtaggtgtgtgtttttaagcctgaacttggtagaactgactcttcttgctctagagaatccaagggtgtggtcagcactacctgggttaaaatgagggaagcctccctacacacacttttccaagttggttttttacagaattcagccagacaagactcagttgagagcttttctttttcccctaagctttcaaggctctcccttttggtttctaattacaagaataacaaaaaatactatcattaattttttgttttgattttaaagcttatgtttttcttccagctggatgttagtgagacacaggcctttttccttttttcatgtgtgatgctattcctcacgcctgagctctcacctctgaccataggcggcctgcagccagcgcccactcctctctgtcctttctatttctgtgcgaattgggcttccctaggaagcctccctgaccacagcactcaacacagagatgggggcgggaggtaccttctactttttgttttaacctcaagtgaagtgtaatatataatacatacctccagataagacatctgccctataagtgaccagctccatgaatgtttgtagggtgcacatgcccatgtagccagccccagaccaagaaatggaatatcctcagctccccagcaccctgctgtgcaccctgccagtacctggagccagtggaggtttgtggggtttgcaccgagaagcatagtcctagtgcagtgagaagaggtgtgtgcatctagctgcaaggagaggacaaagggaggggtgcagctgagccacccaggaggactttgctgtccagcgcctcagtgtggccactggaggacacacaggagagggagccgcaggcctcggtgcctgggcagtttgttaccctgccagctgatcttctcttcagcaggaacatgtcgacctcggtaatggaagcaaggggaagacttggaatagacagtattccattttgtagcatattttcataactctgctaattggttatttgggggtattgcctgtacagaattattacttagccatgaatataaacttgtcctctttcgttatctactataagtgttctaattatgtgctgctgtgatctttgttttgaattcctatttccttccatttttaggtcccaatattgaagcccatggatcttatggtagaagcgagtccacggcgaatttttgcaaatgctcacacatatcatataaattccatttcagtaaatagtgatcatgaaacatatctttctgcagatgacctgagaattaatttatggcacttagaaatcacagatagaagctttagtatccttcctcagagggacactggcgtcttcccgagggtgctctttagatagtaatt

SEQ ID NO: 6233 - DNA, 2300 bp, Homo sapien
tctgttgttgagatggagtctggctctgtcacccaggctgcggtgcagtgacacagtctcggctcacggcaagctccgcctcccgggttccagcaagtcttctgcctcggcctcccgagtagctgggaccacaggcaggtgccaccatgcccagctagtttttgtatttttagtacagacagggtttcaccatgttgaccagactggtctgacctcaggtgatccccctacctcggcctcccaaagtgctgggattacaggtgtgagtcaccgcacctggtcacgcctggcgtcttttaaagcatctcatttagagccacttgttcttcagacactccaaagacttagagagttcttcctgttccccaagtgcctttgcacaactggggagccctcctttgctggggccgtccgagtgtggctgtgtcagaggctgctgctaataagtggaactcgaggtcatgcttcccacaggcttatggctgtagggtgagtgtgcttttggcaccaccgagaagcggggtcacttctgcccagagcctgggtgtctcctcagaggctgccagcactgagtcccgccaagagccacccgttgcctctgcctctgtgcgtgagacctgggctgaggccgccagcacacaggaggccattcccagctgttggaatgagctcctgttcatgttgagcttggctggattggaagccacttcccttagctgaaagtctagcattttaatccagtgagctttcaagctccttttaggtgagggaggttctggttttgtttttatttttagccataaagaatgggcttgactttatagagcactgtagtcagcgtgtcccagtgtcctgaaacattgctgacccttcctccagtgccagcaggtagacacacgtccagtgacttcctctgatggggaagccgccagtcaatcccaccagactgagccgctgctcatgtgcagcggcgcccccagtgcctcggtggaatgtgcccatggaccgtgtgcagcagccttttcgcctgttctctttcctgaggttgagtgtgtttttaagaattcgtatttctactagaattcctgcgatgaggatgagtgtttcgtagcatttggcctgtatcttaagcataaaattcttgagtaaataatttcagattccagttctatttgtcatcagagtgatttatttgagtaaatgcttggcgtcggcacagctggcttcaagttaatttcagatgctaagccgacaaacacaggctcctgcatcaagaaaaaagagaaaaaacctaaagcagcttcaggtcaaggaagcacaagccaggtgcagtggtgctcacctgtggtcccagctaccctggaggttgaggcgggaggatctttctgaaaataggaatccagttttgtcacagtagagcttgtgtatattcagtattggagacaaaccttggctggctggctttgaccggcgggaccgtcttggtggttaaaatcaggaccacagcgttgccagtcaaggtggtcactcctgcagacccacaaactgtcgaccctccaaaaagcaggcagtttcttagaggcacagaccgctgtgtctgcatgaccatataatgctgtttgtgtcttcctgtgatgtgtatgcgatagaatttcacgtgctcgggcctggtgccatgaggacgcggagacactcctacaggaatgcggtggtgctgaacctgggcacacatcaggatgccccgaggagctcccacagatggcagtgcccaggaccttgcctagagattctcattcagggtccgggtgagacttgggcgtctacgcttctcatgcccatcccttgtccatagctggtgctagaatgtcttatccgaagctcttgcccacggaagtcacagaagatcagaaaacctagagaatcagaaagatcagaagacctagtgttgaggccaagcccttccagagtctctctgaaggggccacttcctacttgaacttgaaaatgatttgttctctgatttttaaacagaagctgaaaacattttattttgtttttcagtttttgaagagcctgaagatcccagcagtaggtccttcttctcagaaataatttcatccatatccgatgtaaaattcagtcatagtgggcggtacatgatgaccagagactacctgtcggtgaaggtgtgggacctcaacatggagagcaggccggtggagacccaccaggtccacgagtacctgcgcagcaagctctgctctctctatgagaacgactgcatctttgacaagtttgag

SEQ ID NO: 6234 - DNA, 2300 bp, Homo sapien
gtggacctagagtcagtatttgtttgcttttacttgggatgactgcgagcatatctggcctatcaggaaatattgctgatgaaactgctgcctccatcacagcccaacaaaaagctactgactcactggctaaggctgcactggacgactgcattgctttcgattattagctgagcaagcaagtctatgtatggtggcaaatacctcttgatgtgcataaaccctttccacgaagtagaaactcatatgggaaaaagtacaagccactaggctacactattctgaacaattctccatttgattttcttcgtaatacttttagttgactccctcgaataggttccgtttttcattctggcatacacattctctttttcattgtaatccttatgtgcaccgtacttggtaacatttttgttttaatagagatggagtctttctgtgttgccaggttggtcttgaactatcaggctcaagtgaccctcctgccttgggctccccaaatgctgggattacacacaagaaccactgcctggccagcactacagttctactatcgaaattattaatgctatgctatgtatctctggcggtttttttttttttttttttgagacagggtctcacactgttgcccaggctggagggtagtggcctgatcatggctcactgtagcccctacctcctgggctcaaggaatcctcccacagcaggtgccaccatacccagctaagttttttgtatttttttaggggagagaaagcgtttcgccatattgcccagactggtctccaactcctgggctccagcgatcctcctgcctcggcctcccaaagtgctgagatgaaagacatgcgccccacactggcctctggatgtttgttactcctgagaaaactaaaatcatggcactccaaagactagagacgattcaacaggcaagagcagggatgaaatgcacgcagcgactgaggtctggcttcgcggctctgtgaccccggttcagcttctgagcgcctggttccttggcgggacgcctcctcctttcccgcaagaccagacacgactgtctgggaagcagcgtttctggggcgcaccttgacacttggatttggatcaacaatgctttcaagaagaaagacttttgatcaaaagcgggaaatgagaaagcgactttcctctgaaaagtgcctcccagtcccgaggctgcgaggcccccacgccaggctggctcccacggaagccgggcacccacccggcccgaccaagcgccactccgccccgtggacggggcgtcccaccccggggacgcccgccccacaccgcgtttgcaccccggaggccccttgccgcagaggcggacggcgcgcctctcccgggcccctggggtccgcgcctccctcgggcagactctttcgactctgctcgagcctccgcttcttcctgcgggcggacgccccggacacaacgggccccgctgttcacgcaggggcgccccggcggggcgggcaaagacccggggacgcggtcccgtcccgagacgctcagctccggcccaccgctcgcagctcccgccccgggcgcaggtcccgaccccacgggccgtctcggagccgcagcggccgcttccctgcacgtcctcacgccccccgcacggacgccgccagccccgcgcctcagtttccccactagcaggatggaaagacgggccccgccccgaagcgtagcggcgtctccgtggtagccagtgcccagagagtccgccggtcccaccgccccttcaaaggagaacccggcccaccgcccgccgcggcggcgaccgcgcagcccactcgtcacgcggcccgcggcgtccagcccgggccggctcacctcaggcggtcgctgccgccctcgcgcctgcgcgcccctcgccccgcccctctccccgcccgcgtcccgcgcaccgcaggcctctgcccctcgcccaccgcaggacccgccccgcgcacgcgccgcacgtgccacacgcaccccacgcccctgcgcacgcgcaggccccaagtcgcggccaatgggcgacgcggccgcagatccgcccggccccgccctgccctgtgagttcctccggccgggctgcggggctccgctcagtccgggagcgcagctgggccgcggcgctccgacctccgctttcccaccgcccgcagctgaagcacatcccgcagcccggcgcggactccgatcgccgcagttgccctctggcgccatgtcgcagaacggagcgcccgggatgcaggaggagagcctgcagggtgagg

SEQ ID NO: 6235 - DNA, 2300 bp, Homo sapien
tttcagtgggcagcaggccagtggctgtcatcagcacccctgctactcagctgtgttctgaggggcttaggccatgccctaaggcaggatggagaaatgaagtttttcaaataccaaacagacacactgtctctattgcccactatcatccccaccgtatgtaagctccatgagggtatggatccttgtcttttagggtcactgctgtacattgagcacctagaaccatgcctggtatatagcaggtattctgttaacatttgctgaatataaattcacaaagaatagtaaaattgttcacctaaaaaatccaagaaaatcaactgaaaaactatttgacaaataagaatgcaataaagtatgtgttgagaggtgagcatgtataaatcagtagctttcttatatgctggtgatgaccattttagagatgaacaccacctcatttgtaagagcaacaacaacaaaatctaagaataaatttaagaagaaatgttcaaggaaaggcttgtgcctgtcatcccagttactcaggaggctgaagtgggaggatctcttaagcccaggagtttgaaaccagcctggacaatataaagagacctcatctcttaaaaaagtaaaaaataaaagtttttttaattttaaaaaaagatttgggaggctgaggtgggaagatcccttgaggccaggagttcgagaccagcctaggcaacgtggcaaaaactcatctatacaaaaaattaggtgggcatagtggcaggtgcctgtggtcccagctacctggaggccgaggtcagaggatcacctgagcctgggaggtcgaggctgcagtgagccaagatcgtaccactgcactccagcctgggcaacagagtgagagagtgagacccctgtctcaaaaaaagaaaaatgttcaagactcaagacacgtacaaagaaaatcataaaactttatgttaaaatataacagacactattcagggcccccagatcctacccaggactgcacccaagctgaccgggtcttctctaaaaacagaaaaagaagccattactaaggattataagacatagcgtgttcttaaaggacaaaactgatcataacggtgatcataaagacagctcagcttctcctttgccttatctgggccccacaatgttctgagcacttgccattgaatgacccgtttaacactgtccaggactcatgcaggcaggaattatactgttctttttttacagagtggcgcatccgttttattgaggtaaaatggatttttgtacattcactccatgactgaactgaaaagatatccaccacccacataataggcaaaggattagtaacggaatatgcaaatggatctaaaaatcacagtaaatgtacaaacaacacaatctttttttttgtttgtttttgagacagggtctggttctgtcgcccaggctggaatgcagtggtgtgatctcagctcactgcaacctcgttctcctgggctcaagcagccatcccacctcagctacctgagtagttgggactacaggtgcacccctctgtgcccagctaatttttttttctttctttctttctttttttttttttgtagagacagggtcccaccattttgcccaggctggtctcaaactcctgagccaagtgatccacctgcctcagcctcccaaagcactgggatgacaggcgtgagccaccatacccggccccagcagtacaatctggtaagtcgaaaaagaactggcacctcatgaaaacagagaaatggccaatgaactgaaaagacgcgcagccttagcagccgcagggacgtcatgctgaagcaatgaagcccttcctcctctccggctgtgctcactgctgggaactggcagctcaggggtctcggtcctgcctgcttcccctccacggcccctcgctgcctgtagctcctcacgccttagtccagctccatctgctcattccctggagtgcaccctcagctgccttgtccctctcacccagttggccaagcccagctgggcaccgggcctgcacccaagctgccaggagtggaaagagaggagacacagccatgtggattggtttcattttaaattcatggccaccagctcaagtggacacttgttgactgctacatttccccagcctggtaccacccaaacatgtcctcgtgtcctggcacacagagagggcagagctgggatcacactgcctgcccctctaaatgaaaggttgctgagcagagcgggaagctgcacctttgcaggcaggtcaaggacctggcttc

SEQ ID NO: 6236 - DNA, 2300 bp, Homo sapien
tggaggccactgtggccacggcagaagggactgaagaagatggcgggctttccattttgtaacacttctgaaggggacccagatgagtccctcttcgattcttgaaggcaggggtgagggggccctaaagatgcagacgtcggggtgaacctggagggtccccaaaggcagggcctctcacaccagctggcggaggaccccgtttttgtttgtattccaatcagtcaaggactgaaactttaaaaaatggaacagaaatgcatcactgggaatgagatcacacagggaaggcacccatcgtcggttctgttaacccgggtaccaccctcagggaaccgcagggacggtgccccacgaagggcctcattccccaccaccaagggcagggccaggacccgctcacccacgggactccaggccccttccccacccgccctgccagccttgccatagagcgcccctcacacccaggccacctcctcggcctgtgccagggacagagatgggagtgtgtcgcagggtggggctgcggcccccaccgttgggcagcgggaggaggcggcgggaggaggcggctgtgcctgggtctggtttgaactgacacgtcgcattttggtcacaagccggtggttgtggagaccttctttggatacgacgaagaggcttccctggaatccgacggctcctccgtctcttaccaaacagacaggacggaccagaccccgtgcaccccggacgatgacttggaggaggtaacgagggtctcctgccgggtcctgggcttggaggaggtaacgagggtctcctgccgggtcctgggcttggaggaggtaacgagggtctcctgccgggtcctgggcttggctgggcatgggctgccggcttttcacggggaagcccttcgcggccctcactggcactgacccgctgatagctgactcgggcacggtgagaagctcccatgacatggcttggggtgtgggctgaggcccgctcttgctcccatgaaggccaaaccatgcctccttctgccactgagcctacgccccttctgcataggggtacggtgagctctcccttcctaaggggcctccccaggagggtctgaaccactcatcagggagtttggtctcagtgccaagagcacattagggtgaggggtgttgagcaggagttttctttctgataacagcacaggtgtgtctgcccaccagccccttcttccagaaggacggctaccctcaggcgcaggcagccatttcagcaccaggtcggggcttggtgttgtgggacccagaccctgtggctgtgggacaaggagtggggtctgcagtcaatggcacagccaaggattgggcctcccgtggcagaccctggagggtggcccaatggccatagacctgttgagggatctaagacatcctctcacagcctcaggtgcagggttgggcaggggaactgggccaggccaaggcttctgggctcagtcactcctagacgtggccaacccttccagccccgggggtccaccgggaccctttgaaggcagcagcaggctcacctgtcttctccctggggtgacggggggcactgcagctagcagggtgagcctgcaagagtgcacctgggaggagacgtgctgcctggggtactttacccccttcacaaagcccagctttcttcccaggacgtgtttcagcagagcagagcgtgtgcaggcctggttggtaacagagggtctgctgggtcagggcagcctggctagcaagcaggagccccagctgagcccctggccatggccaccagcccagcaggctcaccctgtcctcagccgtgcagccgactcagctcccaccccagggctcggtgctcccctccccagggaaacctttctccaaacagcactgagtccccaggcagccgcccctccctgcacactggagcaggtcccctccctcatgctgctagagagacccccccatacaccatttgatatctggggagaagggaagccccggggccccgccatcggaggaggtgctggctactgacactgtgtctctgtgcgtgtgtggcatccgtgtctctccagggcatggccaaggaggagacggagctgaggttccggcagctgaccatggagtaccaggccctgcagcgtgcctacgctttgttgcaggagcaggttggagggacgctggacgcagagcgagaagttaaggtctacgtgacttccaccgcgcgttccggcccccctcgtgccttcccgcttgaccccgtggcctgggctgggacacccc

SEQ ID NO: 6237 - DNA, 2300 bp, Homo sapien
tgtgatgctcagggggcctctccctgtgtgatgctgggggcatgtcttcctgtgtgatactgggggggcctcttcctgtgtgatactggggggtctcttcctgtgtgatgctggggggcctctcgctgtgtgatgctggggggcctctccctgtgtgatgctggggggcctctccctgtgtgatgctgggggggtctcttcctgtgtgatgctggggggtctcttcctgtgtgatgctgggggggggtctccctgtgtgatgctgggggggcctcttcctgtgtgatgctggtgggggtctacttctatgtcttactggggggggcctctccctgtgtgatgctggggagcctcttcctgtgtgatgcaggcggtggcctcttcctgtgtgatgctgggggggtctcttcctgtgtgatgcaggcggtggcctcttcctgtgtgatgctggggggggtctcttcctgtgtgatgctagggggtctcttcctgtgtgatgctgggtgggcctctccctgtgtgatgctgggtgggcctctccctgtgtgatgctggggggggcctctcactgtgtgatgctgggggggcctcttcctgtgtgatgctggggggggtctattcctgtgtcttattgagggggcctctccctgtgtgatgctggggagcctcttcctgtgtgatgctggggggggtctattcctgtgtcttattgagggggcctctccctgtgtgatgctggggagcctcttcctgtgtgatgctgggggggtctcttcctgtgtgatgctgggggacctctccctgtgtgatgctgggggggcctctccctgtgtgatgctgggggggcctctccctgtgtgatgctgggggggtctcttcctgtgtgatgctggggggtctcttcctgtgtgatgctggggggggggtctccctgtgtgatgctggggggggcctcttcctgtgtgatgctggtgggggtctacttctatgtcttactggggggggcctctccctgtgtgatgctgggggggcctctccctgtgtgatgctgggggggtctcttcctgtgtgatgctggggggtctcttcctgtgtgatgctggggggggggtctccctgtgtgatgctggggggggcctcttcctgtgtgatgctggtgggggtctacttctatgtcttactggggggggcctctccctgtgtgatgcaggcggtggcctcttcctgtgtgatgctagggggtctcttcctgtgtgatgctgggtgggcctctccctgtgtgatgctgggtgggcctctccctgtgtgatgctggggggggcctctcactgtgtgatgctgggggggcctcttcctgtgtgatgctgggggcgtgtctttctgtgtgatgctgggggggcctcttcctgtgtgatgctggggggggtctattcctgtgtcttattgagggggcctctccctgtgtgatgctggggagcctcttcctgtgtgatgctggggggtctcttcctgtgtgatgctgggggacctctccctgtgtgatgctgggggggcctctccctgtgtgatgctgggggggcctctccctgtgtgatgctggggtggtctctccctgtgtgatgctggggtggtctctccctgtgtgatgttgggggggcggtctccctgtgtgatgctgggggggcctcttcctgtgtgatgctggggggggtctattcctgtgtcttactggggggggcctctccctgtgtgatgctggggagcctcttcctgtgtgatgcaggcggtggcctcttcctgtgtgatgctgggggggtctcttcctgtgtgatgctggggggcctctccctgtgtgatgctggggggggtctctccctgtgtgatgctggggggtatctctccctgtgtgatgctggggggtgtctctccctgtgtgatgctggggggtgtctctccctgtgtgatgctggggggtatctctccctgtgtgatgctggggggtatctctccctgtgtgatgctggggggtatctctccctgtgtgatgctggggggtatctctccctgtgtgatgctggggggtgtctctccctgtgtgatgctggggggtgtctctccctgtgtgatgctggggggggcctcttcttgggtgaagctagggggtcttttcttgggtgatgctgggggggcctcttcctgtgtgatattgggggggccacttcctgtttgatgtgtgggcctctctctccacttccaacaggaaggcccccttgtttgggatgctccgagttttctgagtt

SEQ ID NO: 6238 - DNA, 2300 bp, Homo sapien
caggggcacccggccttgccgggaggggacacagtgttctgggggctggagcctcagagggcaaagcctctccccaaaccaaatgtctgtttcattttgcatcttaacctaaggatatttgtttgtattaaatactagaaaaatgtgagggctaggcgtggtggctcatgcctgtaattccagtactttaggaggcctagatgggaggatcgcttgagcccaggatttcaagaccagcctgggcaacatagtgagaccctgtctctagaaaaaaattttaaaacatagctggacatggtggcacgtgcctataatctccgttactcagggggccgaggtgggaggatcacctgagcctgggaggttgaggctgcagtgagccatgattacgtcactgcactccagactgggtgaccgactgagatcctgtctccaaagaaaaaaatagatcaggtgttatttcttaaatctagctaaatagctcttcattcccaagcgatgccccactgcccgattttctctcgtgtccagatgggcctggctcccgacccccagcccagagtgagactgtgtgcgctttgtctgctcagggtgctggttgtactttgctgcttacggtgggactgagaccacaatattctcacaggcctgcttttgtttgctgggcacttggaatgtctttcaatacaacgttcaccattattattaccccattggtgctcttgccaaaaattcctgcagcaggtctcagcgatgggtttcacttcagggaggaggagacccagtccccgggaggctggccttgtggtgctggggacacgctgggtgtggggcccctgaccagcgcccaccacccgcatctgcccggtgcagagtccccagtgcgttcctaggggtggcggcaccacccctcagacccggggatttgggcagcatccctccctcggcacagtccttaatagcgtcctctcctccctgccaacagctctgtcttcagtctgtaatcgcgtgtatttcttgccagaagcactacaaactcttttttctctttctttccttccgtttctccatcctcccctttccgtttcagtttctatttttgttcttatttttctccttagctttcattctctggtcatagtccgtcttggcaccctgacgtggtgagtatttcgttggcagggcccagcaggggtcccgctctgcttcccggaagactcctctgcccctgccctgccagggagttgcccacctgccattcgatcaactggaaggcgatgacccagcatccccaaaagggttgttagaaagccacccgcgtccttcaacactggaagtccctccctgggggtcaggacccggagtcttccactgtagaggccgcaaggtgctcacctttcctgaacgggaaggagagcagggttcccaccaccaccccagtgtagcagaaacatgcaggaccctctctagggggtctttctgctttggtggcactcggcagcaggccctgggggcagacacggtggttctgtgattcgtccttgttcttttctgggtggtgctgagcacaagctcgggcggtgctggagattcagccaggagggcttggtctccctgccaggccgggcagcttaggccaggatagctggagtctacaggtcatggctgctgctaccatggcacccgccagcatagatggctgcctccttccaaactggaggaggggcaagtaggacgtcacatcattgttcgcctcggtcctcgagtctgcacccttcagcaggtcccgagaggagcttcccctgggagcagggctctccctctccatgaagcccctcatccctcaccccttacccctcactccagccaagtggagtctccctgacatcctctccacgcagcccttcggtcctcacccctcacccctcggccctcacccctcggccctcgcccctcgcccctcacccctcggccctcgcccctcgcccctcggccctcgcccctcactccagccaagcggagcctcgctgactctgcactctacgtttcatttcttccagccccacattgaatcggacccttttcctccagtgggaccagaaagcagggacaaaatgggacgtcgcgtctccatcctgaagacccagggagatttggtctctgcacgcccgtcccgtggaggaagagtgagaaggggcagtgtgtggggcgtggagctgccgtccacgtgggatgtgccagaactagaactggctctgccgacttctcgggggcttctccgggacgggcctggccttggc

SEQ ID NO: 6239 - DNA, 2300 bp, Homo sapien
ttaaatcttagacgattaaagtcccctcaaaggtattaaagtttgaactgaaagccgtatgagccatttctgcacttctgagttcattctctgaacagtgcctctgcacaccagaaacggagtccgcgccttccgcccactgtggaggaaagccccagttctcacctgcgagatcacctggagggcaagctctgcagtcgggtgcctggcagcacctggctccggtcgaccacctgggaggctccctcctgtggctgttggtcaaatgtgaaccatggaagagatcagacagttaggaaagggacggaacttctgcacgtgcataagaacagttggtgatatttgccgtggacggtcccacacaggtgagtaacagacattgcattaatcatttaggggagggggagcccagaggaggacgaaggggtgggaagctgctggacctagctctgctggctcgggccccgccagtactcgaggtcatggtgactcagtggccaaactctggctttgaaatgcggactgcggtaacaacgcaaaggcctgaagtctctgggttcgaattcagctgctgcaggctgggtagaatgacagatggagtgacagcatcgcccgtcactcctgtctcgccccaagcctctaactcggctttaagggagatcagcagcagtttgcgtgggcgggtacaccccacccccgcgcgccctccacactcgcccagggtttcggagtcagggctttcttgtctggcgtgggacggcccaaggggcctggaaatgtggccgggattcccacagcggtttctccggtgcgcgctccccgcccggccttcccagcgcccagtgtgtcccgagggcgagcagccacgcgtggccgggactaagcgagcacccaggggccagaatggggcgttcagcacccgctacgtggacagagccagctccgcgcagcgctgccgggcggcaggaggcggggggggagggcgcggcctccaggtccgcccagtgcacctgccgcgcagacctcgctacaggaggctccgagaccggattctgtcgcccgctcctgccgtgaccgcgcggcagcctcaggagcccgcgaggcctctggcccggcccaagcttggctgcgtgttccgctgcgtggaggacgccttcgagagcaagacgctgccgctggacgctctgggcggcggccgcccgggccctcgggttgggaggcgagtctgcgcggcgcgcggagacccctcaacggccgcagcaagtccccgagggcagcccggcgtggcccaggcccgggacccccagcaggtagtggccgcgggacagaggccgtgggcccgggctcggactccccgagaccctcgcacccggaggacgccgggcgtggggctcccccgctcccccctgcggggtcctccctatccgtaaaggtcctgagccttctgggtcctgcgaccaccccccacccccgcgaggtcccgcccaccaccgcgtcccggtccctggggagcgcgtgcgcctccttctgtctctctctctctctctctctgtcctattcgggcccctcctgccctccgtctctcgcggccagcgtggaacagcctcgcggggtcacagcctggcgctcggaccctggcccgggtcatctgcgaaggagccggctttggccaaggtgccttcctggacgggtgtggttcccagagcgtcgcggcccggggttgactggctcggaatcccggggccttgggcgcctcgcgtctcctgggacctgggttccgcgctggagggcagcgggggcgcgggcggggcctggcaggacgtggccggactctctccctcgcctccccggggtgcaaaccccgcgcacatcagctggagcaggttgaaatccccacccagcgctcgtccgcgggtctgcgcgggggcccggggtgcagagatcagaccctgcagcggttccagcgctgggggggctttaaagcgaaggagtggctgagggcgggggcggggctgatgggcggggtgaggcggggctcgggctggggcgggccctatcgggggcggggcctgccgggggcggagccggggtgggggcggggcccagcgggggcgggaccggaacggagccgtgcggccccgcgcgctcgcagtctgtctcccgccgtccccacgcacgcgtcccggctcacgcgtccccccgcccgcccgcccgcccgcccgcccccgcttgtgccgcccctaccagagacccccaggagcaggatgtccttccagggcaagaaaagcatcccccggatc

SEQ ID NO: 6240 - DNA, 2300 bp, Homo sapien
cagattcatggcctggggacccagtagctggggtcacccctgctgttgggtgaccacatggtggctcctagacccccaggccggtcctgtggcagataggaggcagatgtgtggggcctggggctcagggctccttgggggtgaccccagggatggtggggtcctgctgggacatccctggctcccctaatgctccataggccccacccaggcctctgctatgcagaccgccactgtaccctcccactggcagaggaggaaactgaggccccaaggaggtgggcgtggaggtggcctgcatggagcccaccatgaggcagggattggttttgggggctctgagtgcagcgttggcctcttgcccagcttggaaccttcctcctctctggggaccagacgttgacctttgcctagaacggtctccgacttccgtgctgccgatggaaagccaggcggagacgtggaaggttcaggaacacttgcccgggtctcctctctgcaatgacctgtcccgggcacctcacacacacctgcactcggggcggggcccctctctgcagtgacctgtcccgggcacctcacacccacctgcctcggggcggagcccctctctgcagtgacctgtcccgtgcgcctcacacacacctgccctctcctctctgcagtgacctgtcccgtgcgcctcacacacacctgccctctcctctctgcagtgacctgtcccgtgcgcctcacacacacctgccctctcctctctgcagtgacctgtcccgtgcgcctcacacacacctgccctctcctctctgcagtgacctgtcccgtgcgcctcacacacacctgccctctcctctctgcagtgacctgtcccgtgcgcctcacacacacctgccctctctctgcagtgacctgtcctgtgcgcctcacacacacctgccctcggggtggggctcctctctgcagtgacctgtcccgggcgcctcacacacacctgtcctcagggtgctgtcccctctgccagtgccaccctgggctctgcggcctcagccccttccctcccccggtgcggagccagcgtgcagggagctctgggaactctcatgagaggagtttgatggactccgtagacaccggctcctggtgactgtggtggttgcaggaccactcttgggacaccaggctgattacatattgctcccctcaaagcccacaggaagctgttttgacagattccggctggtggacttccttttccttatctcctccgctgagtgctggaatgagagctcacctctcctttgggagccaggaatggggctgagcctgggcttgcgtggggcagggccggtggtcatgggaggtcctggcccagcctggggcagtgcggagaccctcatgggttgctgatggcaggagctggggacaggagcctgaaacagccactgggtctccagttccactggtttggagcctttggggctggggtcgggagggcatgagggccgctgtgcacagtggcaaggccaggtgggcacctgggggcagcaggagctgggcatcagggtggagccacggtcatccagaggacagccacgatgccggtcagccccctgccagtgcccctgactcaccttgcggggtctgggccaacaggtccttgagcagggatccctgtggacatggccggcagggaccacttggctcggggcttctcaggggcgctggtgcggtgagccctgcccaggcccacaggtgtccactctgctgcttgcacggcatcctggagccacatccaggattcctgccctgcctgcaccttccctgagcagcatctgcatggctgtcttggacttggtgtcccttggtgtccctgtggctgccctccttgtcagtcttaggaagcagggacagttgtgttcaaatcacaggcactgcagagtgggggccgcatgcccctaaccccacagccccaccctcagccccactcccagcactcccgcaaccccacggccccgcccctgacacgccctgacccccatagccccgccccctgcacgccccgccccctgcacgccctgacgccacagccccgccccggcacgcatgcgccttgctgctgcctcccagctgggagcctctgccggagccgccgcctccgtcgcacagtcgggaggctttgcaggtgtgcagggcgcaggtgacccaattgccgtgactcccttatgcttctgacttgttatttaatagattttgtttcccatccttttcctctccgggagggactaaccttgggaacttgtgct

SEQ ID NO: 6241 - DNA, 2300 bp, Homo sapien
catggttccattccttatagtccccaagggatgggggctcctgttggcccagaagccacacagacttcccgtgctcacatttcatgcatcaggcggttagggcgggcggccacactgaatgtcaaaggccgtggggaggcagggctcacagtggctgaatgacagggtagacagttgtgtgcggtgggagggacgggagcgggagacactggccttggagccatgttggggatccgctcatcgtccgggcgggcagcaggaaatcccatctaggatttcaccgaggaggaagagaccccgtctttgtgtcctggttacagggcagaacttaaggaggtaaaggcttcctaaagtcaaacagcccggtagcaaaaactgattcttcagtgacaagcgccaggggcaggcggcgaggctccatgcagagccgcgccttctccagggcactccaaggcgcccagcactttccgcgcaaggtcgcgcctggccctgcgcaggggcagaggtgcccggaggtcaagccgcgccccaggcctccgaaatacgccgagtgccgaggcccctgtcgcatctggacaaggggaccctgggcgactcgggcacgcggtctcaggccggacgggggtcgcgaggatggcacgggggtgcccgagagcgcgggcgcacgtgctcagggcttagcgcccaccccaggcgcccgcgtgtgcgcgcgcgcagccaggcccgccctgccccaccccaccctctggcgcagcgcttggactcagcctgccgcctcctgaccgtgagccgggctctgcccggcagattcccgccgcccgcatcccgggcctgcagcccggcctcaccctgcgcaaagcagaaggctggagtttagggctccccgcactgggcggcggaagcccgcgcgccggctgttttcacgaagaaggcaggggagggaggcccccggagaccgcgagaaggtcccgccgccgtgccgggcacagcagtccccgtgccagggacgccgacctccggggccccaggatacccgtggggacgctccctgcctccctcgctctcgtacccgccgtctagtctgagccgtggtccccgtgtcccggcgaaccacagcccccatccctagactggtggcggccacccactccctagcgacactccaggcactagccccgcccctgccccgcccccggctcggccccgcccctacccttcccgaagctccgcacctgccacgccccggcgctcagctccgcctcgaccccttccaggagctccgccccgcccccgccccttccagaagccccgcccctgccccgcccccagcgctcgcaatctacggggcgggttccaccgcccagaagagcgcacggcgggcgctgccggccccgagcgctcccgctaccactgccgctcccggccctgccggccggccatgccccgagttccggctgccgcgcgcacccagacccggcgatgaggagtggcgccgagcgcaggggcagcagcgccgcggcgtccccgggctcgccgccccccggccgcgcgcgccccgccggctccgacgcgccctcggccctgccgccgcccgctgctggccagccccgggcccgggactcgggcgatgtccgctcgcagccgcgccccctgtttcagtggagcaagtggaagaagaggatgggctcgtccatgtcggcggccaccgcgcggaggccggtgtttgacgacaaggaggacggtgagtgcgggcacggggacgacgtgggggccgcgcgctattgcaggggcgggcgcggctgggcggctttttcccgcaggggttcccccggtgtccgggacggcttcccggggcgccccggcttccggagaagctcgcgccgggtggctgcggccccacgcgagttctgggcgcccgcccgcgtcctccgtttctagtggcggcgccgcaggaggagcaggctgggcccgggccctcggggcgagggtcccccgcggctgtggcgtctccgggcttgcgcgcgcctccgcccaccgcccgtggcagccctgctttccgctttccgtgatccgctcgggcccacgtgcgggctcgtttgtactttgcagttagagaggcgctcacctgtgccgcccgagtgcgagtgaggctcctgccccacaggtggcggggcccggccgctcagaggctcagtctccttggtgaccgcgcggtgtccatcctctgctcacccatgtgcgctggaggcagggccaggccgttgtgcaaagacctgccctgccaggaacgagtgcgctgc

SEQ ID NO: 6242 - DNA, 2300 bp, Homo sapien
aggactgtccatccccaactgcccgggccggggaggcgtcctgggctctggctgtattcacattctcccgccttttggggtcctggttacctgcaggtcctcagcctctccaatcttcagagtcagctttctacctgctgtctgaagtctattaacatgtcttcccttctcctgttccctcttaggtggtggtggggacgttatatcttttattccttttctgccacttttaggggtcagagggagaggaggagaggcgatgatgtaagttcagaggctgcgtgttttgggaggagccctggggagtctgatgtgtgcaccgggtacgcagggttccaggcactgccctgccttggtacctccccttccaaacgctccttcaccactcctgctgggatgggcaccgagggcttcctctgaggcaggtgctgaacccactgccttctgcgtgcctgctggagaatggcaactttgagggagagcagggaacagagcttcgcagctgcaagggctgaaaactcggctctgtgcactggaagttagagaccgatgcgtttgtgctagccaggcagggagagctgcggtggctggttggtcaggtaacctaggttatgctgccataaaaataccctctaaatctcagtagtgaaatgcatgccatgtgtcctaagcgggtgcatgtccaggtgggtgcatgtcctaggcgggtgcatgtccaggcgggtgcatgtccaggcgggtgcatgtcctaggtagatgggcatggttccattccttatagtccccaagggatgggggctcctgttggcccagaagccacacagacttcccgtgctcacatttcatgcatcaggcggttagggcgggcggccacactgaatgtcaaaggccgtggggaggcagggctcacagtggctgaatgacagggtagacagttgtgtgcggtgggagggacgggagcgggagacactggccttggagccatgttggggatccgctcatcgtccgggcgggcagcaggaaatcccatctaggatttcaccgaggaggaagagaccccgtctttgtgtcctggttacagggcagaacttaaggaggtaaaggcttcctaaagtcaaacagcccggtagcaaaaactgattcttcagtgacaagcgccaggggcaggcggcgaggctccatgcagagccgcgccttctccagggcactccaaggcgcccagcactttccgcgcaaggtcgcgcctggccctgcgcaggggcagaggtgcccggaggtcaagccgcgccccaggcctccgaaatacgccgagtgccgaggcccctgtcgcatctggacaaggggaccctgggcgactcgggcacgcggtctcaggccggacgggggtcgcgaggatggcacgggggtgcccgagagcgcgggcgcacgtgctcagggcttagcgcccaccccaggcgcccgcgtgtgcgcgcgcgcagccaggcccgccctgccccaccccaccctctggcgcagcgcttggactcagcctgccgcctcctgaccgtgagccgggctctgcccggcagattcccgccgcccgcatcccgggcctgcagcccggcctcaccctgcgcaaagcagaaggctggagtttagggctccccgcactgggcggcggaagcccgcgcgccggctgttttcacgaagaaggcaggggagggaggcccccggagaccgcgagaaggtcccgccgccgtgccgggcacagcagtccccgtgccagggacgccgacctccggggccccaggatacccgtggggacgctccctgcctccctcgctctcgtacccgccgtctagtctgagccgtggtccccgtgtcccggcgaaccacagcccccatccctagactggtggcggccacccactccctagcgacactccaggcactagccccgcccctgccccgcccccggctcggccccgcccctacccttcccgaagctccgcacctgccacgccccggcgctcagctccgcctcgaccccttccaggagctccgccccgcccccgccccttccagaagccccgcccctgccccgcccccagcgctcgcaatctacggggcgggttccaccgcccagaagagcgcacggcgggcgctgccggccccgagcgctcccgctaccactgccgctcccggccctgccggccggccatgccccgagttccggctgccgcgcgcacccagacccggcgatgaggagtggcgccgagcgcaggggcagcagcgccgcggcgtccccgggctcgccgccc

SEQ ID NO: 6243 - DNA, 2300 bp, Homo sapien
tcaataatcagatcaacacgaacacttcattcgttcctacgttgggaggctcacccaagaatacttgccaaaaggctaccaatggatacaatctggctgggcaaaaactgagcacagtaaagggcaaaacatgctcgtacatacaattaactactgactacaaaaattaatgtagcatgaaaaatgtgaaacaaaaacctgaggcaacaataacaagcaagagggaatacgctcaaatggttagtaaatgttttatttgtgaaaagagatactggaatgctgaaacttgttagaaatagcatcgtgctgaaatcttccatccccttcgccactcacggcaacacccatgtcactcctcattctctccttgctctgcccgggtggctggcctccccacgctcctgagaaggtactggttgtgctttcagcttcctgattggtagatagttgggtatgtacgaaaactttttttttgagacagggtctcgctgtcaccgaagctgacattaagtggcacaatcataactcactgcagcctcaaaatcctaggttcaagcgatcctcttgcctcaccctcccacacagctggaactacaggtgtgtgccaccacacccagcatttttttttttttttttttttaatttttgtagagactgggttgcccaggctggtctccaactcctggcctcaagcgatcttcccaccctggcctcccaaagtgctagggttacaggcgtgagccatcgtgtccggcctaaaaaacatttcttactgtgatctcttcacaaaaataaaacgtaaatcccctcaaagtggatagtcgtttctccacataattatgtcgtttcctttaaaaagtggaatcaggccgggcacggtggctcatgcctgtaatcccagcactttgggaggccgaggggggcggatcatgaggtcaggagatcgagaccagcctggccaacatgatgaaaccccgtctctactaaaaatacaaaaattagctggacgtggtggcgcgcgcctgtagtcccagctactggggaggctgaggcaggagaattgcttgaacctgggaggcggaggtcgcagtgggccgagatcgcgctactgcactccagcctgggagacaaagcaagactccacctcaaaaaaaaaaaaaaaaaaaaaaaagtgaaatcatggcagactccagctaaactgtccgggtttccagagtgtttctgggtgggacagagggtgctacttttcattatcagttggatcctggaatgaaggtgcacgggactccagggttccacaggaccacgcgagcacctcccctcccgcccggtgtcatttcatcttcttccaaattctcaaaacccttcctcaggacactcactgcgtttcctcgcccccctcactcctccgtccagaggcagccttacttctccaaagaggacgctctgagtctgcgttcccctggcagcaagtcctgaggcaagatttggggacaagcagctcctgtgggaagtggctccaggaagccccaggagagacgcggggagtgagcccagcgggaaggacaggcagcgaggaccgctccaaaggtggtgcctcagcagcaattcttttctgctcggctgtcctcgagcagccccgcccgccccgggccctccggctccccagacggcacttagcatcccgctctcttccttcccctctgtgccaggccggtcgcccctccagaccctcgcggtctctacttgcccgtcgaccaccaccccttcaaggccgcgggcgcggaaaaacggatgctaccgttggccgcgtgcgtgcgcaggcgcaccaccccctgccacccccgcgcaggcgcaccacaacccccccaccgcaagcgcaaccccccgccccagcgcaggcgcaccacaccccgccccctcccgggcaggcgcaccacacccgaccccctgccgcgcaggggcacccacaccccgcccccgcacgcaggcacaaacccccacaacacgcacacccccgcgcgcaggcgcaccacacccctcgcgcaggcgcatcacagacacactcgcgctcagcgtggcgcctgcgggattccgtaccggcgtctccatggcgaccgcgttggctgggtggcctccattgtcgggctgctgctctcagcggcggggctcgccagcgcttcagtgggcggggacgcggcaggtgagacggggcgggtacggccagctcgctgagccctcgaggcgggcggcggcaggaaggtggtgcctcggcccgtcgtgccctgtcgcctagctcc

SEQ ID NO: 6244 - DNA, 2300 bp, Homo sapien
aaaacatgctcgtacatacaattaactactgactacaaaaattaatgtagcatgaaaaatgtgaaacaaaaacctgaggcaacaataacaagcaagagggaatacgctcaaatggttagtaaatgttttatttgtgaaaagagatactggaatgctgaaacttgttagaaatagcatcgtgctgaaatcttccatccccttcgccactcacggcaacacccatgtcactcctcattctctccttgctctgcccgggtggctggcctccccacgctcctgagaaggtactggttgtgctttcagcttcctgattggtagatagttgggtatgtacgaaaactttttttttgagacagggtctcgctgtcaccgaagctgacattaagtggcacaatcataactcactgcagcctcaaaatcctaggttcaagcgatcctcttgcctcaccctcccacacagctggaactacaggtgtgtgccaccacacccagcatttttttttttttttttttttaatttttgtagagactgggttgcccaggctggtctccaactcctggcctcaagcgatcttcccaccctggcctcccaaagtgctagggttacaggcgtgagccatcgtgtccggcctaaaaaacatttcttactgtgatctcttcacaaaaataaaacgtaaatcccctcaaagtggatagtcgtttctccacataattatgtcgtttcctttaaaaagtggaatcaggccgggcacggtggctcatgcctgtaatcccagcactttgggaggccgaggggggcggatcatgaggtcaggagatcgagaccagcctggccaacatgatgaaaccccgtctctactaaaaatacaaaaattagctggacgtggtggcgcgcgcctgtagtcccagctactggggaggctgaggcaggagaattgcttgaacctgggaggcggaggtcgcagtgggccgagatcgcgctactgcactccagcctgggagacaaagcaagactccacctcaaaaaaaaaaaaaaaaaaaaaaaagtgaaatcatggcagactccagctaaactgtccgggtttccagagtgtttctgggtgggacagagggtgctacttttcattatcagttggatcctggaatgaaggtgcacgggactccagggttccacaggaccacgcgagcacctcccctcccgcccggtgtcatttcatcttcttccaaattctcaaaacccttcctcaggacactcactgcgtttcctcgcccccctcactcctccgtccagaggcagccttacttctccaaagaggacgctctgagtctgcgttcccctggcagcaagtcctgaggcaagatttggggacaagcagctcctgtgggaagtggctccaggaagccccaggagagacgcggggagtgagcccagcgggaaggacaggcagcgaggaccgctccaaaggtggtgcctcagcagcaattcttttctgctcggctgtcctcgagcagccccgcccgccccgggccctccggctccccagacggcacttagcatcccgctctcttccttcccctctgtgccaggccggtcgcccctccagaccctcgcggtctctacttgcccgtcgaccaccaccccttcaaggccgcgggcgcggaaaaacggatgctaccgttggccgcgtgcgtgcgcaggcgcaccaccccctgccacccccgcgcaggcgcaccacaacccccccaccgcaagcgcaaccccccgccccagcgcaggcgcaccacaccccgccccctcccgggcaggcgcaccacacccgaccccctgccgcgcaggggcacccacaccccgcccccgcacgcaggcacaaacccccacaacacgcacacccccgcgcgcaggcgcaccacacccctcgcgcaggcgcatcacagacacactcgcgctcagcgtggcgcctgcgggattccgtaccggcgtctccatggcgaccgcgttggctgggtggcctccattgtcgggctgctgctctcagcggcggggctcgccagcgcttcagtgggcggggacgcggcaggtgagacggggcgggtacggccagctcgctgagccctcgaggcgggcggcggcaggaaggtggtgcctcggcccgtcgtgccctgtcgcctagctccagccgcgatgctgaccgcaaaggctgcccttctgaggcctggaatgtgaggcccagagcgtcggacccaactcagcctcgcccggatggggaaatcgaggcagggagcgggggtgggcgtgcgtg

SEQ ID NO: 6245 - DNA, 2300 bp, Homo sapien
taaatagatgtactatttccattggttggtccccatcatgaatttcccattttgttgtgattggcgtatgaaactatgagttaacctttcctctatttaattttagaattcatcaattccaaagagaaagaagcctacaaataaagcccaggggtacattcccatttctgtctataggggacctgtgggcacacagcctgaggagcagccccacttacttgaaggctggggattctaaagacctcctccaaacggcacagaccactttcactcaagtctaaaatcggtgaggaggaaaagatgatgcctccaacacccttgtgaacatctttggagggggtggcaggcaagctcctagtctgaccagcaccctcctccagatcagcagcagccacagagggaacttcgtaggagctgcttccctccatccgttctcttccagggacagcagctcatcctccttggtctggagtcacctggagacacgggaaagggaaacgtagaagcaactaattataccgaggcaaaacagaatagctgtgtggcagatctactgtaatgtaacttgctttaaaagctatcatttttcctaagcagtagcaaaaatttgacttttaaacatgtaaaaaaaaaaaaaaggaatacaaagaggttcagattaaaattctctgctctcactttgtacaatggagttccaagatttaactcctggaaaacgcaaaggcgcacaatagtaatgatcattttagggatgtaaacagatcggaacatttcaaagcctgtaaatcaactgcaacgcttccatgaaatgactaggggcgggtggaaatttgcactgtttcttacctctggtgtggttctgtgccatttgaactatgtttttagtttcttgaggccaggaagcctgtcttttgtttaccattttgacccagtgaccagaactaagtctggcttacacccagttaagcaccggggaaaaacctgttaaattaatctcgaattttcgttgtccagcaacacttttactcagaagtattgttcaccaaaatctcattcagcgaggcacacttccacttgcaatttccaaacaatttattcggcaataagaatcaacgttggaatgcatcagttcacctaattcaagtcactcaacagcccaatgattggcatatgaggcgcagatcagttagggaactgttccaggggcgcagttaattggggggtagaggcgacaccgggacccagcagggttcaaccccaggcagcctgcattccatggaagcccgcgggctttttcacggtcagttcacttgttttctccgaatcacggaacttaaaacagaggaggggaggcttcaaacctcagaacagggaaagtatcttaaaaccagaagtgaaacaacagcctggactcacacagggcccaggcagcgcaggctccgtggggtttccgaggctgccttcaagggatccccacgcacgcccacccccgctccctgcctcgatttccccatccgggcgaggctgagttgggtccgacgctctgggcctcacattccaggcctcagaagggcagcctttgcggtcagcatcgcggctggagctaggcgacagggcacgacgggccgaggcaccaccttcctgccgccgcccgcctcgagggctcagcgagctggccgtacccgccccgtctcacctgccgcgtccccgcccactgaagcgctggcgagccccgccgctgagagcagcagcccgacaatggaggccacccagccaacgcggtcgccatggagacgccggtacggaatcccgcaggcgccacgctgagcgcgagtgtgtctgtgatgcgcctgcgcgaggggtgtggtgcgcctgcgcgcgggggtgtgcgtgttgtgggggtttgtgcctgcgtgcgggggcggggtgtgggtgcccctgcgcggcagggggtcgggtgtggtgcgcctgcccgggagggggcggggtgtggtgcgcctgcgctggggcggggggttgcgcttgcggtgggggggttgtggtgcgcctgcgcgggggtggcagggggtggtgcgcctgcgcacgcacgcggccaacggtagcatccgtttttccgcgcccgcggccttgaaggggtggtggtcgacgggcaagtagagaccgcgagggtctggaggggcgaccggcctggcacagaggggaaggaagagagcgggatgctaagtgccgtctggggagccggagggcccggggcgggcggggctgctcgaggacagccgagcagaaaagaattgctgctg

SEQ ID NO: 6246 - DNA, 2300 bp, Homo sapien
ttagttctggtcactgggtcaaaatggtaaacaaaagacaggcttcctggcctcaagaaactaaaaacatagttcaaatggcacagaaccacaccagaggtaagaaacagtgcaaatttccacccgcccctagtcatttcatggaagcgttgcagttgatttacaggctttgaaatgttccgatctgtttacatccctaaaatgatcattactattgtgcgcctttgcgttttccaggagttaaatcttggaactccattgtacaaagtgagagcagagaattttaatctgaacctctttgtattccttttttttttttttacatgtttaaaagtcaaatttttgctactgcttaggaaaaatgatagcttttaaagcaagttacattacagtagatctgccacacagctattctgttttgcctcggtataattagttgcttctacgtttccctttcccgtgtctccaggtgactccagaccaaggaggatgagctgctgtccctggaagagaacggatggagggaagcagctcctacgaagttccctctgtggctgctgctgatctggaggagggtgctggtcagactaggagcttgcctgccaccccctccaaagatgttcacaagggtgttggaggcatcatcttttcctcctcaccgattttagacttgagtgaaagtggtctgtgccgtttggaggaggtctttagaatccccagccttcaagtaagtggggctgctcctcaggctgtgtgcccacaggtcccctatagacagaaatgggaatgtacccctgggctttatttgtaggcttctttctctttggaattgatgaattctaaaattaaatagaggaaaggttaactcatagtttcatacgccaatcacaacaaaatgggaaattcatgatggggaccaaccaatggaaatagtacatctatttagatgaaggtgtctgttctcttccttgcagttcatctctcaaaacctgtggtagaaactactgccaaacacgcttggtctcttaattaaaacacaaaaccttaaagaaaatcaggcaacatgagcagttaaaaactttgttctcacccatgattttgctcatgttacacactggttttactttgtgcccggcccttctccgggtcagtccgcagtagatgctgtcttgtccatgtgatttctagagaaagcttctgtgagggcacaggtttgatgttagacagttgagggttccccctgcagcacttgtccctgctgggactcacagaatttccttaaacctcatttggtttaatctggaatgtcggaatgatcatgttttcacatcatttattgtgaaaatgaataatgtgaaagttcagtgtctggaacatagttatgatattgattgactttctttttgtatttttagtagagatggggtttcaccatgttgcccaggctgatcttgaatgcctgagatcaggtgatctgcctgtctcagcttcccaaagtgctggaattacaggtgtaagccaccgcacctggccagattgacatttttgagtgcttctacaagagctacatatttagatttttagtggctgcttaagttataaactctacatttgcattgtctttgctgtcacggcagcgctggtcttgctctttctttccttcatgctgacatctagggtgaggcactggtcacagggacctgccttgtcctggctcctgttacacaggtgtcacttttaatgaacagatatcctcagccctgaataagggatccagcagagccctgaggtttctgttacctttatgcacaaagggagaaggaggaaattccagaggtcttcaggcttgatgaagaaacttgataactgtttatacctttcagaagacaaatgtcagtataaattttattaccatggcatagagtctttaaatgtggtaatcagagtggtagactttctgccgctgtggctgcagtctctaaagtcataaacagcacttccagagatcccccatcctcacatgaggctcccaggacctaataggaaagatggaatttgtattgtgacatagccacctcactgttcaccacatgagaaacaaacttacccatccaaacccaaagaatggactcagagaacagtggaagaaagactttttaatgacggtcttgcaagattgggtgtctgatgggcaggcacacccagcagggttacaacaagccatttatcccctggtgcgcaggtcctgccccagttcctcataggctgagtactatgggggttacagtcttcccagactt

SEQ ID NO: 6247 - DNA, 2300 bp, Homo sapien
tctcaaggcggccttgaacattgagaaagaactaccaaagccaagacacgttttcaggtaaaactgaaaagcaacgggggattttcttgatctttgcgaatttatacagttattttaaattatctttgaaaacatcaggtccagcttttaaagtgtcctccacgttgccaccgtttactgtgcagtgagtgccggtcccaggtttagggtaacggggacccgcatcaagcccggagcatctgcggcagagctcagtccattcagaggctgagtttgccaaggttgaggatacgcccggggaaaagagacataagcgacagtgagatctgtggcctgtgctttctccagagagagctttgaggatgtcagcatttaaaggagaaagaatgggcagcagggaaaggaggaaagaacagtaaaagtgggggcaggcagtgagccaagtgggcacattcttgtgaggcttcgatcagtgctcactgaatccacattttacctgtgaaaagagaggagttgggggaaaggtcagttatgcagaaaataaatggcagctgcctggggacaaaaggaaggcagtcattgtgtggcccacttccaaagcttgcctttgcctttggtacagtgagtttgggggccgagattttattttcctttcacacccaggacaagggtccctaggaaacaggctctgcagagactacatgagagaaaaactcgaatcatgggcgtggtagggcgtgcgcctacacatatgggaggtatgtatctgtggtgtgcgtgtgtgtgcctgcatgtggtgtgtgtgcctgtgtgtgtgtaaacatctagagagagaatgctgcaaaataacaattggtgaatctagatcatgcattctcaaggggcacattgtcatagccgaggggacaacaatggcttcctgggggtgaagattcttggaggccgcagtggtctgtggtccctcaggctccacgcagcgtccagcacgagcaggttcacagtggcaccagaccttcccggaggtgttggcatgaagcgctcatggccctgatctttcagctgtcctgtaggtttgaacattcaaaacagaacaaaacaaaccttggaagcatcactaaaagattaaagggtaggatgtcctagcagcacacacagcaggttcccagctacagcgaggcctcggacgctccagcacgcttgtggtgttcttagtccacacagtcgcacggtgaaagggcaggaatatcctgagcctgctgcttagaaacctcttttcttccctcctcccttcaaatatttatttattgttagggaccctaataatagctaatccaagtgaattgtggtatgcttattaatcgtacttataatttgatcaatatgtcagatttggatactagaccctagccttcggagattgctttgggtggcttgggaagttggagcagagaactggagtctctggcaggaagcctcaacctggagcccctgccccatggttgggtgggccctgagtgttgtcttccccctctgctgcctctgcccagggtgagccatagagaaccactctgtgcctcagctttcccacggggtggttgtggtctcacatgcattatcagggcctcagtttccccacttggtcaggttgtcgtggggtcacaggtattaagaagaagctctaagattatggccctggtctgcgctcagggtggtggcccttcctgagggtctgggactcgggaagctggtgctcctctgtgttctctggccagggagcagtgggcatggtgagagcagcaggcccggtccaaggtgactcgtgtggcctgggcctgcttataaggctgagtgctcatgtccaaaatacttgcaagaaaagtgatgttatgtaaaaatcataggtaaataatggtctggtcctgaaatcccaaaattatattgggagggaatcaaagcattctgaagtcatcaaacatggagctggagtacgacggagcatcactgccccagcctgattctgacgtccagcaggccttcctctggggcagctcctccatacccctcaggaccctgagaccacaaggggaagcctggtgttccatagagcctgggccacctgcccttccaaaagcagcaggttaaaggccagtgcccagcacgcaccccaggtgacccctgtcccagagcacaggccatgcctgccctctctgctctactgagacagtcactgctgttcccgtgcagatggggaagacgagggacagtcactgctgttcccgtgcagacggggaagatgaggg

SEQ ID NO: 6248 - DNA, 2300 bp, Homo sapien
ggtgttcttagtccacacagtcgcacggtgaaagggcaggaatatcctgagcctgctgcttagaaacctcttttcttccctcctcccttcaaatatttatttattgttagggaccctaataatagctaatccaagtgaattgtggtatgcttattaatcgtacttataatttgatcaatatgtcagatttggatactagaccctagccttcggagattgctttgggtggcttgggaagttggagcagagaactggagtctctggcaggaagcctcaacctggagcccctgccccatggttgggtgggccctgagtgttgtcttccccctctgctgcctctgcccagggtgagccatagagaaccactctgtgcctcagctttcccacggggtggttgtggtctcacatgcattatcagggcctcagtttccccacttggtcaggttgtcgtggggtcacaggtattaagaagaagctctaagattatggccctggtctgcgctcagggtggtggcccttcctgagggtctgggactcgggaagctggtgctcctctgtgttctctggccagggagcagtgggcatggtgagagcagcaggcccggtccaaggtgactcgtgtggcctgggcctgcttataaggctgagtgctcatgtccaaaatacttgcaagaaaagtgatgttatgtaaaaatcataggtaaataatggtctggtcctgaaatcccaaaattatattgggagggaatcaaagcattctgaagtcatcaaacatggagctggagtacgacggagcatcactgccccagcctgattctgacgtccagcaggccttcctctggggcagctcctccatacccctcaggaccctgagaccacaaggggaagcctggtgttccatagagcctgggccacctgcccttccaaaagcagcaggttaaaggccagtgcccagcacgcaccccaggtgacccctgtcccagagcacaggccatgcctgccctctctgctctactgagacagtcactgctgttcccgtgcagatggggaagacgagggacagtcactgctgttcccgtgcagacggggaagatgagggtggaaggtcatgcagcgtgggggggcgggccagcctcctgggacgtggccaccgggcatgctgcttggctgtggcctcccaagatgtgctgctggtgtgaggctttgcacagggcaggccgtggaatgggatgggcctttctcctctgggcgaagtgtttggtttcagagggaagaccaggcagggcttccagttgtgtttcttaaactgctttgatgcaagggtcatggtgaggagttgtcatgttctggaacctggctggctctcagtcctgggctcagagcccctatctccagcctggttttccccaggtgttttcactgggaggaaacaccaggcacacctgtcagctccctctcatgggcagggagagggagtccccagcaccgtgcgaccccaccatgttactggctatcccctctgctgtcctgcgggcttccctcaagggggacccagtatctgaccctgcctgaatgtgtctgtggaggccaggcgccttctgatggccttgcctgccccgccccctgctcccacatcacccagcgatgggattccgacctgctgcagcaccaccccatgcacctgaactccaggcacgtcacatcgtccagcccgggcgagctgctggccaggccccctgcttccgcgggcatctctgtccaggtcagacaagggtgcggcattggtctcaagcaggtcgggtgcagctgccgaggctgcacgtccttcaggtgcatttcccaagccgactgtcaagcgtcccgggaaagtagctggctggcagtgggcgcgttgggacagtgtcctgctgccatccacacatcttcattacgtgtcctgaaatcaacagtcaagactggactctggggtgactgcagcttctagtcgtgctaattgttcagatgagcggatgatccacaggccctccttttacatttcacatgttgtatgaattaccgtcacagggttttgttaaacattcagctaaaaacactctgtaattttagaaggaagacagcctcctccaggagcatcttacccgacctcttgtcaccgtaccaaatggcgatccgagcaaaaagactggaagagagccgagcggcggcgctccgagagctccaggagaagcaggctctgatggagcagcagagacggtgagtccacacagggtgggggtccgcacagcccgcccagtgcaccc

SEQ ID NO: 6249 - DNA, 2300 bp, Homo sapien
tctgtctggccctctgtgccccggaaccctcttcccctgtcctgcccgccgccacccagccttggttcctctcaaagcccagcaagtccacaggtgggtccctcagcacaccccaaactgttcctcctgctggcgtgggaagtcaccaggagccccaggcgcacgcagacaccttgcagaggatcctgcccacccccacccccacctcggaagcccttgcttttgcccacctggtggggccctggtgaatgctggtgctcccctggacactctttctggatccctccacccacatacagccccctgtgcattagccccaccccatgctggccccaccagcctgaatgctgattcaccctggcagtccccaatgctcagaaagggcagtgcccagcaggcctctccagcaggcaggaagaagagccaagcaagtgggcagcctcaggatggccgctcagcccaacctggagcagggtggcgagggggtccctgctgcctggcatttttcctccaaagtcagccccacccctggagggggcagctgcagaggcctgtgggcaggacagcaggcaggctccactgcaagcctggcaaccagtgggcaggggctggctgaccctggagaacggggcgccttgaggtgcctgaggccccaggaagggcttagtgttggcgggagccccaggccacacagaggaggacagacactcactgggcttccaggcctcctctgggactgtccccggccagaactctggctcattcggcctcggtccctacccctgttctagccggacggtcaggtgtcccaggccccgcgggctccctcactccgccctggctcctctctgaggctcccactgccgcgcggccgccggagggcgaggtcgacaggcgccagcgacccgacggtccccagtggcaccaggggcggtggtcctcaattcccaggctgggaggagccctgcccggcggcgctgggtcgccaggacaactacgcggtcccccgccccgcctccaggcctcgtcaggcgctgcaagtccggctcagaagcccggcccggggccaaggtcaccgcagcaggccgggcccctgcgttctgagccgggtgcggacgtgctggtgctcggggaagtcgggggctttgacgcctgaaggcgcgggagccgggcgcctgggggaagggggtccggcgccgtcacctcccactcctcgcccgcgggtcggggagcccctgccgcgggggaaggaggctgtttcctttgtaaactggcggaggcgcgcctggcccctgggcccggcaacccgaagagacacgcccgagacctccggagggagttaaccccccgggccccggtgccggccacccccaggcgcgcagggtggccctgagccgggcgcgcgcccgcttgtcgccccgagaggcgccgagcccagtggggcgacccagtgtcccgccccccacgcggcgagggcgacactaggccgctgcccccgggcgccccgcgtcccctccgcctgccccggcttcctgcgcgcgccgcccgggacttcctcgccgcagtgcccggggccaccagagcccagcgcggggcgctgccgggacacgcgggcggccgaccccaggcgggaggatccgggccaccggggagggagggagggcgcagggctgggcccggagggggaggggggcccgggaccggccccaggcaggggagcggggggatggggtcccggggctccggccgcggcgggtgtcccccccgccgcccccgggctcgtggctctcgggtcctcccgagccaggggacactcccggccagcgtgggccgcgagcccgggcgcagccccctctccagcccgggggtccgcaccgcgcgtccggccgacctctgcgggcgggcgcggcttctcccgggacgcggcggcggcgggcggggtccccgggagcggagcccgcggccgcgcgcccccggcccggctcggctcggctgtggcggccgccccagcggagctttgtgacgtcaggcggccgcggggcggcgtcacgcgcggggctgacccggcggcggcggcggcggcggcggcggcggcggggcgggggcggcctgggacgcggcgggagcatggagccgcgcgccggctgccggctgccggtgcgggtggagcaggtcgtcaacggcgcgctggtggtcacggtgagctgcggcgagcggagcttcgcggggatcctgctggactgcacgaaaaagtgagcgggggcgcgggccgggacacccccggggtccccacgcgacac

SEQ ID NO: 6250 - DNA, 2300 bp, Homo sapien
gtgcatgcacatggacgtgcttctgtgtgagcacacgaagttggttctcagaatgctcagcctgtattaaatgctcacaaggtgctcatggaagatgatgaactggctgctgatttgggtacggaggccagttctggctatgaggccaggggacttggagacatcagcctgcaaccctgggcgggggtgggggctggttttgggcaaaggctcatcttccacagcttaactctggcaaaccttttctgtaagtgaaagtcgccggcttgggtggccccactgtggcctggctcacggacagcgtataaaggaacctgggggctgtgctgtgtgctagtaaaactttcttcacaaacgctggagcggccaggtgtggcccgctggcccccggggtgcatggggtctgtgctcctcggtcctggcgccagcacctggctgggactggtgagggcaccgcccgggactggcctccctttctcgcgaaagtcttagcccatcagagttgaaggcagcccgcttcccacggctgctgcagggctcagtgagaccatttgcacagggggcccagcccgcactccagagatgctcctgccgttgctagcccgtggctgcaggccccacagcggtgcctggccagaggagaatggggcgggtggcgctcactctgaccacccccacccaccacagagcagaaccccccgccccgtgttcatcccctcacaggccccaaggccactgctgtgccctccccggcgagtcgcaatgctgtgttgcttttctgtctctttctctccatctccctctcttttttctctggtttagctagagcggtcttgaaaattgcatctggtttgttaccagttacgcgtgttccctgtggaaacgtggattctgtggacccgttttccatggtctgtggtaacatcagcgttcgcagaactgttttcctgacgcgctcacagcagcttgttgggcgggatgaggccaacaggggacagggctcggggacattggctgcacttgggcctcgagaatgatggggcagccaggtgcccgtgcagcgaggtggcctgcactctaggacgtgagctgcttctgaggacaaatcccccaaagccacgcacagtgctgggcactagccgttaagcgcaggctgcccggcccagcgagtcccaggatgagaaggcctttacaactgggattggtgtcccggctgtggcagccgcggggccttaattgtggctcccccagcagtggctgctcctgccccctgtgccccttcccctgcagctcgtgtggcccagcagggcaggacctgagggtgccaggtgggcagatggggatgagggctctctcggggccactgaaagcatctgggccatctccagagggctcagccccgggccacgcgcagccccaccccagacacacgtcatgcacctggaaccctgctcccgtaggacggcattctccagggctcctgcaggacggcattctccagggctcctgcaggacggcattctccagggctcctgcaggacggcattcttctgggctcctgcagggagctttctccaggggcttgctttgggggttgaagcgttgcctggccctaggggttgtcttccctgagtcccccagcccctcggagaggagggaacggctgagcctgtgagcaaggagcctgagttttggggtccagggccatgggtcacaagcagccagacccctccccgggccaggtcaggcctcctgggagcattcctgctggggtccacatgtcccctggggccatggactgagattcggagcctctgggcctgtctctggccagggaagcagctgacctcccggccatatgctgcttggctttggaaggcacatgtcttgccctgctgtgtccaacccaggacatacgtagggagcatgggcattggtttaccgtcctgaaatacagccctggactcagggcatggctcgctgcccagacctgccggagcatgggtcgggggccttggctctgggggctggtgcgggtggcagatgtgccagggtcccttctcactgtggtttctctctctccattgccaggtccggcctctttggcctacccccgttggctccgctgccccaggtcgatgagtcccctgtcaacgacagccatggccgggctcccgaggagggggatgcagaggtgatgcagctggggtccagctccccccctcctgcccgcggggttcagccccccgagaccacccgccccgagccacccccgcccctcgtgccgccgctgcccgccg

SEQ ID NO: 6251 - DNA, 2300 bp, Homo sapien
tgatctcggctcactgcaagctccgcctcccgggttcacgccattctcctgcctcagcctcccgagtagctgggactacaggcgcccgccaccacgcctggctaattttttgtatttttagtagagatggggtttcaccgtgttagccaggatggtctcagtctcttgacctcgtgatccacctgccttggcctcccaaggtgctgggattacaggcgtgagccaccgcacctggccttattttattttatttgagacagagtctcactctgttgcccaggctggagtgcagtggcacgatctcagctcactgcaacctccgtctcctgggctcaaggaattctcctacctcagcctcccaagtagctgggactaaaggcgtcccccaccatgtccagctaatttttgtgtttttagtagagatagggtttcaccatattggccagtctggtcttgaactcctgacctcaggtaatctgcccacctcggcctcccaaagtgctgggattacaggtgtgagccaccacacccggcctgcaacttatttttatattaaaaaatttgagtccttagaggacggaggcctacagagccatgggccaggcagagcagaggcaagaaggcagaggtgagggtggcaccgtcccctgccggggcctgcagtgtcatctggggctggatctccaggccccgtcctcctgcgaccacctcgctgcccatgtgaacctgtggtcagccccggggacctcggggaggcaggaggaagtgtgcaccctgccctgcctgctggctgggagcccacggggtgggcaaggggtgggcaatgccttgtgacgtctcccatgtggcttccttcattttttctgaagtgccctggtccttttccttctttttaaacattttattgtggatgtgtcccaccccacttaaggaagagtctagtacctcatgccggccgccccgtcctggccccccgcccattccggcccccccattccggcaccccattccagcccccccattccggtccccccattccggcccccgcattccaggccccccattctggcccctccattctggcccccccattccaatcccccatctgccccccccattccggcccccccatttcagcccctccattctgctgctgtcccttggtgtgtgaatgtttccgtttgtctctacaagatcacgagttccctgcgctgagctctttttcctttccccttccccagcgcccctgctctgtgctgcatttggaaagaacctaaatgtcctccctctgaagactggttaaacatctggttatgatccagtggtaagcagtgcctcccttgggttaagaatacacacgcacacatgcatacacatgcgtaaacacacacatgtacacacatgcacactcatacactcacatgcccacttatacacatacatgcacacatgcactcctaaactcacatgcatgcgcacacacgcacatgcacacacacgtgcacacacacactcatacacatatacgtacacacatgcacacacacgtgcacacatgcaatgcactcatacatacatgcacacatgcgctcctacattcacacacacatgcgtgcacacacgcacacgcacatgcacactcacgcaagtcacacgtgcacatacgcacatgcacactcatatgcacacacgcacacccacactcacatgcatacgcacctgctaacagccctgaggagggaaccccgggttaacaggagctgcccctgaatgtgtgagggatgggctggtttaggataccatgcttggctgtcaatattttgtaattgttctgtaaaaagagtggattcattttgtaataagcaaataagcttaaaaaagaaaaagaaatctgggatcaggagaattcggggttttacccaccttcgctttaaattccatttctgctctcaatgtttggtaatggtttcacggccttttcaattgctcacgtgagtgttttcaaccaccagctcacgtttctggaatccgttcctttggctgtgccacttgtgatcccttctgctccaacgtttgcctggggagctcattaggtagccaggaccctgggccactgcaccccaccaggacggcaggactgaaaaggccactgacgtgagtgcggggaggtcgggtggagatgagctcagcccggcttaaagtggggcatcccgacacccccaaaggcatggggcaggagcggcggggcgagtgtcttgccaggcttaaggctctaggaccagaaaccgggctcagggaga

SEQ ID NO: 6252 - DNA, 2300 bp, Homo sapien
tgggaggccgaggtgggcagattacctgaggtcaggagttcaagaccagactggccaatatggtgaaaccctatctctactaaaaacacaaaaattagctggacatggtgggggacgcctttagtcccagctacttgggaggctgaggtaggagaattccttgagcccaggagacggaggttgcagtgagctgagatcgtgccactgcactccagcctgggcaacagagtgagactctgtctcaaataaaataaaataaggccaggtgcggtggctcacgcctgtaatcccagcaccttgggaggccaaggcaggtggatcacgaggtcaagagactgagaccatcctggctaacacggtgaaaccccatctctactaaaaatacaaaaaattagccaggcgtggtggcgggcgcctgtagtcccagctactcgggaggctgaggcaggagaatggcgtgaacccgggaggcggagcttgcagtgagccgagatcacgccactgcactccagcctgggcgacagagcgagactccgtctccaaaataaataaataaataaaataaaataaaataaaaagttgcagtgtcagcaatgagttagctctttaatgggggcttttttaaatgaatatttctcagctgttggtgagctcagctgagggagggcgggcgccacgggtccctgactcagacctgactgtggggctgggacacgactgcccctagtgggagcaaggcccaacggttggggggtgcccagcgcccagccagcagctggggtgtctgtgggggctcccccatcgccctcccctcccccttcccttccttccctctcctctcaacccccactcccctcacaccttcccctccccctcactcctctcccctctcctcagggctccctggcttcctgcctcacccttcccctccccccactccccttcctcagggctccctcccctcactccctccccactcactccctctccccttcctcagggctccccgcctcactccctccctgctcactcccctccccttcctcagggctccccacccccccactcctcctcccctctcctcagggctccccccctcactcccactcactctcctcccctctcctcagggctccctccctcctcactccctccccgctcactcccctccccttcctcagggctccctcccccctcactccctcccccgctcgctcactccctctcgcctctcctcagggctccccggcttcctgcctctctgaattcctcctccagaccctcaaggctccctgctcattccctctggggtcctgaggtctccaagggccactctggcttcccccctgcagacccaccctcctaggggaacagggtgaccccacacagacactgatgggacaagagaaccagccctgcagaaagcctccaggtgaggctgacagtgctggtcctgtgacggggaagcaggtgagagccatctctggcctcaaggctgatcagcagcccccaaggtgtcctctgcagagagggccagcctcaggcctgccaccccgtagaccacagggacctgtcctgagattcctccatttctgagcaccagcctaggaaatgatggagggtctggcccccaggcccagacccccaggccccctgcccccgtctaggtccccaggtacttgcagaaaagaaggggtgagcacagccttctgtaagggggcgcccgagtcctggccaaggtggccgcccaccctggggctccaaggtccaggcagccacctcttcggtctctgcccttaatgtggggcagagtggcaggtcagagccccggccctggccccggccccagccccagctcctcctcagccacaggggcatctccaattcctgaaataattcagttccctctcctgggcacctctagagcccagctgggcccagggtgtgttctgcagttgtgggggtgggggggaggattttgcaaccctaccctctctgcagggtacctccggtggctctggcctctgggccccatgctgtgccagacacacagagaggctcagccagttatttccaagaggccaggcaggcaggagaggcccaggatctgccaggactgggaagggaggcaggaggcttctctgggtataaagcagctgaaatgtggagtttcctcccaggagctgagaggtagctgcagggcgagccctgggggaagtgtgcagccgctggagctccgtcctgggcaggggtggtcacggcttgaggatggcaagggctgatgccttgtttgcttttaa

SEQ ID NO: 6253 - DNA, 2300 bp, Homo sapien
aaagtccttgatggggccccaggagactcatggggacccctctggccttccttggctccctactcccaaggttcccaaggtgcctgcccaggaggcccccaggggctgcagtggggggtgatgactccatgggatccaggcgtacatggctgccttgctgttgcctgtgggctgagccagctccggggccttcacccccatcctgggctggagagggtcccagggatcacctcagcggcgcccgcctgggggcccagaggcagcagcacttgggcttggggctgcgtttcctgggggcgcccacggacaacactgcctcctggccccggggctggcgtcccctgggtgttcaccatccatgatggtgtccctggcagacccgttccaggggatatccttgttagtgtttgggaagtcgaagcaatcgcagctgtgccccgcccagcacagggaaatctggggacagagctgcagagggagttgctgtttccctccaggcttcctgaggaactggaaccggagccaccccaggctgatcatgggccggaacccaggttactacagacctcactctctttccagaaggttcccgggatgccccggctcatgtgctgtctggacccagaggccgtgttctcttgcacgaggcgtgaacacctcctcagcacggagagctgatcctgctgtttggagcgatcccagagtccagccctcggggcaggctcacctttgaggccgtgggagggggtttgaggtcaaaacatagaagcatccacggggcctcctgccctctgacctgacctccctcctgggagttagcacgaggccacagtgttgtctctggggcttccccgggggagctttgctcatggacacggggaccaggcagcatctggggtccccgctgaacatttggtaatgaacatggcagtgctcttcccagcaccctccccggagcagacagaccaggaggcaaagtctgggcatgacaacactgtgtccggacaccagagggggaggcggctgtccagagaggctgcgtctcctccatggggaaacagccccgtgcctgacaacagcaacacagcctcctggtgccggccccacagctcaggtgctctcaccacctggaggagtagctgggattacaggaaaggaaagaggagcccagcaggggttagacagggttagcggctgctggggagtgagctggccagcggtctgggaagtgtggctcgtgcctccgaccttcaccccgcagaggccctgagtcccttagggataaaatctccaccgatccttgtaggtttcacaatgttaaacaagtgtgctctgtgacctggtgtcttcctcggggatttgtccagaaaacaatcagaaggtgggcaaagatacaggcccaaaggcacctcggctgcttgtttcagcggccaaaaaagcagacgtgatataaatgtccatcggcaggtctgggtggagcaagttacggcaccggcccacgtgcccttcaatgtaggcggggcttctccagagggaggagcacagagacacgccaagctgtgcccggaccaaatcacaggtgcacttggcctcacgcccgcacccccgccttttcctgcgctggcctccatagcggctgtaggaaccgctagggaaaggtcttggggggacacaacctgcttttacttttttgtagtttgtattttttacaaggggtatcatttttataatcagacaatacatgaagctactttcagggtcaaccatccacacgaactctgagtctctgcgtttggggccgggccctgcccccagggtctctgcagtggaaggactggagctgtgttctgggtcccacgggctggaggcagcgctgactgggttgagcctggggctttctctgttgcaaaagtgcaccctcctcagatggggatggggagtggccttcactagggtggtcctcctggctgagcagggccggcccaggggagggcggggccagcacgtccccagaacagtgcctgtccaggggcacaagggttcactgaagactcaggagaggggtttagagcacagcctccctctccagggtcaggttcacgggagctgttgggggctccttccctcgcagcagtgaccactccaaggaccacggcctggacatgagcggcagcggtgagctgggagctgctggcctggtagctattgtttccatggagacagggtctcggctcaggtgtcctggggacggctgcaccctgatgtatctcacacccctgcaggccccacgtcagtggttt

SEQ ID NO: 6254 - DNA, 2300 bp, Homo sapien
ggatcagtgacacccccacatttggtttctactaagggtacccttagcatgtgctgattttgttaaaaagaaaaataagcgactacatcagtcagcttcagctgctgtagcgaaatatcacaggctgggaggctgaaacaagacttttacttctcacagttctgggggctggaaatccaagatcaagttccagcagcgttggatttctggtgcagggtttgtggctggctggggtgaagcttcccactgtgcactcacactgccacttcttttgcacatgtaagggtggggacagcactgagccctttctattaaacactagccctattgcacgacttaacattaaacaccagccctactgcacgacttaacattaattacccccgctagcccacctccgaatacagtcacattggaggttagggcttcaacccatgaatttgcggggtggggtggggtggggcgggcggaattcagtctgtagcaggcacctactgactaaagtagacattggtttatacatcaaatggattttgctggagtcctgctcagcggtggccgtaaggaggaaccctgggggtgttaacacaagccagtgatgcggcctcagcacaggcctggggcccgagcctgcagcaccattcctgccgccccgccctggcagcaggtgtcttcctagaacagaacaagccccttttgatgtcattgggcattgccttggcggtttactcagaagctggaggctagcctcgctagagcccattgccaggccctgaccgcccctaaatctgtgtccacaaaatcctccggagtgcctgctccgcatggtggccactggccacacagggctgctgagcactggaagcggccttgtgagctgctgccaagaggcaggtgcccgtgcaaagccttcctgtgaaggaatctcactgaggttgttaaattctggttacatgttgaatgatgtatctatctattgggttaagtaaaacgtattgttaactttggctattacttgttacctttaaaaaatgtagctactggaagctttaagatgacaaatgtggttctcctcctccatctacaggcatgtcccggttcacggcggctgtgtccccgcggcctcagacccagggtccagcccatgctctggcccctccggcggccaggatcagcatcgctgccccggggcccgcgccgagccggctgctcctccgtgctctgcgctcctgggcccgcaccagccccctcccctggagcccccttcgtccctgcgagggttccctgcacgccccgcgctgagacccagcctggcccgggccggagccctccgcgacgtcaggatgcgcctggcctcacgccgcctcccctccgtcttctctgggccgcagccgctcctcgtgagtgaggtcgcggccagggagccgggtggacgcgccgggaagctgcacggtccacgctccgtctgcgcggagagccgggcgcgcgtggcccggcccctgcaggcgcgactgccgccgccccggtgggctcccctcccccgcacgcccggcacgcggctggacgactgcggccgcgcgggggctggaacatcccctcagagccgcaagagagcgcacccgccgccggcgcccggaacccagggcccctttaagaggcgccgccggagcagggccgtgacgtcatagaagtgcgaagggcggagtctgtgcgcagccgcggcgcggggggcggggcgggggcgcggcgttcttgcgggcctgactgacaggagcgccctccgggagcgaccagtactaggccgccggtcgcaagagcgccccgcgtaggccccgccccgaaaggaggccccgccccggggcaggccccgcctccacaaggacaccaagtcccgcacaagccacgccccccgcaggccccgccccactctgttcagatctaggcccaactcaggctccgcacctcaaggctccgcccccagcaaggctccgccccaggcccggctccaccccgcacaggccccaccccgagtcaggctccgccccgcccaggccccgccccgggctcggctccgcggggcgggacttgccctcagcctgagtcggcggcggctgcgggaactttcccagcggatctaatggctgcgcgcgggccgctgtgaggcgcggcggcgagcgacgggcgcggggccgcggagcagcgagcgagcgagcgagcgcgaggccggagccccggccaggcccggccgacccgccgagcccgcgatgcgccccggggccgccccccggcgcagctgacgc

SEQ ID NO: 6255 - DNA, 2300 bp, Homo sapien
tctcatctttcatttagacttttggtctaattatttcacagcctttgagtgcctcctcataaacagtcagcaaacacggatgtctttgtttagagcaccgtgttaggactgtctgggcttattaaccttagtggatccacagtcaatgttgggggaagtcatatccacggtttaaatgaggtcatgacccatgaattgggctggagcgcgtgttactggggcgaggtgcacacagtgaacggtgtgtccaggtgtccgctgtcacatttgtgcgtttggtgtttagggtggctcctgggcagggctgctgggcacgcagctgcagctggatgtggggctgggaccctcgatggggacttgctggtaggagctggggccaagggaggctgtccacgtgggctgagggtcctcagtggcgggacagcggcgtgggtcagtcgcctcccctcctgccgggtcctcagtggcgggacagcggcgtgggtcagtcgcctcccctcctgccgggtcctcagtggcgggacagtggcgtgggctgatggcctcccctcctgctggggcggttgcgtgcgtcccacgaggaggtccctggacccagagggcagggcatgggggtgctcagagccgcagtgggcgattctctcccttcgcgtgtgtgtgtgctggggttgtgtgtccttgaagcctggagccagggtgttctcggctcggtcctgtgatctgtgaagctcttgtttcttgtcaggttttttatttttcattaatttatctaaaattcagtcttcctgctttttagggttcttagacccgtcagcaagtgaacggaggagcgcgcctggtgtgtggccagccttgcgatgctgttgtgtttgcgtgggcgcggagtctgggcccagctgcactggcggcctgcacgccttggccccatgcccacggccacggaggctgagaccagggcaggggctttagtcccgatgggagcgggggcagggccttgtttattgtttttaatcgcggcaaaaacccacaacattaaatttaccaccttaaccgtttccgagtgtgcagttccttagtgctaagtacattcacgttgttgcacggatctctagaacttgttctctcgcaaaatggaaactctacccttttagatgctgactctgtcccctcacggtgggcgatgttggagctggggtgcttcctgagcgtgggcggcttgtgctgagtgctcgcgctcagcctcgtccgcggtgacctccctcctcttgggtttgaatggctgtgctgcccttggccggagctggcacagagcccaggagcagccaggtggcctggggctcagcggagcggtcagggtggagagcgactgggccgtcccttctcctgaagcagtggcattttcaggcttgcgcttagctcctccgattctgtccaggagcttcctggggcctgggtctctggcggggctggagtttccttgcgtgtgtgcacgtgtgtgcacgcctgtggcatgtggtaggttttctgttgatggctctagcaagtgctttctgaagattctgacagttgtgacggactctataaaagccccttgctcttcaccccaaacacacagaaatgccatatgcgaccatgatgttttgtactccacaaagctcagctttgtctagtgcctgtgaaggggctttggctcaggcaggggcgggtgtggaaaggtgccaccgtcttgcttgttgaagctgggttactggctgagccgtctcttccctgggaggctggaggctggagcaacacagagccttcccctcctcgccacccgtgtgggggctgcgcgacgctgcccgagctttcctgagacagagtgcatcgtgcaccatgtccctgggacagcacagagcggagcccccacacagagcggggtccccgcgtgggcctggggtttccccgtgcgggtggagctcctccatgcggggtgggcccgggctgcgcctctgctcctgccccacgttgtcttcacaggagcttgtcctggctctgtttagggctgtgccattggtctgactggcttttctttttcttcttaatttacagccagaaaacctgcagaagaactggcttcgggaattttaccaggtaagaaccactgaaacgtgttcttttggattcattacttagccaataaggtgcctttttgctttggcattcctccatggagtctggtgtgtctatggggagcgcaggcctgggctgtggctgggtctctcggctccgctgcctgtgctgggcaacatgtttctgtg

SEQ ID NO: 6256 - DNA, 2300 bp, Homo sapien
tcgggccgcagcgcagcgcctccaggtccatgtttcctcagccataaaacagcgctagcgacgccccctgccccgcccctccaggctgtgagaagagccagagcctgtcccgagcgcggcttcctcccgccgttccgcccgcgcgcgcctcctgggcctcagttcgggcgacccgcacccctcccggcccgcccagggtctgcccggccgcgcagagtgggggatcccagggcgacagcagcccccgcccccaactccccctgcccgccccccccggccccgcagttcccgcgtctcagctcagagcccgagccttgggcgcgggcgccgtcgccttggggtgctgggaggggcccgaacccgacccgggagggcccttcctcgtgtctcctccgagggagcggggcgcaggacaggccggggcgggtctcggggccggacgggcgctgggggttcccgggccaggctccgcgggggccgatcaccggtggggcggccgcgcccaatcgaatcccaatcccagtcgaatcgagtgcggagtcgacgggggaagcgaaccccccgtgaacgcggggctgcacctcagtggagccggaagccgccggggcagccccgagcgcgcacacacccggcggccgcaccactgccccggagtttggccgcaggtggcttttccaagccgccatccaggagcggccgacggcgccaagtccccgcctcgacctgcacaaaacgaaaacggacgctggaggggggcgagggggcggacgtgagaccccggccccgaaccccgggcgccgccttcctccgcggcacaggcccgagagaggccacgcagcggcgttccctgcgcacagactcgggctccccacgagccgtgggccacagccacagccgccccgtgtccctaaatcaatacgagacgtcaccacagacgtcggagcgtttgctcgcggccgccgtgcgcggggctcggagtcatctcaccgcccggtctgcgggatggatgagcgagcggctcccggtgccgtgggggcgggggggacaccggccccccgcgcgcgtctaaggccgcgtttctgccgctgcgcccccagcccgcacccacgttcgggccctggacagggcttccgcgctgaggccgtcctggtctctgttctcccggccggggattcgcgagaggcggcccgtgggcgaagtcgtgggcccaggtcacatcctgggggacccccagcgggagacctggaggccgatgacggggaagtgccgagccgcgcgtgtggtcccgggacccgcctccccgccccgctcccgcctgcctcactcctccaccgcgccggccgcgtgtcggcgaaaccagaggcagctccgtgcgagcctcgcccggccgtgaggcccgtggattccgtggactcgaggcccgcgtcctccgccctcctgtggccccgacctgcccggagcgcgttccccgccggcgtccgctgccgctcacacccaccccagccacgggcggcggagcagtcgcgactgggacgcgggccgggactcttccccgagtggggcgctccgagcgcgcgggcgggtcctcaaatctgcattctttccgttaataaaatacgttctcgtattttttcctgatttcgcatgaaaacctttgcctaactacactcccatccaagctggatttatttcgtccccggggagataaatcggggcgaatttacagcccgggaggcacctgccgcgctaatgggcccttcatggagtgcgcggccggcgggggcgcgcgggcggggggggggcgccggccaatggccggaccgcggggtccgcagccaatcagcgcgcgcgccgcgccccggggagcccccgttatcagcgcgtccgtcccgcgcggcgccgctccgaccggccccggagccgccgccgccgccgcccgcccgcccgccccgcgccggagccgcccgcccgccccccgcgccccgcgccccgcgctgcagccgacgcccgcccgggccgcgcgcaaacttcccgggccggcgggcaggggcggcggcggcggggcccggatgggagcccgggccggcggcggcggcgcccatggacactaaccgcccgggcgcgttcgtgctgagcagtgccccgctggccgcgctgcacaacatggccgagatgaagacgtcgctgttcccctacgcgctgcagggtccggccggcttcaaggcgcccgcgctggggggcctgggcgcgcagctcccgctcgggaccccgcacggcatcagcgacatcctgggccggcc

SEQ ID NO: 6257 - DNA, 2300 bp, Homo sapien
atcacaggctccaacgcagcagaccttttcaaggagctggctttggtttacagaccccagcaacacggatttctgcctgactcaggctttccttgtgttctgcttcatctttgtggagctccctgcattggcgcgagggcagcccagggccctgctgtggctgctccggggcggcggcctcatgcctgtgctctctgcctccctcccgaccttgccctgggccccccagctgcagcgtgtgaacagcccaacgcttcaacatgggtttctgttccactagtgagtcaagtaggagagggtttttgaatttccgcctggatactgttccactagtgagtcaagtaggagagggtttttgaatttccacctggatacagtgcctggggtggggcttgtgagtttctgattttatcacatgcgatcacagaatgaggcccatatgatgttgattttcgagaaatgctccgaaagcgtttctccgagcatccctggatgaacaccggggagaacagcggcagcccagccgcaagccctgacgcggccctggggcttctgactccaggccccaaaccgtccctccgtcaggtgcctgagcctgcgggtcagagttgcgcagcactcagcggtcactgaacccacagagtgctcgttgctactgaaagagatggatgatggcctgttggaaattgagagaaagtttatcgactgtggctgcaaagagaattgtgttgacgtaaaactagagcgtgcgaagatcaagaggtaaggctgcctccacgacccctgcacgggagtcactgcttctcttacacacaacacgcccagcgccatcctgccttctgggcctggctcaccccggctgcacccccgcggggtccacaggaccctcccctgggaagctctcggctgccgcctcacccacacgttctgatcacatgcccagccctccccgtcgggggagcccccgttgcccctgacagggcctccttctggccccagccctgcggctgcccacaccttcctcgagggcatccacattgggccttgcacctccagcccttggcagacacgcacagacatacagcaccacccacccccaccagccacaggcacacgcgcattgcacacacatgcccaggcccaggtcacacgtgcacatcccgagcacagccctgagctgcttgcagggccctgacctcaggaggtggccctgccctgcatggctctgtagcgcggccgcagacggcatctcaggggctgctcccaccgagggcagggccagcacagccctgatgccagccgtccccaccacagcagctgccagccactcccaccctggcaaagcctccctggccccgcccacagccctgccccaaacctggggtcgcccccagcaaagcctccctggccccgcccaccgccctgcctccaacctggggccacccccagcaaagcctccctggccccgcccaccgccctgcctccaacctggggccacccccagcaaagcctccatggccccgcccacctccctgcccccaacctggggccgcccccagcaaagcctccctggccctgcccactgccctgcccccaacctatggcccccggacttgtccacacgcaagcgtctcgacacggcgggcccagtgcgggcgtgtagaagcctgcgcgagggaagcataacccaccacaaggtctgacctgagccgtgtctgttactgtggatgtcgtacattgtccttgcagaagttcagttagctgatcagacccagcccgctgggtaaagctgatgctgtggaattgcttcagcaaatctccttcaagcgcacacttaatttttataaccataatacactgtacatactgcattattccagcttcttaaacctctaagacgtatcgaggatgtctttacatgttagctattttaaaacatcattttaagcactaataaaatatacagtatgatagaaaatgacatattaaacatttagtaataataacataatgttttaaaattccattcttatgtcttataaaggttacgtgcccagaacgagaaagatgaagaacaaaaaactgcgtattacttggaagcgtatggcctggcccagggtgccgtagctgaggaagaagggaggcttcacagcatccagggcttatatggcctggcccagggcgccatggctgaggaagaagggaggcttcacagcgtccagggcctattgtcacttcaagacgtaagcaggtgtcctggttcctgtgcacactgggtcactcccaccgggatataaacc

SEQ ID NO: 6258 - DNA, 2300 bp, Homo sapien
gctgtttaagccgcccatgagagtgccccgtgatggcaacgccagcgggcgcatatacagcaggcctctggggtccagcctgggagcccagacacagacaccgtctctacctggcaagatggggtgatgaaatgagaaatgaatagatctggtctctgctcccgagaccccgcacagggctccaaaagccctcgaatttcctgggtgatggcagcagattcttccattcaaatgaggtgaggcttggtggctcctggagggggtccagtcaccagagagaccagccaggattagcacctgcagctctcaaccctgcacccaccctcctccagggatcatccaccatcatccttcatgtctgcgatggagcctccataagaatgcctggactatgggtcccgagcagttccaggttgctgaacacatccacgggccaggagggtggtgccccccactccacggacacagaagctcctgggctggggaccctttccgaccctgccctgtgccccggcccacctggctgcccatctgcggcctttctcatctccttttcctgcgttctgtgataattttgtgttgcactcttgatatttaaggctaatgtgtaactagaaaactgagttttaatatttaatgcccttggatttgggaaatctcttactacattatgtttggatatactttctctgaggggataaatattttatcgaggctgtacccatgtgtggagtgtctttaccaacaaaggcccatctgagaactgtctttgggaaggaatatggtcatttagcagggatctgaggctgccaacttcaagacggggtggggctctaggagcctgagaaacatacgacgttcaggtttcaaaactatgtccaggcagcttatttgatcccatgtaggtatggtggcctctcccgggtggaattccactctcccaggtgggcctctcccaggcggtcctctctcagggggttctctcccaggtgggcctctcctgggtggaattccactctcccaggtgggcctctcccaggcggtcctctctcagggggtcctctcccaggtgggcctctcccgggtggaattccactctcccaggtgggcctctcccaggcggtcctctctcagggggtcctctcccaggtgggcctctcccgggtggaattccactctcccacgtgggactctcgtgggtgggcctctcccagggggtcctctcccaggtgggcctaccccaggtgggcctcccctagagctcccctagtgtgcccaccccggggtgagtcccgggccctcccctccccaggccgacccaagtccttcagtggctccggcttccccgcgcgggggctgcgcgccccgccaagcctccaattcgggtcggtcgtaggcgccgtccggaccccggccggaaagcagccccggctgggaggtggggagccccggggggcaggtggctgcgctgctaccctctccgtgggggccggggctctgcgtctgctcctcccgcctcggccaccccctgctgccaggtcttagctcgtccccagacccggcggccccatccacgcccgcagcccgcatttccactgcgcgactttctgtgcccgctgcacttccagcaccgtggcaggggcaaatcaccgcctgttaaagtaatgacggaatgaatgaaagaacgaaagaatgaaggaatgactgactgactgactgactgactgactgaatggatgaatgaatgaatgaatgaatgaatgaatgaatgaatgaatgagccgacgagcgcaggcgcgaaggacgcagtcggaagttcccggggaaggtggagggtgagcccggggtcaggaccagaacccgggcacacaggagccctgagcggggagaggaggcccgcgcggagcccccggcgtccccccacgccgccttccctcccctttcttcttcccgcccctcgccgggggtcgctgccctggtgtctcactcccgcggagctggcggggggcagggcgggggcgcggcgttgttcgccttccccgaagtgtggccccgccgccgacccgtagccccgcgtccgcgtccctttcggtctccaggcaaccgtggccgggtcctcgcggctggagaacccaaccgacagtgggcggcaggacgcaccgcggaccccggagagagcggacgagcagggcgccggcgccatggacctggtcatcacgcaggagctggcccgcgccgagagccagcaaggtgaccccaggcccgccacgacccccgccccggggaggccccgggacccg

SEQ ID NO: 6259 - DNA, 2300 bp, Homo sapien
atccatccgtccatcaacatccctccatccatccgtccatcaacatccctccctccatccatccgtccatcaacatccctccctccatccatccgtccatcaacatccctctctccatccatccatccatcaacattcctggcacctgctcagcatcgggggggcatcccagccctcacagggagcaggcacagtaggtacaggtagaggctccctgcctgctcagccccaggccgctcctgagagcacccccaaagccacaggtcacagcacattgcccctgattttaccccattaggagagggaagatgtgcccaaggggactggtgagccacagggaggcggattcctgggctgcagcttaaaacaagacacttgttccctcatggttccggaagccagagtccaagattgaggtgtaggcctgcgctccctcagagctgctcgctccagggagatccctcctcggcgcttctgcttctggtgactccgggtgtcctcagcatcgcccagccccacctccatctttgcaagcctctcctttctcccataaggatgccaggcaccggatttcaggcccatactaaatccaagatgatctcatcatgatatccttaactttttacatctgcgaagaccctgtttccaaactggtcacgtttgtaggaaccagggcttaggactcgaacatatcttttggggagacaagattcatcccccatgagcatgggttcagagagcaacggctttagcactaccgaggtcttaatccaagcttcctgtcaggatttaatacaagggaggctgaactgccggggagctcagaaatgcacgagcaagacatgagcgtaggggaggttcccggggtgcctcgactgtccaggcttgcagctgcaggtggagaggaggcaaggctgtttgcccatttcagcctcagaacagtcacagcccagcagccggcggcctgtccatgatgaccattctgctccggagcctacacagagggcactgttcaccctgcggccgcctccctgcgctccaaggatcagcctcatgataaggtcagaaagaaccttggctttagggtctgtcccgcgtggccacctgttctgtatgttaaaaccgacttgcctgccatttctcttcttatccctcacacccacccacccagcctgggccaggcctggttctagggcgcggccaacggtcggggacaaaatattcatggtttctgggttcgtggtcaggcagtttgggtggacacaagcaagtgccacgtaaaataagcaacggtgagaatggttatgagtcgcaatgacactgtgaggcactttaacaggctcatcggcgtggccctaggccctgccctctgtgagcccaggtcacccccaggacgcccagcggctgctgcgccacctccctcctcccactgtggccaggcctggcgggcgggtgctgcctcccgacacgcacactttgccggggcaggtccgcgccagcgccgtcgccagaagagcctcacaaagacgcggctgccaccgtttggcgtctttgaagactgttcagcaggtctgaggatgagctgctctgagggtttttcccaacttaccattttgatacaacgtcaaacatatgtaaaagtcacaagaatacgacaaggaactgccattagagccttaggcgaattcaccaactgttcccacttctcaccggtgtcaccttcccaccgttcccactcctcactggcgttaccttccctccgttcccacttctcctcaacggcgttacattcctgcggttcccacttctcaccggtgtcaccttcccaccgttcccactcctcactggcgttaccttcccaccgttcccactcctcactggcgttaccttccctccgttcccacttctcctcaacggcgttacattcctgcggttcccacttctcaccggtgtcaccttcccaccgttcccactcctcactggcgttaccttccctccgttcccacttctcctcaacggcgttaccttcctgcggttcccacttctcaccggtgtcaccttcccaccgttcccactcctcactggcgttaccttcctgccattcccacttctcctcacggcgttaccttcctgccgttcccacttctcctcaatggtgtttccttcccgcctttcccacttctcaccagcgttaccttcccgccattcctacttctcctcaacgacgttaccttccctctgttcccacttctcactggcgttaccttcatgctgttcctacttctcctcatgccattacc

SEQ ID NO: 6260 - DNA, 2300 bp, Homo sapien
ccttcccactccatccccctctgacttccccggagctacctccacgcaataaaacattgcagtcattctccaagcccaggtttgattcgattcttccggtgcaccaaggcaagaatcctggatacggaatgccctctgtccttgcaacaaggtctaattgagctggtgaacataagccacctatagatggcaaagtaagaacatatggtagcacatgtccactgcagcgtcaggagctggaaacattcacccctagacactgccatggggtcagagccccccagcctgctcgtctgtatgctcccctggctagtttgagcatcggggcactgaagaagcaagccacacccccatcgcacaccctgcaaggggaacaagggaacctttcccatttcacttataagactgatcataagaccgatcagggccgggcatggtggctcacgcctgtaatcccagcactttgggaggccaaggggggcggattatgaggtcaggagattgagaccatcctggctaacatggtgaaaccccgtctctactaaaaataataataataaaaaaactagctgagtgtggtggtgcatgcctgtagttccagctactcgggaggctgaggcaggagaatggcttgaacccgggaggcagaggttgcagtgagctgagattgcaccattgtactccagcctgggtgacagagccagaccccataagactgatcaggaggcctggcaccgaagctcacacttgtaatcccagcactttcagaggccaaggcaggaggattgcttgaggccaggagttcaagaccagcttgggcaacacagcaagaccccatctctccaaaaaatattttctttaagtagccaggtgtggtgttgcatgcctgtagtcccagctattcaggagactgaggcaggaggatcacttgagcccaggagtttgaggctgcagtgagctatgattgcaccactgcactgcagcccaggagacagagtgagatcctgtcttaaacaaacaaaaacacaaaacagatcaaccaagataaaagaaaaataaagagggaaaagcctaaattgccaatatcagaaatgaaagaggaaatatagagattctacagtcactaaaagggaaatcagggaacatgataaaccagtttatgccaatacatttggcaattacaatgaaatgggggaaagtccttgaataatacaatttaccaaaaccaccttagaataaaatggaaaatccgaacgtcaacccagactgaggggcactctgcaaagtcgctgacaaacactcacaaaaatgtcaaggtcaagaaatacaaagaaaggctacaagaactgttgaagaaggatggaaattaggactttgaaaaggtcataggcccgcggtcctggattagatccaggatgtagtgggaaaaagctaaagggatgtttaggcacaattgatgaaatctgagtatggactctggattagatatttcattggtgtgaactttcctgattttgacagctatactgtggtaatgaaaagaagtgtctttgtcaggaagtacacgctgaggtatttagcagtaaaatggcataatttcttcaactctcaactcaccctccgtcgattcagggaaatgcgcatatgcagacacaggcacatgcaaacacatgtaaacacatgcaaacacatataaacacgcgtgaacggcagaacagcaggaaggtaacgccagagagaattgggaacagcaggaaggtaatgcgtgaggagaagtgggaatggcaggaaggtaatggcatgaggagaagtaggaacagcatgaaggtaacgccagtgagaagtgggaacagagggaaggtaacgtcgttgaggagaagtaggaatggcgggaaggtaacgctggtgagaagtgggaaaggcgggaaggaaacaccattgaggagaagtgggaacggcaggaaggtaacgccgtgaggagaagtgggaatggcaggaaggtaacgccagtgaggagtgggaacggtgggaaggtgacaccggtgagaagtgggaaccgcaggaaggtaacgccgttgaggagaagtgggaacggagggaaggtaacgccagtgaggagtgggaacggtgggaaggtgacaccggtgagaagtgggaaccgcaggaatgtaacgccgttgaggagaagtgggaacggagggaaggtaacgccagtgaggagtgggaacggtgggaaggtaacgccagtgaggagtgggaacggtgggaaggtgacaccggtgagaagtgggaaccgcagg

SEQ ID NO: 6261 - DNA, 2300 bp, Homo sapien
tcttttaattaactctgcaattacagcctcctgtctctcatgcagaagcagattcgggctctgtggggagacaggagagagctcctctctgtggatgccgcctctcaaacagcacctgcggccggcgtggctgggttttaattattgcaaaaccctttggtggcttttcatctgtttcagaccaaaaccaataaacacattcacttatgtcttgagtgaggccggccccaagggctccgtgtggtcatggcgcacaaggacctttggagaaacctcatcgtgcccttcgctggcccaacccccgcggatcggccgccccgggcctggttccagctcctgccagctgctgtgggaggcctcagaccctgggacccacagctgggaagctggcggggaggccgaggggccgtcagcaggtctcaggcaggcctctggggtgctcacaccaaccctgtcccatgagtgacctcaatggagcgaaggaaggggtgggaaggcggccgacgtttttctagaagcactgggagatgtacttggcgttctgttgtgtttacagaggatgtccatgttttcctggagcagtgtgaggaacctcgcccgcctctgcccagggcaggcgtgggagggcagggggccgtagtgtgcagagccagggggccctggggtgcagagtcaaggggccgtagggtgcagagtcagggggccgtagggtgcagagtcgggggcgtagggtgcagagttagggggctgtaaggtgcagagtcagggggccatagggtgcagagtcagggggcatagggtgcagagtcaggggccctggggtgcagagtcgggggcgcagggtgcagagtcagggggcatagggtgaagagtcagggggccctggggtgcagagtcgggggcgcagggtgcagagtcagggggccatactgcagagtcagggaccgtagggtgcagagactgggggccatagggtgcagagtcagggggcccgggggtgcagagtcagggggcgtagggtgcagagtcagggggccctggggtgcagtcagggggcatagggtgcagagtcagggggccacagggtgcagagtcagggggccctggggtgcagagtcagggggccatggggtacagagtcggggggacctgggttgcagagtcggggggccctgggttgcagagtcagggggcagaggtgaagccacgccctgggatgtttgacctccctgtgccgaggaggtctccccgcagccccaggctcctctccaccagcagctcaccctgcactggggaatctttgagagcacagcttttcttcttctagagacaggatctcaccctctcacccaggctgagtgcagtggggcgatcacagctcactgcagcctcaacctcctgggctcaagagatcctcctacctcagcctccggagtagctgctaatagaggtagacacgaccacgcctggcgaatctttccatcttttattatgtaaacatggcgtcttgctatgttgcccaggctggcctagaactcctggactcaagtgatcctcccacctctgcctcccacagtgccgggatcacaggtgtgaggccctgcgcccgaccagaagctctgttctgacctcatttctctctctatctctgcccgctggcctttgaggctcggaggagctggccctgaggccctcaccactcactgactcgctggcgttcctcgtcactctgccctgggcccttcccacgacttctctcctctcctcttggttcctattcatctttcaaagccgcctcctccaggacaccctgcctgcttgctcctcccttcctttgcctcaggcgagtgcctgtccctggtgacttgagccacagctatttctgtgcctgtctctcctctggggccgcccacccggctcacatcctccgtgggacttcgcccatccgcacaggccagtcacctagtcacctattaggaggcccaaggagcaatttcagagatcaactcctccattgttctgcaatctcggatctgagtgaagacaccccagcctctaaggggggcgcagtggacccaggaaggggcacctgcccggcagatgcgaggccacgggaaccactcgcggctgaaatccagatgtgcttctctgggcaacgtccatcaccaccaggcacagatggcgcacggtgcacactgccgagggggccggacaccacagtcaccagacagccggggcccaaccgctgggggccacacccggggcagatggacgtaccggcccatcgaggccctcatcaa

SEQ ID NO: 6262 - DNA, 2300 bp, Homo sapien
ctctgcccaagggcagctctggaacacgtggcagtgccagctccccctggctctctctccttcacctaggttatcactaggtgtggaatggggggggaggggcagccctcccgggtcctgaccaccacgtgcgggggcagcaggacattcgcaagccagtggacctgtctgcctcaagtgccggaccccagggcccccacagcacctggtagccttctgtgtgtcctacccggataccagcggcctccagggctttcccttggacaacctttccctttggagcctgtgggggcccagcccagggcccaaaaccagctaggactgaggtgggcagtgggagcttctctggggcctcccagagcctggctggctccaccacctccctctgcccccacagcaccttcgagaagttcccccgcaaagtccccgtgggactcagggcagggctccagtccgtgtgcagggaaagagacaagccagggccactccccccaccggccggggcctcctctgggccccaactgtgatgtgccaggagcctcccgggagacacaggctgacctgtgctcagtgtggtaccctcacctggagcagtctctgtggtgggagccgctgggtgcaggagtaagacgtcagggcagagcccatggggacccccggcctggggacgtctggggcagaatcctccccttgctgcccgcttcttcccagccctcttgtccaggaccatcacccaggggacaccagggggggctccgaggctccaagggaacggtgtccagggagtcagggcggccaggtcctggggtgcctagagcgtctccagctgggaactagaccgtcgcctgcctggaccctgtgtccctcagctggagttcagggaccagcacagtgtccccacagaggggctctgggaacaccagctagatggggcagtggggccctgagcacatcccgctcaaaagccccataatgagaggccggggaagcggaacgctgtcacccctgcatctaattctgcctctgtgagtcttcatgacaacctcccaatagtacatccttcaggcccctcaaaatccatggcagcagggcctggggaccccctgaacaggcgccagtgtcacagaacctggggcagaagtagccatgcaagggtggaggccaaggagggaacaggtggaggggtgtggggtcacccagggccaaagggggaacaggtggaggggtgtggggtcacccagggccaaagggggaacaggtggaggggtgtggagtcccccagggcagttcctgagactcttgctgaggctgccaccaggccagcacgtgccccagaaaacggagtttgtgacgaaaactggagtggacttggacccaccttgtcgggtaggaggccccttggggcaggatagggacctgtgggatgtgtgcagagcccaaacctcgctgcgggtgggaggctgggctgcgccgcccctggcaccctggcctccacactcgccttggctctggatgcccagctctgtggcccaggatgcaggagggttggggtagggggacagggacgctttctgcacagccacaggccctgtctgtctacaccggctgcggctgccctgctgactcacactcagacgggttcacgacaggtgcacctcggttctggcatatctggacttgagaatgttaaataaaggatggaaaattccttccaaatccattttcttgtgtatatttctgttcctgcagcttctccacggatggagattgtctttgggaataacacagggtcgtgcagtccgcccggcggcgttttcgggcgagggtctggtgctggggagcgagcgcggagcgaggtgtctctttaaatacgctctgcagtgtgacggcggccgcccggctggaagagccatccccaccctgcggcaggagcccgcccgccgccatcgcccgccccggtccccatggttacgcgcctgcctccggccccgggtccccgctgtcgccgcgggaggtgcgcgcagaggcggcggcgctgctggccgggctgggccgctcgtgcgcggggctgtgactcaccggccggcgccgcagccccgcaatctgttgataactcggtcccagctcggccgctgccctcgcgaatggagagcgggtccccggcggggggagcgcagcgcgtctgtctccgggagcgcggcccggccgccccggcagccgcttcggccacagcaggtgggaaggacgcgcgggtctgggcggcgggagggacgcgcggggccgcggctcggcagaaaagc

SEQ ID NO: 6263 - DNA, 2300 bp, Homo sapien
gactgccaggaggccgtgcccccggcctgggcctgggcctgggcccagcatggccccggcggaggagtcgctggcacgcacctgaaggtggctaaggtcagacgtacctcctgcctccttaatcattcctctggtaagctggaaacaaccacagcaagtgcccgggaaacgccattgacgtcccgcctgtaagtgcctgcgagaggccgtcaccatcacgtctgcactttgccaccaagtacgccccacactgggatgaagcctgctggatccgcgggtgaggccccccgagggccttcagcaaaccccgcccgcgccttcgggaacacctgccactgcttgcctggacggagctcctggggcccaggcctgcggtgacagctcggggcggatgctggggtgttggggctgcagcaggcaggtctggaaggttccagagggttgcaatcttggaggagatcttgttaaggcaacagccatcaggaggaaatgagcagaaaagattgtggcctatctccagatgctgtcctgatctcccagggagcacgatccactcactcgctcactcagcaaatgtgctgagggcctgcaaggtgccaggccatgctgtgggcactagggcactgccagagacaaacccacatggtctcactgtgaagccgcgttccagaacaggacgcaagtgtggaaaatgaaccgtgggagcattttcccacggcaggtggtgggaggtgcctgccggacgcgtgacgccaggctcgggaagcggaggcaggggccgcagtggctgcagctccagagccactcggggagcccacaaggcgacgttctccgagctccccgatgaactgtctgctccccgtgctctgcgaggcgaacagaagccctctcattgatctaacgctgaggccaggccagttccgcattcccgcctccgggtaaggaggagaattcagccactaccggctggaggaaggagacctgagggtctagtaaaaactagacttggagcccaacctgcctgcatatgggccagtggtggctgatccgccttcccgcctgccccgcccttgtcacacccaccttcctgcccgcctgccccgcccaccggggccacagctcagcactgagtgaaacctggtcccaggctctggatggctggagaggacggactgttgctatggcaacaaagagatggccgtgagccccattcgcatgctaagtgacacattcaacagagacaggcgctggccctgggtccggcggggtggggcagccgtgcagcaccgtgggacgctggtggcttccctgcagcctctccatctgtccagcctgaagtcggtgtccaggactcagagctctgccacgtacaccttcttgtgacccccaaatgcacatggcacgggtgaggctcagctctgccaccctcctcagcgccccgggcagtgacactgacagccccacggctgcttcctgaaaagaaagaacccgaggccgggctgtgggggctgcctctgccctactcctcgacacggtgccccatggtttccaggcctccctgtctccaccaggctgcatgaggcctaggcactgggatgggacacgaccccacactcagtggccaggccgggggaaagggtggagccccccgggggctgctgtgtctcctgcccccagcggcgcacagggatctcacctgaaactgcaaacgcagccctccgatctttccagcccaccccacaatattctcatcaattactgcagagcctcctcatcagtgaaaattgagctctggatctgataaatcatcataatggtgcgacgttagctttatgcggcgaatctctgtattccttaaacatttatgtcctttccaattatagcagtattttacctgtcatttcaaaatgtcaggttattactccaaaggtagcagtgtggccctcgtaataagcaaacgcaggaagtttccatagcaatgaggaacggcgacctgcagggccacacgaatgccggccccgtggggggctcatcccacccacagtaagagcatcctggtgaatgaggaacggcgacctgcagggccacacgaatgccgtccccgtggggggctcatcctacccacagtaagagcatcctggcgtgaccccactgaggacttcacctcctctcccttggtggacacctatccaggtctgagctcaggggacgttggtctgcagctcacagtgtccgtgcctgggccacagggaccacagcgggttgtgcatgcagaggggcgtgagtgcacaggcccatgg

SEQ ID NO: 6264 - DNA, 2300 bp, Homo sapien
atcgcaccctccacttgggtcaaagctttatcactgcaggcgagtgtgcgggcgcccgggacaactcgcaaaacgtctggaagttcccaccactccccagaacaacagagaccaaagcccacaaatctttaaaggaaagcagcaggtgcgtaaaagaaagagcctgcggcccctgcccgaggcccctccccacgtgcccagccctgagcagcagcagcgctgagtgacccaggtgtgggaaatgcctgctgaggggttttaggccgcaacagccgaagctgacacggccgactccaggagcctgtgagttctgcattttaccaaccgcatgcacgtctttccaggagtgcttgccctatggctgccccccaaattatggggttacctttgccccctattcagtgtctatatcctcaccccaagcccgtgaggtgacctgggcactcggtgacaaagtcctgtgcttgtggggtccctggtgccttccctttggggtcacgtcagcccggcgttcccccggaggcacaagtctgggtggcagctgagaggcgtcaggggcacatccagacctgacaaaggaggcggccccagccctgcagcagagggcccaggagcccaggggctcagctccaatgtccaggtctgagcaccagggtgcagcgggatcaggctcctggagcagagtctgcctgccacttccgcctccttccaagacagggactggggcgctgcaggccctgtggggcccacagagagagagctcagggacagctggctgaggccaccctctgtgagactcctcctctccagctccagcccactccaccttggcttgctgcccaagcttccaaacacccaaggatgggggaggctgcacctgactgctgactcggtggaccagggtgggccccagggtgggcattttcaataaggtggggctgcctggctggacgcagggagtctgcccagcacctgccccactcccagcctccggcttcagtgcccacctggctcccggggagctgagcccctgaactccctgccaggccagagtgacagcccgggtgaccgaccaggggacagagtgctgggaattcacgtccctgaacacactgcaccctcccactctgcggtcaaaagccctgctgctccttcaagccaggagcatggattaagtacctactgtgtgcctggccagccacacggacggggagctgacagccgggccctgaagccgccctctctcctgtgggagttctgggggtggccggggaaggtgagattctcctccaccctccctgcctcttggccgagcttggggctatcctggctcttctgaccgcggcactaccgtgggccggggtcaccctggcgctgaagaaagccccggggggcctttggggcaggaagaggtcaagagccccaggaccccccagggtcccccaggaccggggagggtcgggtgcccagtgggtctctccgatgcctccaggtggggatgaggcagcgttattgccccacccccaacatccccgggcctccgaaagaccctcgctcaggagagaccccggcccagcgaccgccccgccccccaccccgggccccgccccccaccccgggccccgcccggccctgcccaacgccgctgcagaggccaccccgggactgcggcagccccgcccggcagcagcgggggtgggacgggggcggcgggagccggcgagggggtctgcccgtccgagctttcctgggcgccggctccgcccctcgacccttggggcccaggtggggcgcagaccccgtggctccccgcggaggccacacgcctggctccgcccccggtgcctcccccaggaaggagcgacgttccctaggcgccgggtccggacagcgccgcgcagcccccgcgcaccccgcgccccccgcgccccccgggcccgccccgtatccctgaccgcgtcccctggagacactgcggcagcggcgggcgggcgggggcgggcgagggccgggcgcgtctccatggagccagggcgcgcgtagccgagcccagcccagcccagccggaggccccgggggcggtgcgcggcgcggccgcaggatgcaggccatggacccggccgcggcggatctttacgaggaggacggcaaagacctggacttctacgacttcgagccgctgcccaccctccccgaggacgaggtgagcccccggccccactggggggccccttccgccgccgaggggtccgcggagagcgcccggggggaggacccgggaggggctgtgagctcccgcc

SEQ ID NO: 6265 - DNA, 2300 bp, Homo sapien
cgaattccagcatgggtctgtccggcttcacttccatctcatttactgaaatgaatgaaaacatcaaccaacactcatgtcagcagcactcgtgtattgtggtggactgtggatgaacatgggtttcattgatttttatcaatgaaagccttcagtgagaattgactggctctgtggaacttacaaaacgtgcatcaaatggtgtgctgtgcatcccttacatcagcaacgtgccggatgaactcagtttgcacacaggcggtgtgttcgctcggagagccagttgttagccatgtagcagcacggcaccagtcggggggcttccgggagcaggcaccagtcggggggctcccgggtccgtgaggtgggggctatgctggccagttctcctcaaaccctcgagctgctgccttcgtgaggagagtggaaggtgggaaagtccagttgaggcttccaaccctctggtgtttaaaacgcggacagaaccatgggggagagttcgacctgcaggttcctggaccacgacctggaggcggatgcaggggtccagggtggggcctgatagatgctgaggaggggtcttgaggagagcccctctgtgggggcagtgcctgggtgcccctcagggtgcctgaggtgggcaggtctgctgggcacagcagcccacagccctgcggtagacactattctctccccacccgcccaggcctctgtgtactgtgtggccgccgttctgtggaccgcagccaagttcagcgtcccccgcaaccacaagctggccctgccacgcaggctcaagaccctcctcctggacatggccaggcgcagtgccccggagcggccgtccgcggctgaggccatcaaggtaaccacaccacagtcatggccccagcccagggtccaaggactgtgggcagtggccgccctcgctgagctgggggtggaggagcacgggctgccagtgtccaggtgatgaggccaccaggtctgtttctaggtccctgtttctagacgtcggcctggccgtcgcatggggaagggagtgggtttcgcgtcatggccacgtccatgtgggtggacagcatgggggtctctgctgctccccaccatggccgttcctcctgcggagcccgctctctccagcttgtccaagaggccagggcgggggcaaggggtgtcctgtgggcacgtgcagacccctgctcttaggccctgctggaggggagcagagagaggcctccacacctcaccccccaccccgaacccccacctcctctgaggatcccaccagccccgcccctccctgcctggtctccctgctggactcaagctttggggctgggttctaacgtactcctgctgggacctgcacccgcacccggcatggggaccagcgggtggaccagcaggtggggcaggagccaaactctcatgtgtcagtgatcaggaggacctcctggggaggagccgagctgggtgtgggtgatcaggaggacctcctggggaggagccgtgtctgggggagcggagacggccatggggttggggacctgggtccagccgtctccgcctcgactgctctgtggtcttgggcgggttgctcagaccctgtgggcctctcaggcctcctctgctgcaggaggatgagatctagacacggctgggcgtctgccaagcagtgaaagcagattttattcagtaactactgagagctggggaagctgagctcagttcccatgtgcacaaggcctgagcttataaagggaggacaggagtggccgggggcagggagcgtggggctcaggcgaacgtgaccaagggctgccagtgtccaggcgacgaggctaccaggtctgtggccaacgctgggtttgggattctgccctcccagggagcctgggggacagtggccgactgtgagcccttttcaggaaatgctctaagaaaggcttgtccggggcctgtagttgggtgtcggtgagaacaaacaggaaaccctcctggcagccctgagctttttcagatggggacccagtgacacggggacggtgcagccgtggctgaggcctgtcgggacgtgtgaactgtctcctccctccaggtgtgcggcagctacctcctccagcgaggcatggacagccggaaaatccttgcccacctcagagcttccatctgccaggtgggctagaacagccaggccgccgcctcctccgccgcgcttagcttcctccctcctggacgcacttgcccttgcctggccgctcccggcagccccacaccccggtctctgttgaccaccg

SEQ ID NO: 6266 - DNA, 2300 bp, Homo sapien
cccgtgtgcctgtcccgtaggacagaaggagtgctcagacgagggctgcccggccaggcgtgggaggcatcctgggacaacgcggcgccctctccctgaatgtagagtcccgtccagggaggcgctcagccccagctgctgtctgtgcatgaagcagtgcccggcggccctcgcccccagctcctgtgatcaggacctgcccgtctggcctcagtcctgcttccctcatggcgacagccctggggatgaggtccccggctccatctcgcaggcaggaactcagactctgggcaggttccggagaatcacacccgggcgtgcactcacatttacactcaacgctcatgctctatggagcacccaagggctggggcaaacgctgcggccgccgcccagcaaaccacgatggtccagccagtgggttcccgggaggagggtttttgggggcctcgtctgcacaggccagctggaatccgcatcattgggcttctttaagtttaaaagaaaggcaaggctggtgcagtggctcacgcctgtaatcccagcactttgggaggctgagatgggagaaatgcttgaacccagggagttggaggttgcagtgagttgtgatcgcgccactgcactcccacctgggcagcagagcgaatcgggccaccgcactccagcccgagtgacagcaagacctcatctcaaaaaataaaaaataaaataaaattaaaaagtcaataaaaataaaaaacggccaggcgtggtggctcacacctgtaatcccggcactctgggaggccgaggcgggcagatcacctgaggtcgggagttcaagaccagcctgaccaacatggagaaaccccatctctaccaaaaatacaaaattagccgggcatggtggtgcatgcctgtaatcccagctactcgggaggctgaggcaggagaatcgcttgaacctgggaggcagaggttgtggtgagctgagatggtgccattgcactccagcctgggcaacaagagaaaaaccccatctcaaaaataataactaaattaaaaaataaaaaataaaaaggcagacacctgaagacacacgggatgcacgttggggaggtcccgctgccaccccctgcccccagccccgcccacaatgtgcacttgggggcccagaggtggcacagccctgcctgcttgggcaggagggcctggtgctgacttggtggggcctggttcccctgagcatcccccacaagggcctgactgtgggtgaggggcgcagggagcagtcggccccaagctgggcactgccctgtgagcctgggggcagcccagggccccccagaccacactgcccaggccggggctggcctcgctggctgagtgggcctctgtctccatgggaccctgccctgcagctgatctccaaggccaaggaggccccagtggggtggggcctggccctggatgtggctgacgtgtgttggggctgcctggggcttaggcgctgtgtttcgtccccaggagctggaacagcagctcatgatggagaaaagaaactaccgcaagaccctgaagttctaccagaaactcttacagaaggaaaagaggaacaaaggtaaggcccctgtgggcacaggtccgagaccctggctgcaggcagcccggcccccacccactctgctccacccacaggttccgacgtcaagaccatgctgtccaagctgaaagggcagctagaagaaatgaaatccagggtgcaattcctcagcttggtcaagaagtatctgcaggcaagtgggctccgggccccgctctgccccgtgaggcagtagcttcagacgggcctcccactgttggatgctgtaaatctgtccgtgtgaagttataaaaggggccctgatttgagggtccaatgccaggaagccctggggcgaggggcagagtgaccaagcgcccgtgtcccgctccggcaggtcatgtacgcggaacgctggggcctggagccctgcaccctcccagtgatcgtgaacatcgcggccgcaccctgcgacacgctggacttcagccccctggacgagtcctcctcgctcatcttctacaacgtcaacaagcacccgggcggccggcagaaggcccgcatcctgcaggccggcacgccgctggggctcatggcctacctgtactccaggtgcgttgggagaaaagctcacccggaaaaggagacgtagcccggggtgctgagaagagggggggaacgtgccctcgccagtcagctaggctgggtttgcactttttagtttagagaaatgttt

SEQ ID NO: 6267 - DNA, 2300 bp, Homo sapien
catagccaagaggtggaggcacctaaatgtccacggagagaagaacagataaagaaaatgcggcctctttgtaccttgagaacttattcagccttaacaggagggaaattctgacgcctgcggcagcacgatgaacctcgagggactcaggctcagggaaacgagccagtcgcgaagcacggacagtggacggctccacgtacacgaggcgcctggaggcgcaagattcacggagacaaagtagcagggtgggcgccgggggctgggagtggggcacggggagctcgtgttgaacggggaccgagtttccgtttgggaagatggagagtcgcagacatgctgcacagtgtggatgtagttaacacggctgaaccgtgcactcagaaaaggctacaaaggtaaatcctctattacatactttttacaattaaaaatcaaaaggttaaaacaacagtgaaaaagtgtggcgaaatagttttatctcaaaattacatactttgcatctacttaaaccgatgaagaaacagactgagacgtcagcgtagaaagtgtatccggtaaacacttctcaagctcctctcaaggcgctcaggcaagagggctggggccgcagtcggggtgagcccaggatcacatgaggcgccttcagctgcacaggggccctgcagacaagagttgagcccgggggcaggcgcggtggctcacgcctctaatcccagcactttgggagtccgaggcgggcagatcacgaggtcaggagttcgagaccagcctggctgacatggtgaaaccccatctctactaaaaatacaaaaattatcacgcctgtgatcccagcactttgggagtctgaggcaggcagatcatgaggtcaggagttcgagaccagcctggctgacatggtgaaaccccatctctactaaaaatacaaaaattatcacggctgtgatcccagcactttgggagtccaaggcgggtggatcatgaggtcaggagttcgagacctgcctggccaatatggtgaaacctcatctccactaaaaatacaaaaattatcacatctgtaatcccagcactttgggagtccaaggcgggcagatcacgaggtcaggagttcgagaccagcctgaccaacatggggaaaccctgtctccactaaaaatacaaaaattatcacgcctgtaatcccagcactttgagaggctgaggcaggagaatcacttgaacccgggaggtggaggctgcaccgagccgagatcgcgccactgcactccagcctgggccacagagcaagactccatctcaaaaaaaaaaaaaaaaagagtcgatccggggcatggcgtccagctggactctgcagccttggtttccaccaaaggatggcccaggccaaggtgattcctcagggacaggcagctacaacaggaggggtcagctgagttctccagaatcttcctgaagccctggaagtggatccaggaacgcagccctttgggactgctcagaataggaatcctgctgggtgaggcattcaccacccatggggtgttccaaccaaggccagcaaggtcgtcaccgccagccacagagccccggaggagggggcggcactcaggcacccaccccggactgcacccaaacactcctgccacgggcttggcgcagcgggttggggggtgggcacggagctgcctgtggctccccatctgcctgtggacacgacagcggcctctccctgggtggggtcgcctttcccagtcctgaagctgcctggggaggtgcatccaggcacaatcttgcttttgagaagtgagggtggacttcttttcaagtctttccgcgtatcaggctttgcttttattttgttttatttcaagtcatgcccaccccgtcccgccagcccagcccctccacggccaccgctcacctgcgtccacacagccgcttcctttccacacacgtgatgcagcacacgctcttgtgtcttggagctgggtgattttaacaggttctcaaatattccctttgttcatcttaaaccagaagacgctgaatgtgtcattttcttattgcagctgcaggtgaacttgctgtccaaatttttgctgattgcaaaatcttgctatgagcagagaaacttcgcgacagccatgcagatcctgagcgggctggagcacctggccgtgaggcagtcccctgtgcgtccccctcgggccccaaggcgggggtgggtacccgcacggccgcaggaggctcacctgtgctttcatttcaggcctggagaattctgcctgcaaaga

SEQ ID NO: 6268 - DNA, 2300 bp, Homo sapien
ccatgttggccaggctggtctcagactcctgacctcaggtgatccgcctgcctcagcctcccaaagtgctgggattacagccaccacgcctgcacgccccccttttctttttaagacagagtcttgccctgtcacccaggcaggagtgcagtcaggtcatcacggtacactgcaggcttaacctcctgagcaaaaggacatcctcccgcctcagcctcccaagtagctggaactacaggcacctgctactacactcggctattttttatttttttgcagagatgggggtctcactatattgcccaggtcagtctcaaactcctggcctcaggagatctgcccacctcagcctcccaaagtgctaggaatacaggtgtgagccccgtgtatgagtgcctggccaggaaccacagatttcttgagaagtgtctgaaaagctgattctaggaccagggtcggcaaaggaccagatgaggcaggagcatcctgtattgccagggagctgggagggggtttcaaaaggacaaggaagagaggaggaggtgagaagactttcaatggccaaagcaggaacgatatgcgcaaaaatacaaataaaagcccggcacaggggctcactcctgtaatctcagcacattgggaggcccaggcaggaggatcacttgagcccaggagttcaagacgagcctaggcaacatagcaagaccctgtccctacaaaaagtaaaaaaaaaaaaaaaaaactaggtgcgtgtggtggtgcacacatgtagtcccagctaccaaggaagctgaggctggaggatcacttgggcccaagagttcaaggctacagtgagctgtgatcaggccactgcactccagcctgagtgacagaaagagaccccatttgtaaaaaataataaaaacaaacagaacttttaaaacaaataaataataacagcatcgggttatgacctaaaggataaaataaatatacacgagcccacactgtagaaataaatgactgagtaaataaatcaacaggcagagagacaaaccttacagaagaatcccagaaaatacagacacccctccaggaggtggggcctaattactctccccatgagttggggatgggctgaggggccggattccagtgaccagagcagggatggaaaggcgatacctgaagactgcaagagtggcagacagtccgcaccccagcacggagcagacctcaccggtgctgagccacaagacaggaggggcgagactccacccctgcgccttccttcctaaaacccaccaccctagtcggatcacaggaagacaccaggcaaacccaagtcgaggaacattcaacaaaacacctggcccgtcctcaaccgtgtcgaggacgcgagaagctgccacggcccagaggagacccaggagacagaaggactcggcgccgtgcggcaaggaggaagagcatttaataggaagagaatttcctcctcccagggatgctggctgcagacgcgctgcagatggaagaagttcagattttaaaagctacttctgcgagcgcgtgaattccgacacccattcccgcggctggcgtggcttctcctcggacccatcccctggcctggcgactccccctgggacccgggtcggtcctccggacccctcgcgtgcaggtgctgagcccgggcgggggcggcgggggcgggggcagcactgggggccggacaagggggcgccagcgccttccggagcgggaggggctccgcacacacctcgacgggggcgggggtaggctcggcacaggctaaaaacgagcggagccgccggggcttaggcatcgcggcacctccgttgaacgggtctaagaacagaactcctgaggaccctccgtttccaaccgaagccagtctttgctctgcgtcttcccggccgcagcgccaggaccgaccccttaggacccggcgggcggggcggggcgcgcggggcggggcggggatggtgggagggtcgcgtagacccggctgggacggagggacggcggcgcgggatgctcagaacgcgtgtgggcggcccgggcggcgtctggccctctccccatcctcgcgcgccgcgccccagccccgggatgctgctccggccccgcaggccgcccccgctcgcgccccccgcgccgccctcgcccgccagccccgaccccgagccgcggacacccggagacgccccggggaccccgccccggaggcccgcctcgcccagcgcgctgggggaactcgggttgccggtgtccccgggctcggcgcagcgcacgcc

SEQ ID NO: 6269 - DNA, 2300 bp, Homo sapien
gcctgaccctgccgtgtgaaggtgaggttgtcttcgggcttggggggatcggagggggcggttcaggtggaggtggtggcggggggctgggaaaccggcaggaggggctctatgtagagctgggggtgggggtgctgaaccacgtacagaagggggctgagacaccggggccctgggccccggaaattagaaatggagaaatggaaggctgggtgctggcgtttcggaaatgcatgctcgtggtgttcctctttatgtaagggaagcttctgggccttttccctgcctgtcgaacgttctgtatgtttttgcgggatgtgtgaggtgtgctgtcttgctccactttgaggcaccgcccccactgcgggagtgctggggacctgccccatggggcatcctcggggccagccctgtggccacaggcatctgggccctcgctgcccctggccgggacacactgccggtcctgtgcagtggctcaaagcccctctaccgggggtgacccggtctctccggagatgaagtgcagcgggggtctaggccggcttcctggccccccacccctcctggctttacccccgaggccacgtccaaagcccccagcgccccacccccgccagcctcccccttgagggcccagtgacctaactgggccggcagggtccgaggaagaccagggtcagcggcggcacggtccgttccgcgacccctctcctgtgaccccaggtaggccgccgatcggttcccggctgaggtcccgccccagcgcccgcctcccgggctccaacctctttgctcagcccgggaggctcggctggctggggcgggcgtaaccgtggggcgaggcccgccggtctttctgatttccgcgggcggcgtgggcgctgaggcagccgcggtcaggacctggccgggagtcggggctgctccgtggaccccgcgtctgcgccgaaaccccgcatggcttcgggggccggacctgcgcctccgcctaactccggccgccggagacgccgtgcggaccccaagccagtgcgcggaagacaccgtcctaccctcggcatggctgcctcccacccggtcacgtcggtccccgcgccccacgccgacgcgcaggcgacccggggacgcggagacgcagacagctcgggactcaggttcgtgggagcagcggccgcgcgtggctatgaccgtcccgggggcccgtgctcagggcgtccccgtgaggtttgggcgccacagtcaccggcggctctgcccgcgccctggccacagtggggacagcctggcttggcggggacgcaccagtcccgccgccgacgcggagttcctaccccgccgtgcgaggcagtggctccggcccttccagctcgggatggagtcagggagccgcccgcgcccgaatgcagaggctcctgcgatggccccggagtgagtcccccagaggagccggattagggctggaggcggccgagtcccccgagaggcccctcccgacattcccgcccccgcgcgccgctccccgggtcctccgcgtctctttcccgggaaagcctccctcggttcctgcgcggccgcacagcctggacgcagcgcacgcgggcaccggcctgactctcccaccccgaagcctgctcccaacctaagtccgccctgactctcccagcctgaagcctgctcgccctcgggtgtccgggctgggcacaggcgccagcgtccccctggagaggagaggtcgcccggcacctcccaggacaggcccaagtgggagtgggaccctcctaccttcctgcagcctcggcccgcggggtggggggttgggagagatgaaaggaggtgaccgatcccgaaccatcgcctctccattaaccagggcccgcagccccgcccctcccccagacatcgaggagccggggaggtgtgaacggcctcctttgtgcctctgaatcgaaggcaattaggcgctgcttatctgggcattagccgtgtatgcaaaccgggctcccgccccctcctcctgggcttataaacgccgccgcctggcgaggcccgaggtggatcctgcgcctggccagccccgcctggccttccctccggcccacctggccgccatgcgcctctcctcctccccacctcgtggcccgcagcagctctccagctttggctccgtggactggctctcccagagcagctgctcagggccgacccacacccccaggcctgccgacttctccctggggagcctccctggcccaggccagacatccggcgcccgggagccccctcaggccgtcagcatc

SEQ ID NO: 6270 - DNA, 2300 bp, Homo sapien
ggccaggttggtctgctctggttacattctggccaagctgccccttcctgctgacctgcatgtgtattgttgtcaccttcagctctcagcacctcggcccccttgggcagtgaggaagggccctggaggcgaggttgggagaaaggatagctagaacaggatcctgcggggaacaagggttgtgggcagctctcacccggggctgcctcactgagagcaccgccgagtgggggtgggggtgtccaactctccagccacaaaccgcttcctccttgtctgcaggctgtgcaggtctggcctgtgagtaaacacatttatcagcaacccaagctgtcagtctcagtgttgtgcaaatgccggactggtgagcagaggagcctgctagctttcctgcctggccccgaggcccagaaacccctgatcttgtgtcctggggtctgggaagccctgggccttgagaagtggggtttgcaggtggtgataggaggaggggagggaagcctccagggctgtggggttcaggctcccagaccccccggcacctgctgaagaggagagctgtgttctgtgggattgggtggaacttcctcagcgcgggaggagcctgttctggcccaagctggtcctgtctttttaggaataaatccctggtagctcagcgtcggcaggggccttgctgtgcctctgatgtggccagcgtgccgcctttgcactttgctgttgagtaacttgcaccatgaggtcaaggaagggaagtgtgattgccagctggccattgttctataataacagggtcacctgcatgagctcaggcacaggccagtatccccagccctacctgggagcctctcggcagcctgggggacctcgtcctgtgccacacaggcaagcggacacacccccaggcagcagaagtcacctgcggcccagtgccagcccttgctttcttgcttttcatgccattcacattagggtaagaatggctttgagacaaaatgtgacagcatcactcacgccagcttagatcctccgggttccctgtcctcccaggataacgtccgaggccccggcctcttcttgccactgccccttgacctctgtcctctgcccctaggcccgtgcagttccctgactcgccctgccctggtgccctctctccaggcaggactccctccagccccttgctggccctgccctgcctctccccagggaggccctgaggccccccccccccatgtgatctgtcagcagcgccctgtgtggtcatctgagctgcctttcctgccaccaccactgttcccactccaggagggcggcctggctgtgaaagccccagggaggggtcctgggtggaccgtctggggagctgtggtgtcagcccaaacctgcaccctcgaggctgagcccaccacggggaatgtggtcaccaagggcaagcacgcttggccgcaggcctggagacgccggagccaggccacggtgggctgctgcaggctttggtccacgtcggccagcgtcagctgctgtctggggatcttaggctagggacggcccctgcacctgccatcacctgggctgggacccccacctagggctccccctccccacttggacgcctgcgggcccatgcctatcccactccggtgaggcctcagcctggtggagggggcgcaggcttgggggggagggtggcagagcttcccacagggctgaacctatgcccacaaagccatgacttgcccctgcctgaggctttctgttccccaggaaatcagagaccccctctcctgaaaccgccaggcggccctcacaagtcccttcccctccaggacctgcctggcgccacctccttccagccgccgggtccttcgagaggccccctctcggggctctggccggacttgggacaggctgtgcctgagtttcctcacctgtgcaagggaggatgctggattgtggggagaggggaaacggaccccgcccccaggtgccgcgcgccccgcccctcccaccggccgaggggcccattggctgcggggcgccggggcggggcgcgcggaaaagagcctcgggccaggagcgcaggaaccagaccgtgtcccgcggggctgtcacctccgcctctgctccccgacccggccatgcgcggcctcgggctctggctgctgggcgcgatgatgctgcctggtgagtggttccagggaaccgtcccgggcgcagcgcggggcagggtggctctccccgcaggacgcgacgcggaccccgagcccctggcctgctcgcaccccgcaccctggccc

SEQ ID NO: 6271 - DNA, 2300 bp, Homo sapien
tggagcagctgcacaggcagggcctcctttcgctgcagaagctctggttctacatccagccagccatgcgcaccatggacatcctggcctccctcggtgcgtgcccgcccggggggcatggggcagtggtgggtggcaggtgttgaacatggcacccagtgtgaggagagactctgcaggggccgtggagcagctgcccagggcaggggcgtgtggccaaagctcatgttgctccatgtgctattaacttgcaagaggaaagccctggaagctcttactggtcagctgaaatcagcaactacaaccttacagttaatacgtatcccaaagaagcagcaccgtcccaggaagaaggttggagaagcatgaggggccccagcagtgttgttggcagaggctgggcgtgcgcttccttctcagcagtgagccctcctttctccccacagccacctcggtggacaaaggcgaatgtcttggggggtccacgctgagcctgctccacgacaggagcttcagctacacaggggacagccaggcgcaggagctatgcctgtacctaaccaaggcggccagtgctccctacttcgaggttctggagaagtggatctacaggggcatcatccacgacccatacaggtagggctccccgggacacggggacacggagggacacggggacacggagggacatgggggacacggagtgtgcatgctgccctctcccgtacaggtagggctccccgggacacggggacacgggggacacggagggacacgggggacacggagtgtgcatgctgccctctcccgtacaggtagggctccccgggacacggggacatgggggacacggagggacacgggggacacggagtgtgcatgctgccctctcccgtacaggtagggctccccgggacacggggacatgggggacacggagggacacgggggacacggagtgtgcatgctgccctctcccgtacaggtagggctccccgggacacggggacatgggggacatgggggacacggagggacacggagggacacggagggacacgggggacacggagggacatgggggacacggagggacacggagggacacagagggacatgggggacacggagggtgcgtgctgccctctcccgtacaggtagggctccccgggacacggggacacggagggacacggagggacatgggggacacggagggacatgggggacacggacggtgcatgctgccctctcccgtacaggtagggctccccgggacacagggacacggagggacatgggggacacggagggacatgggggacacggagggcgcgtgctgccctctcccgtacaggtagggctccccgggacacggggacacggagggacacggggacacggagggacatgggggacacggacggtgcatgctgccctctcccgtacaggtagggctccccgggacacggggacacggagggacacggggacacggagggacatgggggacacggacggtgcatgctgccctctcccgtacaggtagggctccccgggacacggggacacggagggacacggggacacggagggacatgggggacacggacggtgcatgctgccctctcccgtacaggtagggctccccgggacacggggacacggagggacacggggacacggagggacatgggggacacggacggtgcatgctgccctctcccgtacaggtagggctccccgggacacggggacacggagggacacggggacacggagggacatgggggacacggacggtgcatgctgccctctcccgtacaggtagggctccccgggacacagggacacggagggacatgggggacacggagggacatgggggacacggagggcgcgtgctgccctctctgggggctctggccttcctttgcttgtggtctcaggaaagcacaccccgggcagatgtccgcctgctgcccatggggcccagggcaggaatggcccagctgcttatggccttattcttttgtgtgcaggacattaaattgcctccaattaggtccttcaacctctttggtgcttggatttcctgatctggtggggtctgtcggcttctcttcagtgcgatatatttaaatggataaaaatatgttagttcccaaagaattgtattatgtctattacgtcaagataccgttgttgaaatattttcaaaaaatacattagtgatgtggaaatgttatttctttactaatggaccaaataaaatctggtataatgggcacctttaaaga

SEQ ID NO: 6272 - DNA, 2300 bp, Homo sapien
aaaaataataataaaaaaaataaaaactaccttcaggaaacttcgtatctcttctagaaatagaagcacagatgcccgcacgtcatgagtgttcatcccatgaggagcctgctgctctccctgaatgtggggaccgggcctccaagagggcagcccgtactcgcacagagtccctccccccagaagacctttggaaaagtcctagggcaactctggggtgtcacggtcatggaagggtgctctcgctacttagagggcaagggcgggggatgctaatcatcaacagagctgtcccgccagaaatgcacagcgtcccactgaaaacacagctctgaggaacatctagccgtggctgcttcttggaggaacgtctagccatggccgctgacttggccttcttgatgctcctgaattcttactattaatcacacaaactgacaggcccagcaactgtgactgggagggactgacgtcctcctcacagaggctgtgagctaccgcagggacgcgtgctgagggaagcaatgcacgcatgtcacactccaccacggacaagcggggcacacactcctagtgagcacacactccaagtgattaaaacacagagggacgtgaaaaagagtctctgttgagagctcaaagctaactgtacaaattggtttgaaaaatgttattttacaacttgtggaaaatgtcaagagcccaaaggcttttacagagacagaaagtacagtcatgcatcactcaacattctgagaaatgcctggccaacatggtgaaaaccagtctctaccaaaaatacaaaaattggccaagcctggtggcgcacacttgtaatcccagctacttgggaagctgaggcacgagaatcgcttgaacccagcaggcagaggttgcagtgagcccagatcgcgccactgcactccagcctgagcgacagagagagacactatctccaaaagaaaaaaagagaaacgtatggttacatgatttccttctgtgcgatcatcagagtcactcgcagacctggatggtgtacggcctacaatgcacctaaaccacctagaggagcctcttgctcgtgggctacaaacctgcccagcaggtggcggtgctgaacactagacaactgtaacacagagatatttgtgtatctaaacatggaaaaagtacaggggcaggcatggtggctcacgcctgcagttacagctctttggaacgctgaggcagcaggaccacttgagcccaagaatttgaggccgcagcgatctatcagctatgatcgcaccattgcactccagcctgggtgacagacgagaaagctaaagcctctatccgccactgggcccattctctgcagtagatctgaagcgtccactgcttcccgcgtgtgttgtcattcaccattttaattaggtgactctttactctgacgtctgtctctcctacaaggctgccgcgccctcctgtgatgccttcccccacacgccctgagcacctagcacaggtcctgtgtttcacgggagctgcggggactggagaggtcgacaggaccccgacaaaccaggaaagggcctttgaactaaagtaacgggaagtcacccaagggctttaaattaaaaacggttacaataaaactggagtcactttggctccagttcgcgactggtttagagggaacaagatccagggactgcagcgggagacgacaggcggggcaaggcggacgggagagggcgtgcgagagggggacctgcgacccggcttcccagggctgggaggggacacccgggacgacccggaggcccgctccgccccgccccggctgagtgtcgggccgcggggcaagacgctggcctggccggtgcaggcccgaagggcttcggccccagagttcggggaccgctgcacagccagagggagcgcgcgggaagagccgcgtcccgccagccccgtcgcctcgtgggcccccccgggcctggcagtcccccaaccccctcatcacgcccgcgcccgcgttcggccaggactcaccgcagtcccggagccacagcccccgcgcagcccccgacggcggcggaagtgagcgtgacgtcacgtccggctcggctcgcggacggtggccgacaggctgcgcccgcccgcgcccggggtgatgcagttgccccccgcgctgtgcgcccgcctcgctgcggggcccggggcggcggagccgctgcctgtagagcgggatcccgcggctggggccgcgccctttcgcttcgttgcgcgccccgtgcgcttcccgcgggagcaccagt

SEQ ID NO: 6273 - DNA, 2300 bp, Homo sapien
atcagttaaaaaaagaagaaatataacacaatttaaaaattgttccggctggacatggtagctcatacctacaatctcagcactttgggaggctgaggcagatggacggcttgagcccaggagttcacgaccagactgggcaacatagcaagaccctgtctctacaaaaaatagaaaattttgccgagtgcggcgatgcgtgttggtagtcctagcactttaggaggctgaagtgggagaatcgcttgagcctgagaagtggaggttgcagtgaacctacatcacaccactacactccagcctgggtgtcagagcaagaccctgtctcaaaaaaaaaaaaagattgttcctggaagtatttcccagagtgcactctaggcaggaacatgttaatcaacagctttgtcatcaagttcatatgcgcacaaccaaccaggacaaaaggaaagccagggctgcatgatgtgtgagcacggccgacggctgcaggaggtacagacacggccccgaggggtgtgagtgcggatgaccacggccgactgctgcaggaggtacaggcatggcccagaggggtgtgagtgcggaggcgctgcgcccgctcattcccacaccccctctgctgcctccaccggcacagagctgggcagccaggggctcccctccagcctcccttcggcagggtggccgctggcacaaccacctgtagctgtgttgccagggcttcaggtacctgcaggtgaacaccccattaggtgacacacaagtgcttaataagtctgaccgtctatgcattccggctagttggaaaccttttcctaaaatcaaaagcagacacgtgctgagcctggcggctccctaccttctgcttttctttggcttatcaaaccggaagtccgcggggtacaggtgcatcctcaccatgtgatccttccggtctctgctggtcttgaacttctctgtgcagccttctaccaagcactgatactgaaatggagaccgtgtcacctccctctgacccctggccctcccccaccgccatgcccccgtagcagagctgccaagggcggaaaggtgtccccggccttgcccgagcacccgagagctgggggcagcactctgagcccatcaccaatggggggtggcctcggcggctgtgcagttgtcacccaccatgtcctgcctctcagacaggatctggaagagcgaatcgtgccactccaggatgtgggcgtccagcaggtgtccggaagggaaggcccgcttgcaaaaggagcaaacatttccgtgcagcgtgtggtagtggtgctcgtagtcgtccagggcatcgaacacctggcagcagccggccacctggcaggcaaacgcgggcaccctgccaaggagacgtgcttcaggagcccttcctccggtgcgaggaaccaagctggactttctgcacagtttccctttgagacgtccaataaagcccctatgcatcttttgcaatcccaaaccctctttttatgaattaagtttcacaaacaggctaggtggtggaagagtcggccacgccaaagctggacaggcacagcgcctcggtggggcggccgcacatggaagagcggcagcacagccccagggaccaggcaccggtcagggaggcggcgcaggagtagcactggctaggcactgcccattcgcttacctgggcttctcaggcacgtcggccacctgcatgatcacgtcctggaggtagaggtggcgctgcacgtccccatcctgcaggaaaagtgcgccgtgggcggggccaggtgactcgcggcacgcccaccgcgtcaggcctcgcccacacccgtggccccagtcatcccgcgctccggtcccgccccacagcctcaggccccgcccactccacgttccggccccgccccaccacctcaggtcccgcctgtcccaggctccggccccgccccgcagtcgtaggcccctcccactccaggctccggccccgcctcgccgccgtaggccccactggatcctacaactactttttccctcttttgctcacgcacctcgaagaactggtgctcccgcgggaagcgcacggggcgcgcaacgaagcgaaagggcgcggccccagccgcgggatcccgctctacaggcagcggctccgccgccccgggccccgcagcgaggcgggcgcacagcgcggggggcaactgcatcaccccgggcgcgggcgggcgcagcctgtcggccaccgtccgcgagccgagccggacgtgacgtcacgctcacttccgccgccgtcgggggctgcg

SEQ ID NO: 6274 - DNA, 2300 bp, Homo sapien
cactggacagggggcccttcgtcatttggcagccaaggcagagaggcagagagagagaggcagcttacgccattacttctgcatatcagagacttttagtactttcactaattttgctactgctatctaaagtgcagagccaggtgtacagaatggaacatgaaagcggactaggagtgtgaccactgaagcacagcatcacagggagacggttaggcctccagatggctgcgggcgggcctgactgatatcaggccttccacaagaggtggaggagtagagtcttctctaaactcccccagggaaagggagactccctctcccagtctgctaagtagcaggtgcttttcctttgcactgacgttaccactagactacggtccgcttggcgacgggcatcttcccagacgctggcgtcaccgctagaccaaggagccctctggtggccctgtccgggcatgacagaaggctcacactcttgtcttctggtcacttctcactatgtcccctcagctcctatttccgtatggcctggtttttcctaggttatgattgtagagtgaggattattataatattggaataaagaataattactacaaactaatgattagtgatacatatataatcatatctatgacatatatctagtataactcctgttattttatatatttgttatactggaacagctcgtgccctcgttctcttgccttggcacctgggtggcttgccgcctatatcacatgctgtgggaacagggccgctggaggaagacgtggtcgggagtctctgagcgccctaattttatcaaaacagagtgatttctccaggacacactgcccccagtgtatctctgcaatccaatgccagccccaatctcctggcctgcatttcctgatgcaggctctgtggtccccgctggcactagtgatggatcctgcaccctctggggcagcaccccccactcccccagcatcccacacacccccaagcaccccatgcccccagagccagtgcccctccctgtgggcatcagatcctacccccaccaggtctactccctaagtggtgtggcaaggacaactgggtgtggctcccaaagccaggaggtccgggacgaggtggagtgctgtatcctaccccatcacccacctctgaggggtgccaggactttataaatcttcctgaaaactgagggtggaaaacagaatacccatgggtaacaataaccactccgcacctgactcaacacagaaatgaagactcaagaccatcagtgaaaaatacttatttcatgtgtttaaaaatacattcttagggtgggccctgcaggaggagacaggccgtccacatctccttcccaatagtgtgtccaggtcgtttccaaaatctgtgggtccctcacagcttctgatgacagctgctaatgccatttgctgaggaacaaggatggggaggatggcgagggcctggcccccagggcggccacaccagaaggtcggagaaaggcccaaggcggatgccacgcccagcagtggtgactgccccccactccttttctgagtctatcagcattgtttggttttcttcttgttgcttttaaatcctcgagcggcaccctgaccaaagcagatggtagagggtattctgggatggaagaaagtttctattagatgctgtatttgccaaccaacaacccaggtcataacagcacttgtgtgtctccttctcattctctttcactctgggaacatgcggaatgcagagccggccctcctgggccctggggcagctccctttccacagcctgagacctagttcctgtggggggtccccgccagccaccaacgcacacccgctgggaagaactccgcagagagggcggctcctgccaagccctctggggctgagacttcctgctaccccatgtccattccatgaaaacccctactgtcccagccccccggggctcattcacaggccaaagtccaggcatctgtaaggagggtgcagggaacattaagttcatcgttccacctgtttggagtctttggtgatgtttttccccacttgttcaccgtttttcccaaattaatttaaaatcaactttaactagaaaggcagacggcacaggtgacgctagaaaggcagacagtacaggtcatgctagaaaggcagacggcacaggtcatgctaggaaggcagacggcacaggtgacgctagaaacgcagacggcacaggtgacgctagaaacgcagacggcacaggtgatgctattaaggcagacgcctgggtt

SEQ ID NO: 6275 - DNA, 2300 bp, Homo sapien
gagccgcccctcctcccgtagcctccaggcagggggtggcaggggtgtctcctgctgctgggggaacgtggtctccaaagccatgttcctgttacttctctagaacatgagatcgtatcttttgaaaatttaaaagaaaagatgagttagtgatgggtttctcttcttgtaatttaaaaaataagtaaaaagatgaggcagaaaaggtcaccctgcagccacctctctaggggtcatctgtcctcctgagtgacttgtgtgaggttttatttttatataacatgatattaatgctccccacctatttggcagatattttcttccatcctttttttttttaaatctctttgtcaataatggttatagcttttagtgtgtttttagaaagccttttatttatcagaagtaaaatctgctccttttctccttaactccatggtttatgctctggagcgcgctccgcagagtccttgctgcgctgggcaggtccactggtgtctgcgcccctctccctgggtggcccctccccttacaacgcgcgacctcctgctccatgcccctccagggccctgagttctgaactggaggctgatcttcggtgtcctgaagccatggctccattacaaactgtccgcagtgtccccaaccgcagaagcgggagggcctgggcccggggcgcacaggagggctcagccccaccgaccctgacccggcccctcccgcagcacaagatctgcacgccgctgaccctggagatgtactacacggagatggaccccgagcgccaccgcagcatcctggcggccatcggggcctacccgctgagccgcaagcacggcacggagacgccggcggcctggggggacggctaccgcgcagccaaggaggagcgcaaggggcccacccaggctggggcggcggcggcggccaccgaaccccccgggaagccgtcggccaaggcggagaaggaggcggcgcggaaggcggccgggagcgcggcgcccccgcccgcgcagtgacgtctccagccccgcagcccggcccggggtaggtgcgcgccgcggggctccggccggctctgcccaggtctcttcctggcctcccgccaccgcttctgagccaaagacccccgccacccttcccttcctcttccctccgacccggcccgccagaacctcggggttgggggttgcgaatccgagcccgccgggtgacgcggggtccgcggggagcccctggccgcgtcgccgctctcaaccctcgggctctgtctccgcagcgtcctccgccagctcctgtgaccagcgcgtctcccgatgctctccgccgtgttcgtgtccccaggcgccctcgctgcagccccgcccccgtgggtctctgactctgtcgcttttctctaagtaaagatttcacgtccaccggaggcttccatctctcctgcgcgtcctctgccgggctggcctttctcccgccccccaccccgccagttgtgagtgaggccggcattgtgctccccccagggacccccgaaggacccaggagagaccccgtggggggcagctcccaggaagccgtggtgcgcccaggcggagcacgcgcatcctcgcgctgcgtggtccgggccttgtccaagccccaccgggatgtgccttaatggcggggctccggcccacccaggggagcctcgggtccatccctatccgctgcccagccccttgtcctgctggttccccgaccccccgcccccatctacctggtgctgggcctgggccccgggcgttccccctctgacaggagtgtctgcctcccgggggacccctggttctgggcggcacccatgagcagctcctgcctcctagatgtgtggcccacaggcataaatgaccaagtgaagaaaggagtgaatgggggcgtctgagtggggagtggggcctgatgaggggtgagctctggttcctgggggctggggtctcccgtgtccctggagccagatgaaagatggtgaggctgaaacgccaggggagcctggagctgccatgagtctcccccagcatccccaccccagccccagcatccccaccccagccccagcatccccaccccagccccagccaactcccggcactgaacactacagggaatggacttccggcagatctcacccaccacctgcaccaccccagccagcagcagctctgcagccccgcccaccccagccagcagcagctctgcagccccgcccaccccagccagcagcagctctgcagccccgcccaccccagccaattgcagcactgcag

SEQ ID NO: 6276 - DNA, 2300 bp, Homo sapien
gtaaggtgtgtatgggggtgtgtctagtgtgtgtgtgtgaggtgtgtgtccagtgtttgggatgtgtgtctagggtgttttggtgtgtgaggtgtgtgtcaggtgtgggtgtgtcaggtctgcagggggtgtgtctggtgtgtgtgtgtttggtaggtgtgtgtttctggtgtgtctagggtatatgtgaggtgtgttgggtatgtggtgtctgatgtgaggtatgtgtgtctggggtgtttgggtgtatgtgtcgttgtgtggtgtttgcggtgtgtgtctgggtgtgtggtgtgtgtgaagcgtgtttcctgggtgactggtgtcaggtgtgtgttggggcgtgtgtgggtgtgtcttgggtgtgtgaggtgtgtgtgtttgggtgtgtctggtgtgtgaactgtatgggtcaagagcgtgtgtgaggtgtgtgtgaggtgtgtgttgggggtgtgtgtgagaggtgtatgtgatgtgtgtatggctggtgtgtgaggcgtctgtctgaggggtgtgtggcgtgtgtgaggtgtgtgtttgggtgtgtctggtgtgtgaggtgtgtatttctggggtgtgtgtcaggtgtgtgtctggggtgtgggtcaggtgtgtgtatgtcaggtgtgtggtgtgtgtgtgtcagggatgtgtttgaggtgagtgtgtttgggtgtgtctggtgtgtttctggggtatgtgtcagatgggcatcaggtgtgtcaggtgtgtgggggggtgtgtttgggtgtttctgctgtttaaggtgtgtgtttctggggtgtgggtcaggtgtgtgtgtcaggtgtggggtgtgtgtcaggggtgtgtgtgaggtgtgtttgggtgtctggtgtgtgagatgtgtgtttctggggtgggtgtcaggtgcgtgtcgtgtatgtgagatgtgtgggtgtgtctggtgtgtgaggtgtgtttctggggtgtcaggtgtgtgtgtgtgaggtatgtctggggtgtgtgtgtgaggtatatctggggtgtgtgtgaattgtgtgtttagatgtatttggtgtttgaggtgtttctggggagagtgtcaggtgtgtgtgtctggggtgtgtgtcagatgtgtgtttctggggtgtgggtcaggtgtgtggggtgcgggttaggtgtgtggggtgtgtctcaggtgtgtgtgtgtctggggtgtgtgtgaggtgtgtgtctggatgtgtctggtgtttgaaatgtgtgtttctgggggctgtcaggtgtgtgtcagctgtgtgtgtgtctgaggtgtgtgtgagatgtgtgtttggatgtctggtatttgatgtgtgtattactagggtgtgtgtgtcaggtgtgtgtgaggtgtgtgtttggatgtatctgttgtttgaggtgtttctggggtatgtgtgtcaggtgtgtggggtgtgtgtgtcaaatgtgtgcctggggtgtgtatcaggtatatgtgttgttgggtgtgtgtgaggtgtgtgtcaggtgtatgtttctgggggtgtgtcaggtgtgtgtgtcacgtgtgtgtcaggtgtgtgtcgggtgtgtgtgaggtgtgtgtttgaatgtggtgtttgaggtgtgtgattctgggggtgtgtcgggtgtgtcaggtgtgtgtgtgtctggggtgtgtgtgaggtgtgtgtggtgtgtgtgtcgggtgtgtgttgggtgtgtgtctggggtgtgtgtgtctggggtgtgtttggatgtgtctggtgttcgagatgtgtgattctggggtgtgtgtgtgtcaggtgtttggggtgtttgtgaggtgtgtgtgtggggggtgtttgtgtgaggtgtgtgtctgggatgtgtgtgaggtgtgtgtttggatgtgtctggtgttcgaggtgtggtttctggggatgtgtcaggtgtgtgtgcatcaggtgtgtgtatgaggtgtgtggtgaggcccgagcagggtctgaggggcgcatgcgcggctccctagccggggcggtgggtgggggtagagggtgcgggaccagagtcgaggccccgcctctagccgcgtttccatggcgaccacagcctcggtctcgcagctgcagcccccgccccgcccggccgcgaagcgtctggaaccgcatcctccgcatccacatccgcatcgtcgtcctccccgaccgcgtcctgcagcagctgccagtggagccgcctgtgagctatttccacatttcttgcagaatgtgggcggggggcccgaaggggtgcgggggtgcgaggcgcgtgtgcgggtgtgtgtgcgaggtgcgtgtgctcgcgagtgcgcttgtgcg

SEQ ID NO: 6277 - DNA, 2300 bp, Homo sapien
caggcaagaaggccagaggaacatctgttctcacccaagcccagcggcttcttcgggtgacccctcctcaatagctcagacgctgtgggtcacgttggaaattcctgagttggcctttcttgagggccctcactccacccccttggaagcacggcctccaattgtgtctgaacatgcagcttcgggagaaccataccctgcaggccggcggtctcagagcccccaacagtagctgcccgctgggggttgtcgaggaaaagagtgaaaccctgtaaaatacttggagagtgattctgagccaaatatgagtgacggaaggcccatgatgccgtcccaggagatcctgagaacatgtgtggcccgagagggttggggtgcagctggtttgatacatgttcgggacacgagacatcactcagtacgtgggagatgtacatgggtttggtccagaaaggcggcgggtgtccaggtcattggtggattcagtaattttccaattgacaattggtcaaaagagttaagttattatctaaagacctagaatcaatagaagggaaagtcagggttaagataaggtgttgtggagaccaagtatatgcagatagaatcaataaaagggactatttcttgtcagagtctgttctattagtcttaaggtctctgttttaatgttaatgctggtcagttttgcctgaattccaaaaggaggcgggtacaatgaggcctgtctgacccccacttcccattatggcctgaactagttttcaggttaaccgtggaatgccctgggcttagggagggtccatcagtcgggtggggtcaggcggagattggaattgtgtttttgttttacagggtgtgccagggacggctaaagaaggtggtcagggccgggcgcagtggctcatgcctgtaatcccagcactttgggagcccgaggcaggcggatcacttaggtcaggagttcgagaccagcctgggcaacatggcgaaacctcgtttctattaaatatacaaaaattagctgggcgtgttggtgcacacctgtagtcccatctactcaggaggctgaggcgggagaatcactggaacccaggaggcggaggttgcagtgagctgagatcgcgccactgcactccagcctgggtgacagagtgagactgtctcaaaaaaaataaaataaaaaaggcaatgagggcactgggccccgtggagcgggccctggccacacagcgtgcaagactcctcaggctggtgtgcccagtaaggaaggacaggagggagcgcctggaaggggtggggaaggtggtggcgttgggggtgagggttccacggtggtggagctgagctggtcccgccctgccgcaggtggtgggcaggggcaggtgtgacaggcaggtgggctggggctggatgggggatttgtcacgcccacctgaggaaggaagtgcttcagctgagctggggacagctgcccacgacacccttccaagttgccttggttgtgagcacggttcagccttcatgacaagcaggttttttttttttggtgttgttttgttttgttttgttttttgactgagtttcgctctttgttgcccaggctggactgcagtggcgcaatctcggctcactgcaacctccgcctcccaggttcaagcaattctcctgcctcagcctcctgagtagctggaatgacaggagcccaccaccacgcccacttaattttttttatttttagtagagacggagtttcactatgttggccaggctggtctcaatcccctgacttcaggcaatccacctgcctcagcctcccaaagtgctgggattacaggtgtgagccaccgcgcccggtcaacaagcatgtttttaaaggcaaatttcttcctcagtcgtgtggcaggccctgagcaggcagctgggtgtccccgctcagatccaggcccgagtgggctgggcggctgcagagccagtcacctgagctacccagggtgggatccctggccccgacctctgtcctgacacgccccaagcggcagcaacaaagccccaattggcctgggcctgggcaggaggagctgggccgggtgccagatactgggatcagccactgcagctccctgagcactctctacagagacgcggaccccagacatgaggaggtaatgccaccatccctgagccccaatccccaccccacccaaacctggaggcctggcccttagccagagggggcccagctgtgctgcgctccagggggcctggttcaggggagtgtgcgggtgggagggagaagg

SEQ ID NO: 6278 - DNA, 2300 bp, Homo sapien
cctggtgtttctcccttgtagagaggtggcttctgggtagcttggggaccctttggtgcccagagccgtttgcctggagaggggacccacggggatcccacagccaggctgcttggcagtcaccaccgaccacctttctaggggctaccgtgacccgaatcccaggcccccaggctgtgtgtcatgggaggtgggcaccaggggtggcccaggcagcacggcagtgggattggggtccagtgcccagacaagagcccctgcccagcatcagaaccagctgggggtcctgaggagaagcagggcccccgaaccagaccagaccaggtcccggccccgggctgtccggggcatcccccctgccctttgacctctcaccatggctgagtcacccagagaacgggcaaaggtccctgtggagctgcaatccaggcctgcagggtgtcccagacactgattcttctgcctcagcaggagtagctgcgattacaggtgtgtgccaccacccccagctaagttttgtttttttttttttgagacagagtgtctcgctctgtcgcccaggctggagggactgcagtggcgccatcttggctcattgaaacctccacctcccaggttcaagtgattctcctgcctcagcctcccaagtagctgggattacaggcacctgccaccacgcctggctaatttttttttttttttttttgtatttttagtagagacaagttttcaccatattggccaggctggtttcgaatgcctaacctcaagtgatctgttgcctcagcctcccaaagtgctgggattacaggcgtgagtcaccgtgcccaggcagtttcatatttttagtagagacggagttttgccatgttggccaggctggtctcaaactcctgacctcaggtgatctgcccacctcagcctcccaaagtgctgggattatgggtgtgaaccactgcgcctgccccagacacccttgactgcagccctgctgagccctgtacagacccagagccccgccccaccccaagaccaccccaccctgacagacgcaagcctcccccgcagggccctgaagagacaagtctgcaccacatcacacacgcacgcacacacagacacactcccaaaccctcacactctacacaccacacacgcatgcacacagcacacacccacccccaaacccttacgctccaccccacacacaacatacatacacatccaacacatacatgcacacacagcacacacacacacccaagcccacacactccacaccacacacaacatacacacacatccaccacacacaaacacacataacatacacacacagcacacgcacccccgaactcacacactccgcaccacacacaacatacacatgcaccacacactgaagcacacagtgcacacacacccgaacacgacaccacccacagcatacatgcacacccaccatgcacatggtccacacccacaaaacacacatgcacagacaacatatgcacaccccccaccacatacacaaacacacacatcccgtgtccgaactgacctgacaccctgcctgcctgcctaatagtgctgccattcacccctgagccccccagccgtggccccgcagctctgggacacagcaggtgccctgcctgcagcagcgtgcagcctcagggctctgtgggcgtggggctgtgggccctcgctgctccatacccacccatacccacacccatgtgcaagtgtgttcatgtgtgtccccacgtggagggcggcacagaggcatggcagaacctctggagtttccaagccaaccaccagtgcctgccacagtggggtctgcccagactgtgaggagcagagtctggggctggggctgtgggctctggcctgaggggggctggaggcaggtgggcctggggcttctccctgttctgtgcctgcgtgtcttggcccatgtgagcacagtccagtaaaactacctgcgctcccaaggaggaacccagcccaggcctcccagctgcccatcagggtgctgcctggagttcagggcgtccccttcccctacctcacacttccctctctggccccccctcaggctcctcctggtcaccagcctggtggttgtgctgctgtgggaggcaggtgcagtcccagcacccaaggtaggtgtgagcccctcccatctgggcagcaactccagttgtcaccttctgcccctacagcaggggatgtggacaaagggcccctcttctggcttcaaaccccaagctggcttaggggagagaggcatgggt

SEQ ID NO: 6279 - DNA, 2300 bp, Homo sapien
gtgggtcatgaaccactggccctggagcctggagtaaatatgcagagatagataggcaccaaatgttcaagtatgcaagggaggaagcctgaacattgagaaaatccactccgtttaatttttcatgtgcactggggtcagcctccataatctgatttcaagcaatggaacctcagagatccgtagggctggctgcagcctcacgttcatacctgtgtcagccacacttggctggaagccaagaaagggcccagcatggaagccgcatctcagagggctgcgtctagttatctggttccagagcttggcagggacagacacccaacccttaggctggggaatggactttgtcttcatgctggccccagggagcctggagggaggggtgccactgtccggggcaggggaaccccagactcagagtgaggcttccactcactcctgagctagttgacctctggccccattattgtttggggtttgattaggtgttttttctttgttggttttgtttttttttttgagacggagtcactttctgtcacccaggctggagagcagtggagtgatctcggctcactgcaccctccgcttcccgggttcaagcaattctcgtgcctcagcctcccaagtagctgggattacaggcaccagtcaccatgcctggctaatttttgtatattttgaagagacggggtttcaccatgttggccaggctggtctccaacccctgacctcaagtgatccgcccgcctcggcctcccaaagtgctgggatcacaggtgtgagccaccgcgcccggcctgatttggttttgaagctgaaaactttcttgcccatctctataaaatcctcttgcccttgtatatttgggtaaacggtgactctccacttacaagttggagtagaaactgcccaggtacagctctgaaacccggtggcctcggtgcaaagccacccctcattggcaggccctgggcagccccggtcttctctctgcccgagtggccggcccagggccagctgttcaggtgctgctgggtgccagcctgggtggccccaccaggcttttccgacgcagcccaggccacttcccatggggacaggctcctagggccaagcagttcaacatggagacgtctgtttcctcctggttttctgacgcggctttgtcatttttcacatacagattgattttcagaactttttaggagccgccaggcctcagagcatttgtgtcacctcagggctgagggccagggccgcagtgctagccccacagctggtgtccagctgggaatcatgtggaagaaggtggttccgcggagggagggcctggccagcctgagctcagccaaaggtcaggatgccgccatcctgggcagggggttgcaggccgctgacaccgggggatgatggaggacccttaggtgtcctggcacttcgcagctgagcctggaagctgggcctggctgccctcctggactccccccaagggggtccgaagtcctggctcccgtgtcccttgctcccggtccctcaggagcgtgggctgaaggcctgggtccagctacccaccatggtgaccccagggacccggtgcgctccgggcattctgccaggcctaagggcagcacgaagtggtcagagggcagagaccctcatgaggggaggccgcggcggttgaaccccttcggcctgagggagctcggggtgggaggctcgggtagggacactggggagcccccggccacagcgcaagggcacccgagtctcggacctggcgaggagcccgtgggctggctgggtgttgcccccacgccacgactcagcccgcacgtccccagttcctggggctccccgcccttccttgagccgcaagcggaccccagcccgccgaaccctaggcccggcccgtccccaagccccaagcccgggaccctaaagccccgccctccaataaagccccgccctccccgtaaagccccgcctctgcccctaagccccgccctccccgtaaggcccccgcctctgcccccaagccccgccctccccgtaaggccccgccccggcccccaagccccgcccctaggccccgcccgccccgtctgccgggccatggtggcgctgaagggtgtccccgcactgctgtcccccgagctgctctacgcgctggcgcggatggggcacggggacgagatcggtgagcgcagcgggccggggcctcggggagcaccccgggacaggcaggagggcgaggcttgcacggggacccccgggccgggaagggccgcgtcctg

SEQ ID NO: 6280 - DNA, 2300 bp, Homo sapien
acgtcgtatcactgaggggtcagtttgcatttccctaatgattcgtgatgctgagcttatctgacactgattatcttcattggaggaatgtctgttcagtcctctcactatcttggtagtgtcctttcagacataaaagttttaaattttggtgaaatccaatttacatatgttctccctttgttgcttgtgcttttgtggctacattacttgatggaggacgggagctgcccggcctcctgggtcgttagaaaggaaacctcttggcggacacggtggtccactcctgtaattccagcactttgcgaggccgagaccggtggatcacttgaggtcaggagttcgagaacagcctggccaacatggcaaaactcccgactctactaaaaaactacaaatattagccgggcatggtggtaagcacccgtagttccagctactcaggaggctgaggcaggagaatcgcttgaacccgggaggcgcaagctatgatgagccgggatgacaccactgcactccagcctgggtgacagcgagacaagaaagaaaggaaagaagagaaggtgaaggagaaggaaggaaggaaataaacctcttttctgtctgagccatttcattttgggcctgtctgtcccagaggtttaactacactagtatagagcatcgtttactaaaggtttgttgaggtttgttgttgatttgtttctacttacacgagatgtcttcatttttaccctcggtcttgaaataaaattttggtgcatgttcatttttggtttgaattgaattattttcttgaacatagtgaggcaggagaacagggtctggaggccaattcatgctgactccctagaactaaatcaaatggaaacacttccgctatgacaagaagtgtcctctccatttacacagggcgtacaccaagtaaccaatggaaacctctagagggtatttaacccccccaaaaaatctgtaacggggctcttgagccgctatgctcagccgctcccacagtgtggagttattttcgttgtcttttcttgtttcttttttgagacgaagtctggctctatcgcccaggctggagggcagtggtgcgatctcggctcactgcaacctccgcctcccggattcaagcaattctcctgcgtcagcctcccgagtagctaagaccacaggcgtgcaccaccacgcccggctaatttttgtgtttttagtagagaggggggtttcaccatgttgcccaggctggtctcaaactcctgacgtcaggtgatctgcccgccttggcctcccaaagtgctgggattacaggcctgagccaccgcgcccggccacacttttgttttccataaatctcgcttttgttgcttccttctttccgtgctttgtttgtgcgttttgtccagttctttgttcaagacgtcaagaacctggacaccctccaccggtcacaatagcagtttcgctttccattccattttatccagggtggttttatctccaccctggcgtttgcagaatccgggcaagtacacaaatggatgctccacaatacttgtctagatatttaaaaggtataaataaaataacttaaatgaatgaaatttttattatttaaatctgttgaagtcttgtgtgcatgaaaataaaactcctcctaatgtggcgttcagtgcccacgccgctgccaccgtgcctggccctgcgcctgggcgcgctgtgtccgctgctacagacgccggcgggcaggcgggcaggcgggcaggcgggcaggcgggcaggcgggcaggcgggcaggcgggcggggggaggcggcgcagagcccggcaggcgccgccgttgcctccgcctccgcgcggtctccccggggccagctgggaccccgagggctggggcgggggcgggggcgcgggcgactgcggcggggcctggagggcgctggtcccagcccagggcggggtcccggggacgcccctcggccttagatccgcgagcggcagctcgggcctgggggcggggcctggcggagagcgacccgctcactctgcccgggctgatctcgcgagggccgcctggtctcgcggcgctggcctgtgggcggagcgagccctgaaaggctataggcgagggggcggctccgcggggccgggcgaggagtccagagagccatggccgccctgcgtgtcctgctgtcctgcgtccgcggcccgctgaggcccccggttcgctgtcccgcctggcgtcccttcgcctcgggtgagtgcgcggtgagagctggcggcccgaatctcctcctg

SEQ ID NO: 6281 - DNA, 2300 bp, Homo sapien
caggaggatccgggaggctgaactagagttaagttagaatctttcggttccccttcgggctgggctccccgcaggaaccaggaacgggctggccaggaggacatgatggaccgggagaaggtgacagaggcaaagccagacccttcctgttccatcttgcagaggctgtcccaacgcgaggtgaggccaggtgcctgggggacatcgatgcctgaccagagcccagcctggacagccttccagcaaaggctgggcactggccgaccgtaacggcccaggagaatgaggacacgggagtctcggggctggaggagctggctgaccagatggtgcctgacacggtgctgaaaacagggcagcagtccccagaggctgaggggccaaagtagcctgtccacccagagtggcgaggcccacgcctgtgcaggaggcctgaggcatggggtggcctccctcacagctgtgcccacccagcctgtgcgcagggcgatgtgctcctatgtctgggcagtgagctgggccctgcggcgagagcagcagcagctcgatttcacacggagccactagggagtgggccgttcccttggccatacccgtgggggacccagttcatctgtggaattcagaaccccagagtatttaatctgccatctcaggacctccgctggggagctggggcaggtgggtgggtggtcccgctgggcttccgtggtgcatgccagggacctcagaatggagcgccccactgagccagcggctctgcttcaggcccaagagcagggagtaagagagaagcctgctcaggcagaacaggtgacactcgtggcgggggctgcaccccaaacacttgccatccgactaagggtgtggggcagcccttctttccttagtcctggcatgtcgggtgggtcagcttggtggacagctggccctgctgacccgggatccgccctgggttccccatggcctggaggcaggaggagatggccactgcatccagcgtcgcctcctggtgctgcgggcccctgacggacagaggacgctcgacccctgcccgccaccgcccagggagtcagcccgactcccaggcacccgcccctctccctgcctggagctcagctcgcggggttggctagggagtgatggggagtggaatccagcgacaccaggtcacccttccgggagccttttctccagctgggacgagagggaatcaaaggaaagtaagacacggctcaggaggcccacgccgagagcgaagagtgaagctcacgctggcaaactggagcgcgcggcccctcggcagaggaccggggctcaggaggcggggacgcgcctgaaaacagggcgggagcctttccaacccccgcgggctgcgatgcagcagaaaactcggccgcctgcaccggggattctccagaaacacaggcgtgcctgggtgtgcgctcaacttcccgggcgagggacgtttctgcacttgccctcggcttctgaactttgtactttgcgagtgtactttgtactttggtcctgtgtccctgcagccctgtgactacacgcgcacacgcaggcgcgcgcacacgcgaactgacggctcgctggcgatgctggaggctttcacagcccccctccggacgcgttaagctctcccaggtcccacccctgacaccgtggcacccccagacccactgcgccctcgcactcgacgcgggtccctgggggaagcgctcgctgcgccctcgtctcccttggaggagacactggcccgcccggccggccggcttctccctccatggggacgctcgcgcgcaccgcccggcagcgcgggacgctccctgacgcctgtcctcgcgggccctcccacgcggggcgcttccctctgagacccgagcccagtccggaggctcgcggaggccgaggcgcactgtggggctcggcccggccccttccccgcccctccccgcccctccccgcccctccccgcgcctccccgcgcctccccgcgcctccccgcgcctccccgcccctccccgcgcctccccgcccctccccgcgcctccccgcccctccccgcccctccccgcccctccccgcgcctccccgcgcctccccgcccctccccgcccctcccagcgcctccccgccccctcgctccgcctccggcctcctccgagagctccagacctcccggctactcagaagccctcggactgcccggaccgcgcgatggagtcgaccggcagcgtcggggaggccccgggcggaccccgggtgctggtggtgggcggcggcatcgcggg

SEQ ID NO: 6282 - DNA, 2300 bp, Homo sapien
cacggtgctgaaaacagggcagcagtccccagaggctgaggggccaaagtagcctgtccacccagagtggcgaggcccacgcctgtgcaggaggcctgaggcatggggtggcctccctcacagctgtgcccacccagcctgtgcgcagggcgatgtgctcctatgtctgggcagtgagctgggccctgcggcgagagcagcagcagctcgatttcacacggagccactagggagtgggccgttcccttggccatacccgtgggggacccagttcatctgtggaattcagaaccccagagtatttaatctgccatctcaggacctccgctggggagctggggcaggtgggtgggtggtcccgctgggcttccgtggtgcatgccagggacctcagaatggagcgccccactgagccagcggctctgcttcaggcccaagagcagggagtaagagagaagcctgctcaggcagaacaggtgacactcgtggcgggggctgcaccccaaacacttgccatccgactaagggtgtggggcagcccttctttccttagtcctggcatgtcgggtgggtcagcttggtggacagctggccctgctgacccgggatccgccctgggttccccatggcctggaggcaggaggagatggccactgcatccagcgtcgcctcctggtgctgcgggcccctgacggacagaggacgctcgacccctgcccgccaccgcccagggagtcagcccgactcccaggcacccgcccctctccctgcctggagctcagctcgcggggttggctagggagtgatggggagtggaatccagcgacaccaggtcacccttccgggagccttttctccagctgggacgagagggaatcaaaggaaagtaagacacggctcaggaggcccacgccgagagcgaagagtgaagctcacgctggcaaactggagcgcgcggcccctcggcagaggaccggggctcaggaggcggggacgcgcctgaaaacagggcgggagcctttccaacccccgcgggctgcgatgcagcagaaaactcggccgcctgcaccggggattctccagaaacacaggcgtgcctgggtgtgcgctcaacttcccgggcgagggacgtttctgcacttgccctcggcttctgaactttgtactttgcgagtgtactttgtactttggtcctgtgtccctgcagccctgtgactacacgcgcacacgcaggcgcgcgcacacgcgaactgacggctcgctggcgatgctggaggctttcacagcccccctccggacgcgttaagctctcccaggtcccacccctgacaccgtggcacccccagacccactgcgccctcgcactcgacgcgggtccctgggggaagcgctcgctgcgccctcgtctcccttggaggagacactggcccgcccggccggccggcttctccctccatggggacgctcgcgcgcaccgcccggcagcgcgggacgctccctgacgcctgtcctcgcgggccctcccacgcggggcgcttccctctgagacccgagcccagtccggaggctcgcggaggccgaggcgcactgtggggctcggcccggccccttccccgcccctccccgcccctccccgcccctccccgcgcctccccgcgcctccccgcgcctccccgcgcctccccgcccctccccgcgcctccccgcccctccccgcgcctccccgcccctccccgcccctccccgcccctccccgcgcctccccgcgcctccccgcccctccccgcccctcccagcgcctccccgccccctcgctccgcctccggcctcctccgagagctccagacctcccggctactcagaagccctcggactgcccggaccgcgcgatggagtcgaccggcagcgtcggggaggccccgggcggaccccgggtgctggtggtgggcggcggcatcgcggggctgggcgcggcgcagaggctctgcggccactccgccttcccgcacctgcgggtcctggaggccacggcccgcgccgggggccgcatccgctcggagcgctgcttcggtaaccgcccctcccggagcccctcccggaacccaaccggctgcgcccgaactcgccggccccaacctgccctgcgcgcagccgacctgcccggccgcctcaccgggctccccgagggaatccccgctcgcttaatccgccagagttcaccgccccgaaactcagggctcagagttagtcaggagggcgccggccagggaaggcgacctacggctccacaaggccgccct

SEQ ID NO: 6283 - DNA, 2300 bp, Homo sapien
gtggggtggctctttgtgcctctggggcccctgctccatcagtggttccttgctgagaaacgcgggcggagagctgggctggacactgtcatcccggggctctctttctccatgcaggtctggtcatcccagggctctctttctccatgcaggtctggtcatcccagggctctctttctccatgcaggtctggtcatcccagggctctctttctccatgcaggtctgtccacgttctctgtgggttcattgccggacttgagtctgagttcatggagactctgtcggatgaagaagtacttctgtgtctcacccaagtgctccggagagtgacaggtaggtactcaccacacacgctggttcctgcctctgctcgttactggttgatctctaaacagaaactagactttgcagaacagagaaaaactaaatttggctgactctgtacatctccagggaccatccttcctcatgttagtggggtcagtaacagttcttacctccgaggaactgaaatgactttgcaaacacttcctacttctgccaccaaaataaatgccgttgtccttgatcagatttttacagaggaggaacccaaggctcggaaacagtagctgctgctgtcacagctcccgggtcccggcccgctgctgtcgggtcagaggcccccgggtcccagcccactgctctcgggtcagaggcggcaggaagagcctctcctgacacactctgctgctcacttttcttcctgcatagcatctttcacgttaaactgctcaatctttaaaaatgacaaaaacagttgcagacctgtgggtgagagttctcggttaacatgcagtgtctctgtggctcaggaaacccacggctccccgcgcccaagagcgtcctgcggtctcgctggcacagcgccccgtacactagggggtcctacagctacgtggccgtgggcagtactgggggcgacctggacctgctggctcagcccctccctgcagacggcgccggcgcccaggtatgtggcgtgccccagtcggggggcgtgggtcccgctgcagaggcccccgccgagtctgggcgctgcaggagcaccagccagtggcgggtgggctgggatcccagactcggaagccattttctttttgaaactaagaataatttttaaatgtactgtttttgtgagaattatacacacacagcttaaaaagtcagagaattctgcagtgctaacaaaagaaaataaaaccaaaatggcaggtggagccccttttgcccttctcagacggtgctcccagctgattctcatcgctaagtttactgcatctctaaaaacatgtttctgctaccacgttttgagatacatttcctgtgcaaaatgtcaaacatactaaagtagggagaacctttcagtgcccaccaggcttcccctaagccaagcttctccccgcccacccccgcccttttttattaagcatgactcacacaggacattgtctcacctcaggatattttggtgcctgtttctaaaagataaagacatccttgtaaaatacttaactatgatgctgagggcagtggctcacacctgtaatcctagtgctttgggaggcctaggcaggaggtttgctgaggccaagagttcgagaccagcctgggcaacatagtgagagtcggtctccacacacacacacacacacacacacacacacacacaagtagccaggcatggtagcatgcacctgtagtcccagctgctcaggcttgggcccaggaagttgaggctggagtaagctatgactgcaccactggactccagcctgggtgtcagagcaagactctgtctcagaaaacataaaaataaaaccatataactatgataccatttacccacttaaaaattaataatcattcctcaatatgatccaatatttagtcactgttcagttttccaatcagctcatggtctctcttcagtgaacctgcttggaaatgttgcttcttgagttttcagtttcaggtgttactaattgacttctcattacatcagataaggctgtagctttcttcctctgcccacccgactcccagatccctcccccaccctccccatatgtgatccaggagttgaggccagatcactattcagtgtttacaccccttgttttctctaaaagctgttcacacctgagctgcggggtgcagtggcttcctttcccacccattggtggatgcgtgtgagccgtcttcccacccgttggtggatgcgtgtgagccgttttcccgcccgttggtggatgcgtg

SEQ ID NO: 6284 - DNA, 2300 bp, Homo sapien
tgaggggtgccctgccctgccctgaggccgggggttttctggaggaagtgaatacataataaggcctgaaaagagaaacggtgcccagcccatgggagccagggagtgtgtggggcgtgggcagtgctggggtgagtgtgctgggtgctggggggtgttggggtgggggcagtgctggggtgctggggggtgttggggtgtgggtagtgttgggtgctggggggtgttggggtgagtgtgctgggtgccgggggatgttggggtgtgggcagtgctggggtaccacgtggtattggggtgaatgtgctgggagtccaggcccctctccggcccctccaccccagcctggatctgcagggctcctctcttctcaccctctggtctctgttcaaattgcccctcctaggatgttccctgaccccaccctcccgagccccagcctccctctgtagccagcagccccacctgcatttgctgtgtcaccagactgttctctctggggacacctgcccatcagacgcctgggagagaaattcagattccacagggttttattgtggttttgtgctcctaggaccatgagggaatgcagcttccttaaagtacaaaaatctttatcattgacatttagggtttcatcaattctgtatcccagggagaaaggcagcaagacccaggctgccccctctgggtgtgagggaccggcttggtgaggagggggcttgggggcattgacctagcaggaggccctgactgcccccactcagcccagaaaccacctgggaggcttctgtcttccacggaggggccactctctcatgcccaaaaatatttacagctaggcgttagggtattaggtggtttaagaacatcagaaccatggcaatatttttgtacttagaatttgagcatgtttggtattttcagtagcttgtttaaaaaattccagtagaggctgggtgccatggctcatgcctgtaattccagcactttgggaggctgaggtgggcagatcacctgaggtcagagttcgagactagcctggccaacatggtgaaaccccatctctactaaaaatacaaaaaaagtagccgggcgtggtggtgcgcacctgtagtcccagctactcaggaggctaaggcaggagaactgcttgaaccccgggaggcggaggttgcagtgagccaagatcacgccactgcactccagcctggcgacagagcgagactccgtctcaaaaataaaaattccggtagagtaatactcttgtaacgcagtgtgcaattgagcagttgctgactgctgatttagagttgaaatccgactatatttatgtctagtcttggacagtggagaatatttcagcctcattaattaatcggtttaatttagcagaactgcagtcagtatttggaaacagtttgttatattaaaccctgaagtacttgaggctgcgcgcggtggctcatgcctgtaatcccagcattttgggaggccgagacaggtagatcacttgaggtcaggagttggagaccagcctggccaacatggtggaactccatctctactaaaaatacaaaatcagccggcgtggtggcaggcgccagtaatcccagctactccggaggctgaggtgggagaatcccttgaactcaggagttggaggttgcaatgagcgagatcgtgccactgcactcttgggcaacagagcggagactccgtctcaaacaaaacaaaacaaacaaaaaccctgaagtacttaaaaagaaaatgaagagattacatttataaggtaaatttaaagtatttgagagattttaaccaaattgtaaaaagagattgctaaatttttacacttatactcaggatatgcttaagggagaacgatgatttttaatatttaatgaatgttaataaatctgcgaattacttaaacccacaaaacccaggaacctccccgtccccccgggtctcctcgcagtcccgccccgacgctcgacccaccattcgtccctccctctgggcccgggccccgcccactccgggcttcgccggaggcggaggcaacgtcgtgcgcacgcgcaggccgtggtgcggccccttggagcgccggaagcccgcagtgccggaggcccgcagcgccggaacctcagaggcgggtcgcagcggcgcagaggaggtcagctgcgggagcgtttccggggacggtgccgccatgagattgaccccgcgcgcgctgtgcagcgccgcccaggccgcctggcgggagaacttccccctgtgcggtcgcgacgtggcgc

SEQ ID NO: 6285 - DNA, 2300 bp, Homo sapien
gggggatgttggggtgtgggcagtgctggggtaccacgtggtattggggtgaatgtgctgggagtccaggcccctctccggcccctccaccccagcctggatctgcagggctcctctcttctcaccctctggtctctgttcaaattgcccctcctaggatgttccctgaccccaccctcccgagccccagcctccctctgtagccagcagccccacctgcatttgctgtgtcaccagactgttctctctggggacacctgcccatcagacgcctgggagagaaattcagattccacagggttttattgtggttttgtgctcctaggaccatgagggaatgcagcttccttaaagtacaaaaatctttatcattgacatttagggtttcatcaattctgtatcccagggagaaaggcagcaagacccaggctgccccctctgggtgtgagggaccggcttggtgaggagggggcttgggggcattgacctagcaggaggccctgactgcccccactcagcccagaaaccacctgggaggcttctgtcttccacggaggggccactctctcatgcccaaaaatatttacagctaggcgttagggtattaggtggtttaagaacatcagaaccatggcaatatttttgtacttagaatttgagcatgtttggtattttcagtagcttgtttaaaaaattccagtagaggctgggtgccatggctcatgcctgtaattccagcactttgggaggctgaggtgggcagatcacctgaggtcagagttcgagactagcctggccaacatggtgaaaccccatctctactaaaaatacaaaaaaagtagccgggcgtggtggtgcgcacctgtagtcccagctactcaggaggctaaggcaggagaactgcttgaaccccgggaggcggaggttgcagtgagccaagatcacgccactgcactccagcctggcgacagagcgagactccgtctcaaaaataaaaattccggtagagtaatactcttgtaacgcagtgtgcaattgagcagttgctgactgctgatttagagttgaaatccgactatatttatgtctagtcttggacagtggagaatatttcagcctcattaattaatcggtttaatttagcagaactgcagtcagtatttggaaacagtttgttatattaaaccctgaagtacttgaggctgcgcgcggtggctcatgcctgtaatcccagcattttgggaggccgagacaggtagatcacttgaggtcaggagttggagaccagcctggccaacatggtggaactccatctctactaaaaatacaaaatcagccggcgtggtggcaggcgccagtaatcccagctactccggaggctgaggtgggagaatcccttgaactcaggagttggaggttgcaatgagcgagatcgtgccactgcactcttgggcaacagagcggagactccgtctcaaacaaaacaaaacaaacaaaaaccctgaagtacttaaaaagaaaatgaagagattacatttataaggtaaatttaaagtatttgagagattttaaccaaattgtaaaaagagattgctaaatttttacacttatactcaggatatgcttaagggagaacgatgatttttaatatttaatgaatgttaataaatctgcgaattacttaaacccacaaaacccaggaacctccccgtccccccgggtctcctcgcagtcccgccccgacgctcgacccaccattcgtccctccctctgggcccgggccccgcccactccgggcttcgccggaggcggaggcaacgtcgtgcgcacgcgcaggccgtggtgcggccccttggagcgccggaagcccgcagtgccggaggcccgcagcgccggaacctcagaggcgggtcgcagcggcgcagaggaggtcagctgcgggagcgtttccggggacggtgccgccatgagattgaccccgcgcgcgctgtgcagcgccgcccaggccgcctggcgggagaacttccccctgtgcggtcgcgacgtggcgcgctggttcccgggccacatggccaagggtgaggcacggcggggaggggcaaggtcatgcctacggccgcggcgcctctgcttccctcccaccccggtttcggccgtcgcctgcttctcccggtcgttctgggctggccccgcccctcctcccttgtctcccctccttccccgctctcacccgctcccggagccgccgggaccccttcccctgcgcagctgcgggagaggcccgttcccgcgagtgcccc

SEQ ID NO: 6286 - DNA, 2300 bp, Homo sapien
cgtcgtgcgcacgcgcaggccgtggtgcggccccttggagcgccggaagcccgcagtgccggaggcccgcagcgccggaacctcagaggcgggtcgcagcggcgcagaggaggtcagctgcgggagcgtttccggggacggtgccgccatgagattgaccccgcgcgcgctgtgcagcgccgcccaggccgcctggcgggagaacttccccctgtgcggtcgcgacgtggcgcgctggttcccgggccacatggccaagggtgaggcacggcggggaggggcaaggtcatgcctacggccgcggcgcctctgcttccctcccaccccggtttcggccgtcgcctgcttctcccggtcgttctgggctggccccgcccctcctcccttgtctcccctccttccccgctctcacccgctcccggagccgccgggaccccttcccctgcgcagctgcgggagaggcccgttcccgcgagtgcccccgcggcgcagcctcggacccagggcctgcttgacctcctacctctggcccgccgcccctgtcctctgttcccagcaagttccttctgcccttttaatcccccgaagcctccgtttccacatgttcttgacaagatagacttttctgagtcttttggggactaaatgaaacagtgggtatgaaggcacctgttcagttttaactggtatcttgagtcgttctcctgcttaacgtctttggtaattcttactgtttgtcacaattcggccccaagaagacctctggggccagcccagcccgtctaggtgttgtgatggccactcctgcgtcggctccgcgtgtactgggggccgagggggaagaagggcccgtgtgggtgactgaggctgtgtcctcggtcttcggataacactggaggggaagaaagctggaagctttgttatcttggttgtgtgtggtattcctggttaggggactatcgtcatcatccccgcgaggtagcaggggcctaatgagccagtgttactctgtgttatagcccagattaagacccgtggaagggcccggcccggtggctcacgcttgtaatcccagtactttgggaggccgaggtgggcagatcacgaggtcaggacatcgagactatcctggccagcatggtgaaaccgtgtctctactaaaaatacaaaaaattagcccggcatggtggcgcgtccctgtagtcccagctactcgggaggctgaggcaggagaattgcttgaacctggcaggcggaggttgcagtgagccgagatcgtgccactgcactccagcctgggtgacagagcaagactccgtctcagaaaacaaaaaagcgacccatgcacgttaaatattccacccagagtcagccatgagtcaggtggtgaagaccgcatctggcttttgacacatggcccaccctgtggcagggtgcctcccagtctcccactccgagggtgcggaccttggaggaggcgctcagcggatgttatctgttaccattacttagtacgcttccctcagatatagtctttttaggttatttatggtggcgtgtcattctggacggttcagcttgaatcgatcactctagaaaggttgtgagccccttcgctgaggcgtccttctgttttccagggctgaagaagatgcagagcagcctgaagctggtggactgtatcatcgaggtccacgatgcccggatatcctttcacagagcaggggaggcccctctgcctgaagtcatattacacattagaattacctggggaggcttttaaaaatatgaattgcgaggcccctttctagaccagttaatcagaatctgtgatgtggggtccagactgcgtgtctttgaaacttcattgttaatacatatatctgcgtcactcaagcctgacggtacggtgcagcagtggaatcctctagatgggctatgaaactgtttaaatgttcctgccaactggggcttttctcctgtacttgaggaatgaattggcaggatgtgatgattcgttcactgatggcaagaaaaaaagttggttggctggtaaagctttggaggaatttttaccttaattttgccacatcccactttcaggccgcaaccctctgtttcaggaaacccttgggcttaagcctcacttgctggtcctcaacaagatggacttggcggatcttacagagcagcaggtaaaggcctttctctcagacgccttcagcagtgtggctgtgttttcccgaggtcgcttgttctaacggaagagttgccggacgcacacttgtcagtttgcccag

SEQ ID NO: 6287 - DNA, 2300 bp, Homo sapien
actccagtaaaaaaagtaacatagaaatgttttgtgtctttcagaaaattatgcaacacttagaaggagaaggcctaaaaaatgtcatttttaccaactgtgtaaaggatgaaaatgtcaagcaggtaggcttttcgtctgtgctctctctgacgcttctgcttcagtaggttcgaggagcattataaactgttttatgctttagtaagaagcagagctttggaaaagatcctaggtgttggtttccagctgccacacacggatgcgatctcctggggcaagtgggtctccctgtactgagggcacaaggtcaggctgtagacgcattccagggttgtaggtggtcagagtcttttggagactcaggtagctcatgtttccagttgtatgtggtagaattttctggcttgatgtgtttcttcattaaaaggtagttacagctgtcactgaagccccgggtctgccctgcttgtttttgatgggaggggacgggcataggtggtccccggccccagagctcagtctgacatctgtgacctggacagaactccagtttcccaacaccggatacttggtgtgctacctccagatgaagggtgacgcccagtttgcctatgaaatgttgggtagaattccagataggaggtttctgttttcctaacggatatgtgaaagtggagacactggaatccctaatcctgttctgaggtggcagaaggagcgggtcagtgcacagacgtccgacctggggtggctccatgagtgggtgtttgttgcagatcatcccgatggtcactgaactgattgggagaagccaccgctaccaccgaaaagaggttggttggtggggcccagagctgggagtgggaggcgggcgtgggatgggccagcccctcctgcctggcctctccaaggagaaggcgcagcgccccaggcagggaggcccctcctttgtcctctcattctcttcagtggaaagggccgaggccgtccccgctgggtgggcagagcctcggcgttaacctcccttcttccctgagctgacctggcctggggtccccttgcctgggtggggttgcagagtctcaggctctagcggccacggtgggccctgtgacccctctctctgcctgcgcagaacctggagtactgtatcatggtcattggggtccccaacgtgggcaagtcctccctcatcaactccctccggaggcagcacctcaggaaaggtactggcgcgtgcggctgatcacctcaggaaaggtactggcgcgtgtggctgatgtgctgatgccaccatctttcttggaggggacgtgcccgaggagcactgccagtcttctgctgaccccgcagccccagagcacatcttgtctcgttcagtccagttcacaggagggctgaacagtgggaccaggtcgttctgtgaatttcacacttaatttttctctcttttaaaatctttaacatgaagatggcttttctaaactttgatatttgttcatttatttaaatccctttggccgggtgcatggctcacgcctgtaatcccagcactttgagaggccgaggcgggcggatcatgaggtcaggagattgagaccattcttgctgaaacggtgaaaccccgtctctactaaaaatacgaaaaattaggtgggtgtggtggcgggcacctgtagtcccagccacttaggaggctgaggcaggagaatggcgtgaacccgggaggcggagcttgcagtgagttgagattgtgccactgcgttccagcctgggcgacagagcgagactccgtctcaaaaaaaaaaagaaaagaaaagaaaaaaaatccctttgatccagagaatacaaagcgtgtgaagtagacggggctggattatcaggcagggaggctgcaaggccattcctccatggcgtccgccttgcctttgctggagggttcctggactccggagtcgcaggcgctcctttcctccctctgtgcctgttctcagactctgattcaaagcaggagccccgagcacccttcactgccccgtgggctcttttccttaagtattttcaagtttaattcaagtccttgttggcttcatttttcatattaataaggcatttattaacaaacccattcatgatgtgcaaatctgaaggctttaaactacggtgaactgttattttacagagagggtgtttttggtgctaattggagcattgttacagtcatttattcttttaagtttatttttaagcgtattattttttatcagtggtattaagtgcatttatagggttatgca

SEQ ID NO: 6288 - DNA, 2300 bp, Homo sapien
acaccctaagatacatcctatacatcttaagatagaaggcttctggaatcataaaatcagctggagcaccgcctcccccttccttttcccattctgtgttctcggccttggaacaactgttagatgttagagcccaaaatggatcccctgggtctatccccttttctttcatatttgctgcctttttgccagaaacatttccttaaatatacaattccatccttctgttggttttttttttttgcagtaattttttaatctcaaaagtgtcttttttgtcttatttcatcttcacagtttcctgttcttattatataaatatatctccctaatctgagtctatggattggagttttatccaatccattcattccaatgattggaatgattggagtcattcacatttctcaatccatttattttccgtttctttgcctggtctttcttttatgtgatgcagctctccttgaatgtctgatacattttcatcctttaaaatgaagccgatgggtgacaggaagacgtgcttccatgaaaggcagtgtttcactccggaacctcagctcccgcacgctggatccagatccacagcatccccaggacctcttctcccctctgggtcctgcccccatctcactggctcccatctcagattccctgtgaggctccacgcttggcttcacatgcaaagtctaggggtgaggggcccctcccagcctctcagctggcagtcctgggcctgtgctgggaaacatgccctccccgcccgcagccggaggagccgcatggctgtcttgagtggaggtcacacatcccctcccagggccaggggagggaacggtcacagatgttcctcatgagccaaaaataagcaaggtctggctgcggtgctgtccactgccggctccagcaccaggggttgcccaagaacccccttgactccttggggtaagcagctcactgctggctgtcctgtgtgtgatggggaagggggactcaacccgagtgtgcagacctatgatgacccccgctcccacctccacgtcccatggccacggcccctcccttccaagctccttctgcctgatgggcagcaccccctcccgtctggagtctgccggggcccttcctgctctccttcttaatttattttctgtcttggagggaagctgggtgcacctgctcaggtggccccctagggccagaagacctgtcagtcactttcaaatacatgttctttccagctcttccttgccaaaggttctaaaaacactgttgtccgtctcacccaaaaagctaagcttctgtccaatccttaacggtagctataaatgagaagcataagcttggtttccttctaacatccggcaagttagaagatagaacgtatttcttcacttattcatcacatatttgcagggcacccctacgcgggacagcagaggtcccaggccggtgctgcacccggagccaggctcggagctggccgtgcgccctcagctgaaactcaccggaggcgcggccgccctgggctgagaagacgccgtcggcccaggtggcatcagaacccacaggaggaagacagccagcccaggaggagccatggggggcctctggggatcgcaagggtcgaccccatcctccctgaaacaaggccggaggttgaggaggtctccgcccggccccgcagctgacaaccggtggagaaaccgcacctgccacgggaggggccgcggggtgggctcgagccaccatggggctggtacaagcaccctctccgctcaggacctcggccctcatcccagggcaccagggctcacagggggatgggcccgggtggggacgagggtgtggaggggcaggaagcacggcgggtggagcggggccgggtgcgggggtcgcgggggaccgcggggacggggccttgtgatgcaggagacggagggggctggtgacggaggacgggaggccgcaaggatgggggacgcgacatccttttcccctcccaccggctcaccagggatgcgcctccgcgactgcccgccccaatcccagggcggaggcctcgcgcaaaacccaggcgccgcggctccgcgctccggctgagggtccgcgccgccgcccgcccgctccttcccgctcggccgcggcctcagggacggatactccagcgcgcggttccaaccgaggcccgtggcgggtaaggccgggaggctggggcgggtacggggccgggagcgaggggcggcgcggggaggggatgcagctgtcgcccgcacagccgtgtctggacgcggccc

SEQ ID NO: 6289 - DNA, 2300 bp, Homo sapien
gttgaccagcacaccccagacagctcgctgcccaatgtagttataggcacaggcatgtgcagatgtgccgtggcatacacagttacacacaggtgctcacacaggcactcccagacacacataggtgctcattcagacagggacacacaagcacacataggtgcgcatgcagacacacggcagcacacaggcacacacaggtatccacaggtgcacacaggtatccacaggtatacacagacacacagaggtacacatgcagctgcacagacactcagatatgcccaggtgcacatgcaggtgagcacagacacaggtgcacacaggcacacacaggcatgcacaggcacatacacaggtgggtgcacagatatacacaggtgcaccgagacacaggtatacacaggtgcatacacaggtgggtgcacagatatacacaggtgcactgagacacaggtacacaaaggcacatacacaggtgggtgcacagatatacacaggtgcatcgagacacacaggtatacacaggtgcatacacaggtgggtgcacagatatacacaggtgcaccgagacacaggtatacacaggtgcatacacaggtgggtgcacagatatacacaggtgcaccgagacacaggcatacacaggcacatacacaggtgggtgcacagatatacacaggtgcacccaggcacactcatgaacacaagcactcacgtgtcacctgtgcagaagatgacgtggtttttaggtggtggatctcggtttgagtcccagcatgtcacctgtgcagaggatgacatggtttctaggtggtgggtctgggtctgagtcccagcatgtcacctgtgcagaggatgacgtggtttctaggtggtgggtctgggtctgagtcccagcatgtcacctgtgcagaggatgacgtggtttttaggtggtggatctgggtctgagtcccagcatgtcacctgtgcagaggatgacgtggtttctaggtggtggatctggatttgagtcccagcatgtcacctgtgcagaggatgacgtggtttctaggtggtggatctgggtctgagtcccagccctgccccacacactctgctctgacctggcggcccatctcctcacctgtgaggtgctgaggtggggagtttggagtttgctcttggacgaagcaggggctcctgtgaccactcaggccaacaagatcagggcttggaagaggcaaaaccagagaagcctggctgcaaagatgagcccccctggggatccctgtatgccccccagcccctacatcccagagcagagggtgccggtcccccagggtctcccacaggtgggctccgcctgcctgctcagagcagtcgggtctgagactggagtttgactcattgtcccctacctcctgatctctggccaggccactgtgagggtcacagggttgattgaggaaaccttttcatgggctgtgaaaggggcaaaggcacctgaaccctctgccctcctcacctagacccgtgaggaccacggccctggggcagagccctctccctggacaccaaggtcctctgactgctccccacctggttggctgagcctggctgatgctccacagaggggtggtccaggctggacagctcaaggtggcagagggcagtgggaggtcaggagaaggtgctcaggacccaccaaggggtctttggcccctgccttctgtgtgtgcttggagaagggacttcactggtcccagagacagctgatcagtccatccagcctggcctggtgtcctggtccacacggggtacagacctccaaggctgccgggggcaggtgtatggctctgtgttcccacgtcccaaaaccacattcataaatgtcacatttattcacattcagccatgtctgagggtccttactgggcctcagcactggcttccgacccagcagtggacgcatgaatttttgcctgggggatcaggtgttggagggagacagacaacagctaatggtgggtaactctgcagcacgcgggggtggagcgtggcatggagaggcaggcacacaaaggagtgggatcagggccactgcttggacagaacacccaaggccagggtccaccctggaggtgtcagggaagagagtgccagggaaggggacagcggctgcgcaggtgaaggtgggcctgggccctgcgtggtgggggacgagcagtgggcagggagggctgagctcagcggtgggtgtcggcacacaggcctgtggtgtgtcctcggctgtcaccgactgagtggctgcgggg

SEQ ID NO: 6290 - DNA, 2300 bp, Homo sapien
gagtttttaacatttcagttattatattttcagttctgtaatcatttattttaaaaacaatttaattgaggttcatgtatcataaatgcactcttttaaagtgtgtggtgcagaggattttagtatattcaggattatgcaaccagcaccactaatttcagaacattttcatcacctgaaaaagaaatcctgtagctggctgtggtggctcacacctgtaatctcagcactttgggaggccaaggtgggagggtccgatgaggccaggcgtttgagaccagcctgggtacatggcaaggctttccatctctacaaaaaaatttaaaaaattagccagacatggtggcatgcacctatagtcccagttactcaggaggttaaggtaggaagatcacttgaggccaggaagttgaggctgcagtgagctatgatcatgccactgcactccagcctggatgagaaagtgagactctgtctcccaataaataaatgaatatataaatacataaataaataaaaataaaaaagaaaaacactatactattttcagtcattttctctttcctccttctctagcccctggaaaccatgaatctaatttccttgtctattgatttgcctattctggaaatctcatatgaatggaatcgtacccagtatgtggtcttttacatctggcttctctcactgagcatgttttcaaggttgacgcacatccagcctgtgtgggtgccttgttccctttctatggctgagtgacattccataatgtggacataccgcattttgtttctccatttatcagtggatgcacacgtgagctgttttcatctttattatgaataatgctgcatggacattcatgtagagatttttgtgtggacataagtttacattcctcttagatatgtacccaagagtggagttgccccttctgggctcaagtggtatcttccaggagtatctctgtttaacattttgacaaactgccaaactttctcaaagcagttgcaccatttttgaatctaccagcaaaatctgagaggtcccatttctctacatccttaccactgtttcattttgtttttaagacaaagtcttgctctgtcacccaggctggagtgcagtggtgcaatctcagctcactgcaacctccgcctcttgggctcacgccattctcatgcctcagcctcccgagtagctgggactacaggtgcatgtcaccctgcccggctaatttttgtatttttagtagagacagggtttcaccatgttggccagggtggtctcgaactcctgacctcaggtatctgcccacctcagcctcccaaagtgctaggattacaggcgtgagccactgcgcctagcctgttccatttttataacttctatttctttgctgagatttcaatttttccacttatttcaagagcatttgcaatttgttgtggaaacatttttatgatgcctgttttaaaatccttgtcagataattctgacacctgactcttcctggtgccgcccttagttggttgtctcttactgaaatggtcgtgtccctgggtcttcatatgatgagtgattcttaactgtatcttctctcaagggttttcattccaacgacagttcagttctcagagttcttgcaaagctcttccgtgtcattcttctggtgctgctgggactcccactcaaaccctaatcctacccctacccctaactctgctagtgccatctgctggcacagaggacgcctccttggctgtctggggccactgccttctgtggtggtggcatggctgaagccgacgggcccgggtggagggcagagacgcagggcttcactgatgctgtgctgtgggcaggttggaccatctctgcctgatggttgggtctagtcccatcagcagcttgatcagtgtgggaggaaacccacagcctgcaccctccccatgtctggtgatgctcaggccagcaaggcattggctgctctgctcacggctgagaggcagagctgctgattcgctctggaaaggctgtggctgtccccattggaccctggaggtccttggcagctcccacttctgtatatgtgactctgggctgtgacctctgccattgccccagctaagcagcgagagcttgctgaagcccagagggctgtgggaccatgagggcagctctctggaccctgggactcgggccccttcttctgaatctctgggcagtccccattggtaagtttctgcttccttcatccatggaactttctggaggcatcagctctgttgatgcccagg

SEQ ID NO: 6291 - DNA, 2300 bp, Homo sapien
gcatgagggtccctgcagtgacctgccgtctgcctgggtctcactcagcccagagtgggtgggacatgctggggcaggagggaggtgactccacatggctggatccctgtgacctcagggcccccagaccctagccccactgcttggaacccagggttcagggctgggtcaggccctggacaaaatgagggacacggcccagtgtctggtcccaatgaccctgatcaacagagtcctgaggggtcctgcgggggctgctccatccacgtgccctggagcagggctgaggtcctgggaaggaggtgggagggttggctgcatctggcagtgaggttgagcatggggtcccatggagatgctgcacccaggtggagacactggggtgtgaagccatgtggaagggctgctgggtcaggggcagggaggtgtagagaggggggtctagctagaaggaacagcaggagaggctggaggtgagagggagccccggggacctgcgtacgtgggcatggagccatgatgtgagtgtggggctgggcgggaggcaggggagggtgcccttgaggctgaggaacacttcactgtcaaggctggtccaggtgcccagcagggcggtgacctggtgctggacggagccacatccccagcggtggggtggaagtctgtgggcagctgcagaaagtgcagaggaggttaggatttgaaggaaaggcagcaatgtggccacagatggatggaagcctggggttgaagggatttgcttttgtgtcaacgatcgcatgcacaagggccggaattctctattacaacaagaaatagctttagaaaatataaaatgaaaagctattcatagcgggcgtggtggcttatggctgtaatcccagcactttgggaggctgaggcaggcagtttacctgaggtcatgagttcgagatcagcctggccaacatggtgaaaccccatctctactaaaaatacaaaaattagccagtcgtggtagtgggcgcctataattcccgctacatgggaggctgaggcacgagaatcagttcaaccctggaggtggacattgcagtgagctgagatcgtgccattgcactccagcctgagtgacagagcgagacttttgtctaaaaaagaaaaaattgcagacaccagcacgcatccatgtcctgagaagaaccaggtggggagggtgatgaggaggctggggggtgtggagggatggatgaagactgagagagaggagattcaaggctccccaggaggtgggagggaaaggtcttcatcttggaccaggcagggtcccccctctgctcctgactgccatcggggaggctcttttctgggtgtggagagtcctccaggggccctggaggctgctctgggaccacacagcaccacccacatggacttcctcctactggttgcttcattttcctcggggtggctgtgttgatgtggggttgcagaggcctggagagggtggttaggggtgcctccgtggcgggtgggagagaaggtgctggagtagctgagatgctcagagaccggagggtgagatcctgcctggaagccggtatgggtggggtagtggggctgggtttggcatagtgggagggcaggcaggggtggttttcctggatactcagggttgcagaggacaggaccgaagggtgagcggggcactccaaggggtgtggacagtcacgtgggtggggcaggtgtgacagtggtgggctggagaccacagggcctccagtggaagtaggggaatgatgcttgggaggcagagagtgggtgggaggacccacccagctgcagacccaggaggacaggggacttccttgcctgggggatggggtcctccaggatgttggggctccagagggccagggaggggagtagcccccggggagacacatggggtgagggtttctctgtgagccgcgcccatcacctctctgggactgcttggtggggtgagaggagcccgactcgctgctgaggcctcacaggccgttccctgctgccgcggctgccatctcctcctgcgcctctggttggttctggcccctctaactggacctgtctgtctgtaggtggaccaggtgctctgaggctggcgtacagacacagcacgtgcgacggagtggtgttggtccgacaccacggggcatggggatacgtgtgcaaccaggagtggacgctggcagaggcctctgtcgtgtgcaggcagctgggctgcggccctgccgtgggcgcccccaagtatgtcccgctgcctggagagatggccc

SEQ ID NO: 6292 - DNA, 2300 bp, Homo sapien
cgtggctcctgctgtcccacgtgtgggcaggtggacaggcaggccgtggagccctgctcagctctgggccacccacatggcctgcattttgtgcctatgctgctgctttgcccaaggtcctgtgcatacgtccagggtacaaactttgattgttttgggaaaccagatgggactgttcatatctgaggggcagaagctattttaaagaagaattagaacagtaatttctagacataggtagaagatttcttttgatagacttacaaaaatactatattgctaatatctttgagagaatgagatataaagtatgttacatgttattaaaatttgagtccaaaaaattagaaagaaaaaaccatctgtaatcccaacacccagagataaagccatcgtgaatgcgtaacatatgtgaaattaatgctgagtaaccagccctgccacaggcagcagcagcaaggtgtgtggctccgacctctgtggtcattgcctttggctgtgctcagctgctggttctccgtcccagccgggctcccttagtgccttcagtcacttgatggttaggtggagccttgcttcggggccctggctgaaggcaggagtagtggaggctctgttctgtcatgatccagccttggttccaaaaatgatagcagtgtcagcctaggaacaggcacagagtctcagaccctattccttgacccaagtcccaagccagccgcgattcaaggactggggcccagactcagtgagagggtgtggaaacaggcaggggatacttatggacacttttgtattctattacagtgtatttctttccagtattctttctaagcttattttaattagatatgatcctatcagatgcaattcatacccaatgttctccaagtatcctggtataggtattttaaaagcgttattacagtgctccatggcacagctttaaaggattgtctaacatgccattaggtgaccatattagtcttttggactttacactgctccaagggtaacattgaacatatttgggcactgatccctcaggaccaaagctatctctgaacatggggctgaggtacacacacacacacagacacacacacacacttaaataattactgcagtcaagctaatgaacattccaccatctcacaaagttacgtttggttttgtggtaagagcacctaaaatctactttcctagcaaacttccagtgtacaatgcaatattattaactacattcctcctgctgtatgttgggtttctagatttattcatcctgcacagttgtgtaccctttgacctacatctccccattcccccaccacctgcccctggtaaccacattctattgtttttacgtatttgactttttttttttttttttgctcccatatgtaagtgggatcatgcagaatttgtctttccattcctggtttatttcatttaacataatgtcctccaggttcatccatgttgtcacggatcacataatttccttcttatttgaggctgaacagtattccatagcatctatgtaccacatttctgttttctttttttaaattgacaatctttgtacatctctatggggttcatagtggtgtttcaatccatataatgtgtagtgataagatcagggtaattggcaaagccatcatctcagacatgtatcatttcttcgtgttgggaacattcaatatcctccttccagcgatttgaaaccatataatatactgttaattacagtcatcctacagtgctatagaatgctagaatttattcctcttatccagctgtaattttgtatctttacagatctcctcttatccctccctcccccaacccttcccaacctctagtatcctctgttctgcttttcacttctaggagatcaacatttttaagcttccatttatgagtgagaacatgtgctatttagctttctagcttgtttcacttaacacagtgtcctccagttccatccgtattgctgcaaatgatgggattttattgtttttttaatggctgagtaactccattgtgtatatgctgtattttctctatccatgtatctgttgttggacattacactcattccacatcttggctattgtcaatagtgctgcggtgaacctgggcgtgcagtgaacctgggtgctgcagtgaacctgggcgtgcagtgaacctgggcgtgcagtgaacctgggtgctgcagtgaacctgggcgtgcagtgaacctgggcgtgcagatgtttctgctgggctgatttcatttcctctgggtctatacacag

SEQ ID NO: 6293 - DNA, 2300 bp, Homo sapien
agcccccgcagtgaccgcagccccttttgcagaggagggcgcactgcgcgtgcgcgggggcgaggaccgctgctccgggcgcgtggagctctggcacgcgggctcctggggcaccgtgtgcgacgatggctgggacctggcggacgcggaggtcgtgtgccgccagctgggctgtggtcgggccgtcgccgccctgggggccgccgcctttggccctggctccgggcccgtgtggctggacgaggtggggtgccggggcagcgaggcgtccctgtggggctgccctgcggagcggtggggacgcggagaccgcgcgcacgaggaggacgcgggcgtgcgctgctggggtgagtggggggcggtgggaagtcggtcatggggccggcagagggcgctgggatggagtcagtcttgagtgtcacttcggtgggcaggagagctcgcccaggtgttagtgggttggtttccaccctgggatttttctgggataggctgatttgctgtggaggcctgtttgggacatgcactccctggggtttccccctaatcttttttgggaattcccttttgtttattccaatccttgttcatttcgggtatgtgtcacctgggtgttggcaggttcagttgttccctgcacctcattctctttgcagaaaacaaacagttaaccacagtgatgaccttagcaaaagcagcagcagtggtaactttccctgagccactcccattctctgtgctctggtcacctcttgtgacttgccctggcatctgcctgggggccatgttttaccaaggaagggggctgtcccttgaaagcagacacccccagtggacactagccattttggggtgctctgcacagctgaaaccagcagatgcccccccagcacttccgactcgcaggtcctccatgagggagagggtgtggctgggcccttggagccaccctgtcctgctgagggtgtgcaggtcccccccaccacccagctggctcaagacctctcctttctcagagcctggcccaggccccccactgcctgcagctcccttccggacattctgggtggtcagtgtcgtcctgggatcccttcttggtcttctccttctgggcctcatggcttttctgattctgcctcgagtcacacaagccatgcagaggggtaagcgtgagcccaccctgatcccatcaactggtgtgcaggagcaagagcagctcacagctccagcctggtgttggggtctgggcaggcggggtgccccacagcagtcaggcctatgcagacctacccccaaagtccaaggaactgagaagctgaagaaagaggcagacaaatccagttccttagaaagaaacacttaaaagggacttatgaagacaagccatgtccatgccttggatggcctctagctgagacggtggatgcccatattatcatccctcacaactagaacttatatacctcaggggaaggggacatgtaggacaattgcttaagggcaggatttacagtgaatgcatgctcttatgcaaggaacagtagataaaatagaaatcttagaggccttcccggaactggagttggtcagaagtcaacacggtggatcagcattcagggcagagttgcttcagcctgcaggctgatctcacttagggctcattttattggccagagagagtggcagacatctgcatcagcctccagccctcaagactgagctcaaccctagaaggttcccccaggcagcacattggggcccactgggaagcatcatgtggtttgctggcaagggacggtggccagggatgggagggcactgggagtctggctatgttgccgtggtccctccatcccagcccacagcatcctgcctctttgctgcctggctggggttcctgcctggagttgctgtcctcccttgcctgtggccacatccacactgagggcctgtgtgtgaccatgctcaccttgcctcaggtctgggaagatccgaggtatctcctggagaagccatctatgatgtcattggggaaatgccgccagcaggactgtacgaggaaatcatggaggccgaggctgtgctccaagatgaggaggacggaagtgtggtgaaggtggacacagaagccgcaggtgggtttgtgctccagctcaggggtgagctctggggtgggctacggatgctgaccacaagatgcagtggaaagggactctgaccacaggagcctggcttcagaaggctgctgaccacagggctcatggatgcaaagggactcgtgggcaggggagagcagggcc

SEQ ID NO: 6294 - DNA, 2300 bp, Homo sapien
gattatttcaccttgtcacaggcacaggcaccctgtcgtcctgattatttcaccttgtcacaggcacaggcactctgtcgtcctgattatttcaccttgtcacgggcagaggcacaggcactctgtcatcctgattatttcaccttgtcctagagtgtcctgccaatgggacagatgcaaaacaaataaaagccccggcttctgaaaagaagcacacagaaatgtcattattttcaaacgaggtgttcccgtatataaaatttgatgttggttgggcatctaacagtattatggccagaggactcagaccacagctgcatccctgtgaggcacagactctccagggcacgcgggtcccgcctgggatgtgcacactcaggtgagctgcacagacaaggtgtcctcagcccaggggagccagaggcctgctctgcctctccaccctgatgcttcctgttctcaccccaccaaagccaaggcttcaatttcagtctgtggggagctgactctgctgctctcaagcactagaagaaggaaccagtaatcgaggaaacttgtggaccccaatgggtgtctgtcccggccaggcctggctgggcccacacaggacaacagggttcaggggtctggacagctgtttctgcccagggaattgtccctgccacctcacactggccactggaaaggaaagagaggaggaggcggcaggctaacccacccgtgagccagtcgagtctacattgtcagttctcacctcgaggggtgccaaaaaccagagggaagcaaaggcccctgaagcctctgccagaggccaacgccccttcttggttcaggagaggtgcagtgttaggtgcagcacaaccaatgacttgcttatgtggctaataaattgtcaagagaaaaactgggttagaatgcaatatatagtatgtagtctcatttttgtataaatacaagtatagaatggcataactcaaaatccacaagtgatttggctggattgtaaatgacttttattttcttcatttctcatcatattttctattatacataaagattcattgttaatataaaagtacaaaattgcaacctatgaattaagaacttctatatattgccagttagaagacagaatgaaaaacattctcttcattctaaccacacacacaaaaaagctccacaaaatacctatggactaccttcatagaaggtggaagagggtctgtatgaagaaaataattaatacatgaaagaagaagctagtcaatgtggagctctattgtgtcccgggatcaacaaagacaagatatctttaaaatcgtcttctaaatttaccctaatgtaaaacaaatccaataaaactctaatgtaattttttaagaatttaaatttggaataattccaaagaacaatttttcttaattttctacagccagaatatatacctttaaaaaaaatgaaaacagagattaactttctcagaattggttgactcactctttccttttatttttcttccatggaattttccagttaacttgagaaagtggaatcgaattccgatgttgaattttccttctggccccattcatgtggcaggtggtgattcaggtactactgggggctgctcagacaaacctcctcatcagacatcaagaggctgttgcaccaggagggccggtaccgtgtctagaggtggtcggcatggggttggagttgtattacataaaccctactccaaacaaatgcatggggatgtggctggagttccccgttgtctaaccagtgccaaagggcaggacggtacctcaccccacgttcttaactatgggttggcaacatgttcctggatgtgtttgctggcacagtgacaggtgctagcaaccagggtgttgacacagtccaactccatcctcaccaggtcactggctggaacccctgggggccaccattgcgggaatcagcctttgaaacgatggccaacagcagctaataataaaccagtaatttgggatagacgagtagcaagagggcattggttggtgggtcaccctccttctcagaacacattataaaaaccttccgtttccacaggattgtctcccgggctggcagcagggccccagcggcaccatgtctgccctcggagtcaccgtggccctgctggtgtgggcggccttcctcctgctggtgtccatgtggaggcaggtgcacagcagctggaatctgcccccaggccctttcccgcttcccatcatcgggaacctcttccagttggaattgaagaatattcccaagtc

SEQ ID NO: 6295 - DNA, 2300 bp, Homo sapien
tctcatcaacatatttcagctaggacaaatatctgctatttcagaagtaccaagtatcaaaccagaaaggtcttgatttaggaaccaaacccaggctgtcatggaaaaaagaagacagaaccttagctatggaactgcagttggggtgacaatcctttctctttcagtttggcctggctagcaaaaaggtggccttgttatgtaaataaatccccttaagtagtcaaaatcaaaaatcttcccccccttttttccttttgctggctgttttttcttcccccaccaccccttttctggtgggaatttagccacttcagaggccttgttccacataatttggaactttcctttggatttgatcaagtcagaattggccaaacccaataggaaaaggaccaaaacaacaaaaacagaaagaaacaacaacaaaaaaaaataccagttaagcaaaacaaacaaatgatcacacaacttgtatggttactggacactctaatgataaggaaaaattaagaccagctggttgttaattttacctttagccaagacaaaccccaattcagttacttacctagggatgggtcttaggctgaagactgctctctatcatcttagaagcaggaaaaaaaccctcaaacttgtcttccctgttgggagcgagttcaaactccagaaaggaactttcatggaagcaggaaaacttgccttccttgttggaagcaagaaaaactccaaaaaaagagtagagttgtttagaaaaataaactttggatctggagcgaattttgggaaatgagggattccctggatgggggacttccagaactcagcaacttgtcatattagtttgaaccataaagatagctcaagctgctagcaagcactgataggatatttgtcaaaggtcaggggcacctctactcagaatccctttgtggttgccaaaatgtgaaacccaaaaatctgagacaggtctcagtcaatttaggaagtttattttaccaaagttagggatgcatgcctgtgacacggcctcaggaggtcctgatgacctgtgcccagggtggcagggtggtcagagcacaggttggttttatgctttttagggagacatgagacacaaatcaacatatgtaagatgaacattggttcgatctggaaaggtgggacaactcaaagcaatgatgagacaacttgaagcaggggggtttgcttcaaggtcataagtagataaaagacaaatggttgtattcttttgagtttccgattagcctttccaaaggaggcaatcagatatgcatttatctgagtaagaagaaggatgactgaattattttcagatatttattttacaaaatcagatatgcatttatctcagtgagcagagggatgactttgaattgatttattttcaaagatttatttataaaaagatttattttcctttcacaatgttaatgccataaatagtaatttcttagatctactaattttagtgttaaaaataggttccaatagtgattataaaaaattaacatgaaatattttatggggaaatttcagggttagtattggttgtatgtaggaaagcttgtttgtatttatatatgtttttaacctaacatcttaatgcattttgttactaatccttatggttttgtagaaaactctctaagaacttcctagattatgtcatctgccagttacagtgatttttgactccttgctccagttttttataccctcattttttttcttgaattatatcaggagctttgatcttactttgaacagcctcagcagtgagagtgcacccctgccctcacccagagttttacaaagaggatatctggtataattttaccttatagggaaaagctgaccatggaggagcccgattcatctagtgtactgtccacctcaggacaagaagaaggggcaccactctggctggagacctgccctcagcctgcctcagtctcagcccaggggtggcctctcgccctgcttgattctgaaatgtttggttttgtctccacagggcaggacacgtcctcacagaaaattgaagacttgatggaaatggtgcaaaagctgcagaaaggtcgtgtgtctcctttgtgtgaggcacagcctgaggtttggggccaggcagatgtgggtttaatttcaggccccacaatgtacgaatttgggaaataatcctcttcaccttctctttcttttaaaacttaattacttaaactaaaaatagggccccatgtttcaaaattaaagaagcaaaagggtatagaaggcaa

SEQ ID NO: 6296 - DNA, 2300 bp, Homo sapien
tggacagggaggtgacctcaggctggttctgccactgaggccctgaggaatcaggccctccccaaaagaagtaatgaaatggaccaaaggacttaagaatttggggggaagtaaggggaaaacgttaggtgctaaccacctgcccagaagagtggatctcacagcccaggaacattcccaagcaggaaaaccatccgtccaggaaccctaaccctaaaactaagcacaacccctacccctaacccctgaccctaacgctgacccttaaccataacccttaaccctaaccactaacgcaaaacactaacccttaaccctaacccctaacacctaacccccacctcaagcactaaaccctaagcctaaaccttaaccctaactgctaacactaacccataaccctaagccctagccccaaccctaaacttgaccctgaacccaagcctccaacccaaccccgacacaaacccctaaccctaacccctaattctagccctaatccctaaatccaacaccaacccttgaccggacccctgacccctaaccctaacctcaactcataacctcaacccctactcctacacctaacccctaccctaatgctagccataaacctaacacccaaacccaaactcgaacctatgcctacccctaaaaccctagcccgaaccgtaaccacaaatcctaacacacaacgctacccctaaacctaccactaccccaccccaaaccctgacaccgaaccctgaagctaaccctaacaacactaagcctaacctgcaacccttaacccaactgtaactcctaatgctaaccctaaccctaaccctaacaacactaagcctaacccctaacccttaacccaactgtaactcctaatgctaaccctaacccttaactctaaccccttaccctaaactgtaacccctaaccctaatcccaaccccaacacgtaaccctaacccctatcccctaccctaaaaccctaacccttacaaaccttagccaaatcccaaaccctaacccccacccctgaccctaatcccctagcccccaaaccctaaccccaataccctaaccccaacactaaaaccctgaccctaaccgtaaaaccctacccctaccccgaccctagcccaaccctaaccctaccccaatccttcccctacccctaacactaaccccaaaccctaattctaaccccactcctaaccccaaaactaacttctaacccctaaaccctaaccccaaccccaactctaaccttaatccctagctctaatctgtagccctaaccctaaaccctaaggtaaccttttataggttaggattcgaggcttcgtatttaggacaggcaggtgttctgatgtctcccactcacctgcacggtaaagttcttcccctggctcttcacaaccagtcgcgatgcatcgcggcctcccctggccggtgaagggctgggttctcccgaaagcctctgctcctcctccctcctcccagggccctccgggcctccacggtggccccagcgcggcagggaccgtgcagaagggaccgtgggcttgtggccggcctcggccactgtgggcatggagctcacgggaacgcggcctaggggcaggctacgctcctctgcgcgcgcaggaacagcgggcccagcgggggctgccgcagatttcactcgctggggcccgtgcactcccgcggcggtgtggtcccgcagagccgcaacctcatgaggctgccagggccacagcgccttgtggagtcgtcatccgtcagacacgcacacttcacaggaagcttcggcgctacacatgcgtactgctcgttggtggggagggcctccagaaccagggccggtcccctcggaagccagcgcacatgcgcgggggcacccggcagcgggccaatcgcaagcctggacggccgcacgtggccctggcgggcttcccgccgcgtttgtagccctcgcgcctttacgcatgcgcactagtgccacgcaggcctgccggagaattacctcacatctccaggcgcgcgcaggagtgcattgcgcaggcgcgctgcctggagtcctgcccccagcggcggttgctccaatcaccactggaggctccctcccgaggcaccctcgctggcgagctgagaggaaatggcggggaggtccctgacatcgaaggccgagcccaccgcaggagccgtggacagggctgagaaggccggaggtagtggtgggaggcagggaactgtgcgtgagggtctgacctcgccgaggcggggcagggttggggcgcggg

SEQ ID NO: 6297 - DNA, 2300 bp, Homo sapien
acaccctaagatacatcctatacatcttaagatagaaggcttctggaatcataaaatcagctggagcaccgcctcccccttccttttcccattctgtgttctcggccttggaacaactgttagatgttagagcccaaaatggatcccctgggtctatccccttttctttcatatttgctgcctttttgccagaaacatttccttaaatatacaattccatccttctgttgttttttttttttttttttgcagtaattttttaatctcaaaagtgtcttttttgtcttatttcatcttcacagtttcctgttcttattatataaatatatctccctaatctgagtctatggattggagttttatccaatccattcattccaatgattggaatgattggagtcattcacatttctcaatccatttattttccgtttctttgcctggtctttcttttatgtgatgcagctctccttgaatgtctgatacattttcatcctttaaaatgaagccgatgggtgacaggaagacgtgcttccatgaaaggcagtgtttcactccggaacctcagctcccgcacgctggatccagatccacagcatccccaggacctcttctcccctctgggtcctgcccccatctcactggctcccatctcagattccctgtgaggctccacgcttggcttcacatgcaaagtctaggggtgaggggcccctcccagcctctcagctggcagtcctgggcctgtgctgggaaacatgccctccccgcccgcagccggaggagccgcatggctgtcttgagtggaggtcacacatcccctcccagggccaggggagggaacggtcacagatgttcctcatgagccaaaaataagcaaggtctggctgcggtgctgtccactgccggctccagcaccaggggttgcccaagaacccccttgactccttggggtaagcagctcactgctggctgtcctgtgtgtgatggggaagggggactcaacccgagtgtgcagacctatgatgacccccgctcccacctccacgtcccatggccacggcccctcccttccaagctccttctgcctgatgggcagcaccccctcccgtctggagtctgccggggcccttcctgctctccttgttaatttattttctgtcttggagggaagctgggtgcacctgctcaggtggccccctagggccagaagacctgtcagtcactttcaaatacatgttctttccagctcttccttgccaaaggttctaaaaacactgttgtccgtctcacccaaaaagctaagcttctgtccaatccttaacggtagctataaatgagaagcataagcttggtttccttctaacatccggcaagttagaagataaaacgtatttcttcacttattcatcacatatttgcagggcacccctacacgggacagcagaggtcccaggccggtgctgcacccggagccaggctcggagctggccgcgcgccctcagctgaaactcaccggaggcgcggccgccctgggctgagaagacgccgtcggcccaggtggcatcagaacccacaggaggaagacagccagcccagaaggagccatggggggcctctggggatcgcaagggtcgaccccatcctccctgaaacaaggccggaggttgaggaggtctccgcccggccccgcagctgacaaccggtggagaaaccgcacctgccacgggaggggccgcggggtgggctcgagccaccatggggctggtacaagcaccctctccgctcaggacctcggccctcatcccagggcaccagggctcacagggggatgggcccgggtggggacgagggtgtggaggggcaggaagcacggcgggtggagcggagccgggtgcgggggtcgcgggggaccgcggggacggggccttgtgatgcaggagacggagggggctggtgacggaggacgggaggccgcaaggatgggggacgcgacatccttttcccctcccaccggctcaccagggatgcgcctccgcgactgcccgccccaatcccagggcggaggcctcgcgcaaaacccaggcgccgcggctccgcgctccggctgagggtccgcgccgccgcccgcccgctccttcccgctcggccgcggcctcagggacggatactccagcgcgcggttccaaccgaggcccgtggcgggtaaggccgggaggctggggcgggtacggggccgggagcgaggggcggcgcggggaggggatgcagctgtcgcccgcacagccgtgtctggacgc

SEQ ID NO: 6298 - DNA, 2300 bp, Homo sapien
tgcctatgtcctgtggcctctgccagctgcagcacttgtggtggaatcaggtctcagggctacagctgcaggagccaccccaccttccatggtacaatcaggtctcagggctgcagcttcaggagccaccgtgccttcaacgtgctgtgttcttcttggtggcagctctgccaatgctgtgttaaacagaagcggtgaaagtaggcaatcttctcattggttcgtatttttaaaaatacatttaaaagctctccactacgtatgtcttctgagattagcctttatcaaagaaaacatttcacttctatgatgagttttctcaacatgtttcaccacaaacgaatgttgattgaaatcaaatgctttgtctttctctgtagaaaaccgtattttttgcctttggtccactaataggtaaagcacactgacatatgttatgacataaaaccaccctgaacctgacctgatcatggtgatttgctttctgatgtgccgctggactcattgtgctgctgctttatctaaaactttcatgtctctactcaaacataaaacagcctaaatgtttctcttgcgcttctcttatacaccctaagatacatcctatacatcttaagatagaaggcttctggaatcataaaatcagctggagcaccgcctcccccttccttttcccattctgtgttctcggccttggaacaactgttagatgttagagcccaaaatggatcccctgggtctatccccttttctttcatatttgctgcctttttgccagaaacatttccttaaatatacaattccatccttctgttgttttttttttttttttttgcagtaattttttaatctcaaaagtgtcttttttgtcttatttcatcttcacagtttcctgttcttattatataaatatatctccctaatctgagtctatggattggagttttatccaatccattcattccaatgattggaatgattggagtcattcacatttctcaatccatttattttccgtttctttgcctggtctttcttttatgtgatgcagctctccttgaatgtctgatacattttcatcctttaaaatgaagccgatgggtgacaggaagacgtgcttccatgaaaggcagtgtttcactccggaacctcagctcccgcacgctggatccagatccacagcatccccaggacctcttctcccctctgggtcctgcccccatctcactggctcccatctcagattccctgtgaggctccacgcttggcttcacatgcaaagtctaggggtgaggggcccctcccagcctctcagctggcagtcctgggcctgtgctgggaaacatgccctccccgcccgcagccggaggagccgcatggctgtcttgagtggaggtcacacatcccctcccagggccaggggagggaacggtcacagatgttcctcatgagccaaaaataagcaaggtctggctgcggtgctgtccactgccggctccagcaccaggggttgcccaagaacccccttgactccttggggtaagcagctcactgctggctgtcctgtgtgtgatggggaagggggactcaacccgagtgtgcagacctatgatgacccccgctcccacctccacgtcccatggccacggcccctcccttccaagctccttctgcctgatgggcagcaccccctcccgtctggagtctgccggggcccttcctgctctccttgttaatttattttctgtcttggagggaagctgggtgcacctgctcaggtggccccctagggccagaagacctgtcagtcactttcaaatacatgttctttccagctcttccttgccaaaggttctaaaaacactgttgtccgtctcacccaaaaagctaagcttctgtccaatccttaacggtagctataaatgagaagcataagcttggtttccttctaacatccggcaagttagaagataaaacgtatttcttcacttattcatcacatatttgcagggcacccctacacgggacagcagaggtcccaggccggtgctgcacccggagccaggctcggagctggccgcgcgccctcagctgaaactcaccggaggcgcggccgccctgggctgagaagacgccgtcggcccaggtggcatcagaacccacaggaggaagacagccagcccagaaggagccatggggggcctctggggatcgcaagggtcgaccccatcctccctgaaacaaggccggaggttgaggaggtctccgcccggccccgcagctgacaaccggtggagaaa

SEQ ID NO: 6299 - DNA, 2300 bp, Homo sapien
tcccgggttcaagcaatcctcctgcctcccaactagctgggattacaggcatgagccaccacattcagctaatttttttttttgtatttttagtgcagatggggcttccttatgttggctaggctagccttgaactcctgacctaaggtgatccacccgccttggcctcgcaaagtgctgggattacaggcataagccaccatgcccagccagtcctaagttttgcctgagaatttctctttctaagaaagtacatcatatggcagttacaaggtctcttttgtctaaaataaatagaatttaataaataaaaatttaaaaaatttacctgagattaaaggacaaataaaaacacatgggtaatatgttctctgtaggaatatattttaacaatgacataaattattaataatcactaaatgttataataatttattaactaaaattaacaaaattcctattacgatatctaggaaaatactttcttagagtaaaatattctcatatcttgagagagcattggttaaaaacagcaaagatgtgcaagtcgatgtcttatcaagtacttactatcacgtaagtagcagacccctcttcacagcttttacagagttatccaaaacgcagtcatttacacaagagcagacaattttcctagctttctattgagtttataggttaatgttgttacaaaatttatgaaattacctgaccaaattttatatattatttcataatatatcaaaatttatttagatgtcaaatttcatatcataatattataatatataacgatatcatattatgataagttccatttactttcagacaatttcactaggcagtgtctgtctaccactaattcttttttcgttccactatttgcacaggcagcacagctgggaaaacacagactcacccaacacagtctcttccctgtgtctttctcctcctcaaggaatcagttcatcagtcaatcaagtcatctgggactggaggctgagtactccttaacatagaaggtctcgttcctgcatgctttcctcagcagagggggagacaagaaggtccttttaggggacacttgcttggacatagactaggctagttggagggctctgaccagcagagacagactccgccgcagtaggaagggatgaggcagctgttctgaacctggagctccaccacaccttgtcccgtctcactgaggcagttttgagaggctgccctggaatacgtcttgctggtggatgttgagaaacaatgtgggctttgacgggattcaggtggtgtccgcagtgtgaagacaggagctgatgttcagaatctaggctgtttgtcttgtgatcagttgggttacctgtttgagaccaagtccattttcactagggagggctgaataaagcccacagaacacaatggcgctcccaggatgactgaggaagggtgagaatgggggaaagtttttccaccgagactttttgctacctcaggaatcaggggctaattaggttagcactgactcaacctaatcaattcaattttattgcatttgatctaattatcttccccatttttaaggtaggaagggccatttcatttggtatttattttttctctgcatttttatttcatcatatatgtgtggatctaatacaatcaaccataatttgacatttgttgtttccaagcatttaagaaattataatatctatgcatacaatgttaacactatgtataataaattctctttctgtgcaaaatatataacatatgacaatataggcatgtttaattgtgcatcttgaaaggtgaacaggatcataaatccttccaggtaggaactgggacagaaataggaagaaatgcttccccgattttccggtccctgtgctcccggttctttgttttctggacaccatgacaggatcctgaaaatgtctccctttaactgtgtctaggtccccagtagaactacagcaagaaacttctgattgaggctctaagaagcggcaggaatgagaaaactcttcagccaataagagtaagccacgcccagccgagggacgtataaaaggcaggtctagcagactaacccacactctgcctttggacgtgagagagagcgcacctttcacttgagcttcaacatgggaaagggaaatgaagaccccgatctccactgctcctccatccagtgctccactgaccagccccctttccaacagatctcctttacagaaaagggctcagatgagaagaaaccattcaaagaaaaaggcaagaccgccttctcc

SEQ ID NO: 6300 - DNA, 2300 bp, Homo sapien
aatatgaaatgttgagggcaacccatgtggttagcgtatttatcgatactacagaagccgcagagaaaaggagagcggacatatattctctctctaaagaatgcgggtgacttaaaaacgtttcccccagaactttactggaacagcgctggaaccagcagcgatagttaaccaggtagtctgaaactgccatagtattcactgcaagtaaagggaaactgaaattaatgaagcagacaaacgtctccgcaggtcatggcaccagaaatgttgatggctgatgtaataccttggttcttatcttcttagtttaaaagaatttaaacaagagacacacagcaaaagaagtacagcataatttattgcaaaaaaaaagaatattttgaaaattaagtgcagaatagacggtacagtctgagaaagagattccagggcagcctgctcataaaagtgagacagcattaattattgctggagaaaccctctttatgggagttttgcatgattatttcataagaaggtggaaagaagtgttacggtaagcatgttctgactggtcttctggttatacatgtgcagtagctgtacatatttgtgcatacattgcatgcctcactagcatcttaaatctccacccaggaatgtgttttttactataaaaatgaacaaagggtcagcttgaggacagataaaatcaaaatgcacatgctctgtagaattaaaagtccctactgaagatagcgggtttcaaatgaccccaagtgctccacgtcttaaaagttcctccggtaaagctggaacactatctgttcctgaggtatcaggtcccatttgtggctctgagccactggcaagccaggcctgacttgagatgagaccaatgatttcaagtgtaaaatgcctaaatactcagtagcttcaggttgcattttggagcttgtccacttaagtgggttgatgaaaatggctcccaagactcacgcctcagaaatggggttttttcctttgctcttagcagattttatgcaacccaataattaacctttctgatgcctagactttcacattcgtgaaaaaggcgccattgaaagtgacctttccaagaagccacagcccttgtcacccctgcagagctctgaagctgctcacaagcaggccaggtggaagatttctctcaaaaacggttgagtgcgtgctctggctagagaaaaaagagggctgcggcacaatggacagtgtcttggacatcaggaaagttctcacgcagtttaggaaagaaggcagcaccctgggctgcagaagacgtactcctctggaaagaaccctgggtgcaactgaaagaggaacctgagaaggatagggccaagcgggtgaggacaacccgcccgatttgggaaaaggtaaggtatctttgtagggtaataccctcctcaatgctcagcccagacctgccctccaggtgcacctctgtactcactctccttgcaaagagtcggcatagcatcagaactcagcagtgctttggacaccgggaagtccacaccgctctgcccctccctccagggctatggaccccggatcccggtacatgctgggattatagctctgaagcttaccgacaaacaggctgagagtaggtaacggactacagctcccagcatattaggtggggcgggtaccactctgccccttcttccagggctgcgcctcgcgctggagcctggtgcatgctgggattgtagtcctgtagccctttgaccaaagggttgggagtgtttatgagaatgcatcttccaacaatcctagggaggcgcgcacagccctgcctcttcctccggtgacgcgcactttcccggagcccggtgcatgctaggattgtagtgctgcagccctgtgaccaaagggctgggagtgtttatgagactgcatctcccagcaagaccagcgagaggcgcggagcctcgtcccttcctccagtgattagcgcactctccctgagcctggtgcatgctgggattgcagtgctgcagccctgtgaccaaagagctttgttatagttatctgtgaagtgttcaacaaactactttacttcattattactggaagccagaagctcagttgtgttcactttttggattttatatcagtgagattgtgtaatatgtatacttttacatctactttcttctatgcaacattatatttatgatattcatgatattgcagatagctatagtttatttaaaaattattttttacattgtggtaaagtatacataaaattagccattttagctatt

SEQ ID NO: 6301 - DNA, 2300 bp, Homo sapien
tgactggtcttctggttatacatgtgcagtagctgtacatatttgtgcatacattgcatgcctcactagcatcttaaatctccacccaggaatgtgttttttactataaaaatgaacaaagggtcagcttgaggacagataaaatcaaaatgcacatgctctgtagaattaaaagtccctactgaagatagcgggtttcaaatgaccccaagtgctccacgtcttaaaagttcctccggtaaagctggaacactatctgttcctgaggtatcaggtcccatttgtggctctgagccactggcaagccaggcctgacttgagatgagaccaatgatttcaagtgtaaaatgcctaaatactcagtagcttcaggttgcattttggagcttgtccacttaagtgggttgatgaaaatggctcccaagactcacgcctcagaaatggggttttttcctttgctcttagcagattttatgcaacccaataattaacctttctgatgcctagactttcacattcgtgaaaaaggcgccattgaaagtgacctttccaagaagccacagcccttgtcacccctgcagagctctgaagctgctcacaagcaggccaggtggaagatttctctcaaaaacggttgagtgcgtgctctggctagagaaaaaagagggctgcggcacaatggacagtgtcttggacatcaggaaagttctcacgcagtttaggaaagaaggcagcaccctgggctgcagaagacgtactcctctggaaagaaccctgggtgcaactgaaagaggaacctgagaaggatagggccaagcgggtgaggacaacccgcccgatttgggaaaaggtaaggtatctttgtagggtaataccctcctcaatgctcagcccagacctgccctccaggtgcacctctgtactcactctccttgcaaagagtcggcatagcatcagaactcagcagtgctttggacaccgggaagtccacaccgctctgcccctccctccagggctatggaccccggatcccggtacatgctgggattatagctctgaagcttaccgacaaacaggctgagagtaggtaacggactacagctcccagcatattaggtggggcgggtaccactctgccccttcttccagggctgcgcctcgcgctggagcctggtgcatgctgggattgtagtcctgtagccctttgaccaaagggttgggagtgtttatgagaatgcatcttccaacaatcctagggaggcgcgcacagccctgcctcttcctccggtgacgcgcactttcccggagcccggtgcatgctaggattgtagtgctgcagccctgtgaccaaagggctgggagtgtttatgagactgcatctcccagcaagaccagcgagaggcgcggagcctcgtcccttcctccagtgattagcgcactctccctgagcctggtgcatgctgggattgcagtgctgcagccctgtgaccaaagagctttgttatagttatctgtgaagtgttcaacaaactactttacttcattattactggaagccagaagctcagttgtgttcactttttggattttatatcagtgagattgtgtaatatgtatacttttacatctactttcttctatgcaacattatatttatgatattcatgatattgcagatagctatagtttatttaaaaattattttttacattgtggtaaagtatacataaaattagccattttagctattttaagtgtgcagctcagaaaaattaactactttcacattgttttgcaactgtcattaccactcatagggaccttctttcaacttgcagaaacaaaactctatacccattaaataagctccttgttactccccctctagctcctaggaaccactcttctatttgggtttctagaatttaactactctaagtatctcataagtggaatgattcagtatttgtccttttatgactggctcatgtcactttgcacaatgtccttaaggttcatgcatgacgtaccatgtgtcagaatttccttattttacataactgaataacattccactctatgtataaatcacattttatctattaatcattgatggtaattcaaacaacagttgagtaattcaaacacctttttggtgatgtgagtaatgctgctatgaacctaggtgtatgtatattattttgtgtctttgctttcatatcttttgctgcatacccagatgtgaaattgctggatcgtatggtgattttatgtgtaaattttttagttactgtgttgtt

SEQ ID NO: 6302 - DNA, 2300 bp, Homo sapien
caggggggctcaccgccattcatgaaggggtggagcctgcctgcccgtgggcctttacaagggcggctggctggctggctggctgtccgggcaggcctcctggctgcacctgccgcagtgcacagtccggctgaggtgcacgggagcccgccggcctctctctgcccgcgtccgtccgtgaaattgcggccggggctcaccgcgatggccctcccgacaccttcggacagcaccctccccgcggaagcccggggacgaggacggcgacggagactcgtttggaccccgagccaaagcgaggccctgcgagcctgctttgagcggaacccgtacccgggcatcgccaccagagaacggctggcccaggccatcggcattccggagcccagggtccagatttggtttcagaatgagaggtcacgccagctgaggcagcaccggcgggaatctcggccctggcccgggagacgcggcccgccagaaggccggcgaaagcggaccgccgtcaccggatcccagaccgccctgctcctccgagcctttgagaaggatcgctttccaggcatcgccgcccgggaggagctggccagagagacgggcctcccggagtccaggattcagatctggtttcagaatcgaagggccaggcacccgggacagggtggcagggcgcccgcgcaggcaggcggcctgtgcagcgcggcccccggcgggggtcaccctgctccctcgtgggtcgccttcgcccacaccggcgcgtggggaacggggcttcccgcaccccacgtgccctgcgcgcctggggctctcccacagggggctttcgtgagccaggcagcgagggccgcccccgcgctgcagcccagccaggccgcgccggcagaggggatctcccaacctgccccggcgcgcggggatttcgcctacgccgccccggctcctccggacggggcgctctcccaccctcaggctcctcggtggcctccgcacccgggcaaaagccgggaggaccgggacccgcagcgcgacggcctgccgggcccctgcgcggtggcacagcctgggcccgctcaagcggggccgcagggccaaggggtgcttgcgccacccacgtcccaggggagtccgtggtggggctggggccggggtccccaggtcgccggggcggcgtgggaaccccaagccggggcagctccacctccccagcccgcgcccccggacgcctccgcgcggcaggggcagatgcaaggcatcccggcgccctcccaggcgctccaggagccggcgccctggtctgcactcccctgcggcctgctgctggatgagctcctggcgagcccggagtttctgcagcaggcgcaacctctcctagaaacggaggccccgggggagctggaggcctcggaagaggccgcctcgctggaagcacccctcagcgaggaagaataccgggctctgctggaggagctttaggacgcggggttgggacggggtcgggtggttcggggcagggcggtggcctctctttcgcggggaacgcctggctggctacggaggggcgtgtctccgccccgccccctccaccgggctgaccggcctgggattcctgccttctaggcctaggcccggtgagagactccacacagcggagaactgccattctttcctgggcatcccggggatcccagagccggcccaggtaccagcaggtgggccgcctactgcgcacgcgcgggtttgcgggcagccgcctgggctgtgggagcagcccgggcagagctctcctgcctctccaccagcccaccccgccgcctgaccgccccctccccacccccaccccccgcccccggaaaacgcgtcgtcccctgggctgggtggagacccccgtcccgcgaaacaccgggccccgcgcagcgtccgggcctgacaccgctccggcggctcgcctcctctgcgcccccgcgccaccgtcgcccgcccgcccgggcccctgcagccgcccagtgccagcacggagcgcctggcggcggaacgcagaccccaggcccggcgcacaccggggacgctgagcgttccaggcgggagggaaggcgggcagagatggagagaggaacgggagacctagaggggcggaaggatgggcggagggacgttaggagggagggagggaggcagggaggcagggaggcagggaggaacggagggaaagacagagcgacgcagggactgggggcgggcgggagggagccggggacggggggaggaaggcagggaggaaaagcggtcttcggcctccggga

SEQ ID NO: 6303 - DNA, 2300 bp, Homo sapien
gtgcttattctaaaacaagtaaatgtttgcctatggtctgagattctaatccacggagttcattctaatccacattcaacactatcatgtaccagtgggcctcataacccacctagccctgtgatttttcaggttcacttttctaaacttgtgaattaaatatttattttcttagttcagaagaggaaaaaaactcttgtaattgttgcccatttcaggagaaatcttgcatatgaaaacaagagataaatatacacaactgagggctgtggtttaaacaaaatcttgagaatgttttttgaccttatacatttgtgctttagtataacaaaatgatatagacaaaggtaacttttaatagaaccagtcactaaattaaaaaaatgacaaattcttctgcttagctaagcaacagagaaggtaaaatactaattcaattcatcaatttaagcaatactcattaagagccaagtatgtgcttactgaataagctgctaaggtttggtggttacagagtgtgcggtgaaatgatgtctacatcacagtccaacattcacagagtttaaaagcctaccaagaatcaagacagacacaaatacctaacatagacgtttgtatatgataagagagccagagtacaatttaggagaagaaattgtatggaaggaaggttcatttccattagaccagaaaagacagcacatttgaaggcctgaataagaaatattctggataagatattgtggctgctaccagaatggctcttgatgatctctacctcttggtatttatacccttatataatctctttcctatagtgtaagctggtcccaggtacttgtttctattgaatagaatagaacaaaagaaatgagatgccacttctgagattagattataagatactgtgaatttcatcttgtgccctctccctctctctctttctcttgccctctcatttgaatgaagccaactggcatgctgtcagtggcccagtgtaagtcctgttacaagaaattgatgattacctgtagccaaccctaagtgaagaactgaggtcctcagtcctacaaatggagagaaactgaatctagctaagaaccatgtgagtgagctgggaagaagatccaccctcagttgaaatttaagatgacatattgagcagacatactgagacacactgaaagtaagagagcaggaggaaacaaaaccagggtcatacaaagaacacaactgattttgagattctcacataagtattacaccttcagtgagcacgtgtactagaaatttaaaaaataaataaaataaaccttcaaagtgagctagcaaataaatttccctatggtctcagctctgagtggagagagaaaatgttccctgtggagtttatagccagaatccagctctcaaacaggtttcagcctgaactcacacaatctgtgtggcttccaaatttgcaagctgagaatttaattcaaagtggtctcaggttgatagcagtccaaaatgctaggtaggaaaaaaaatcctctctggacaaataaatcatcaaagcaagctcataagagcaggtttcaaaggtcatgagattctaacacacacacaaaaatcacacacacaaaatgggggtagcagcaacatgggtagcatattcaaacttgaaaagactttaaatatttgtattattagatgtagattatgaaacacatattttaatgtggttaatttttttaaggaatcaaaactatgagtaaagaccaagaaaattgtgctggatggccacttccaccatggctcccctcctatttaagtctgggtactgtgtcacccgaagtcttcaggcacattgttccaggtctgggtttgcctatgaaagaaactcatgagagctggaaatgaggagtgaagaggaggtcttcaaataaagcaggcttaaggattagacatagcaggtttgacagatgtgatggcttgcagaatcctttatgagctcccactgtccatctggataagatttacagacctttcagaaattcctataagcttgggttctgtgcccacactctagactgtcaggctaagatctctgatataaaacagacctcttctgattttgtctagctgcttttctaatatctattcaccaagctcttccaataatagcataaggccctaattaatattaaacttttatcattataatacataggatgtcttctgttttcctgatcaaattctgactactattaaaatataaagaattgtccagaaatatataaaaaaagaatcacacattg

SEQ ID NO: 6304 - DNA, 2300 bp, Homo sapien
tcccagctacttgggaggctgaggtgggaggatcacttgagcccagggaggctgagactgcagtgagtcatgatcaggcctctgcactccagcctgggtgacagagtgagaccctgtctcaaaacaacaaaaaagtagcagccaacatcaactgaccttttgtaccaggtgcctattgataccatagtttaatttcttataactgtttcttatttcacttaccaactctgtcttcagttactcccagatttttactgtgtgtgtacagatgaccttttgtttagactgaattgtctccccagaagtaagattactgtgagtcatggtgaatggacattctccttacccttgatgtaaattgacagggttttgggtgcctcccagctataatcttagcactttgggaggctaagagaggaggattgcttgaggccaagagttggaggaggcagtatggcagtatggtgagaccctgtctccattattttaaaaaattgacaggctttacccgggaaggcttatacacaatttaaccacctctcatagtataagaaagtgcccatttcactgcacctttgccagcacagggtattataatttagtaagtcattttttgtttgattattttaaatagacaaaagacctcatgttactttacttgtcacatttcaacatctttcctcagcttattagctctatttcttttctgtctgtaaatggttgttgttgttttgttctttgagacagggtcttgctctgtcaccaggctggactgtagtggcataatcatgcctcactgcagccttgacctcccaggctcaaacttccgcattccgagtagctgggactgcaagtgtgcactaccaccaccagctaacttttttcttcttttggatagagacagggtctcactctgttgtccagaccggtctctagctcctggccttaagcaatcctcctgcattagcttctcaaattgctggaatttcaggcctgagccaccatgcctggcctgggctagtcctatattctctagagttctctttactttgtgctagccaatctctcattatgctgttcacctgttataatgaataattctctgtattaaattttaccactttaaacttttgagtggtttatgcttcctgattggactctgactaatatgttaggaagggtcccaggagatacacccacacagatgggatttgggcataggtttggtttcccagggggcagcgctgagctctttgccagtgggaaatgggatgctggtgatttccagtaggtgacctcacagtgactcaagctaccacttactgttgattgtgacgaaatgccagctgaggcacatgccttgggagctaagtggttgctgcccttgaccactgtgaagactggtgtgggaagggtcgctttggatgcacttgagcaggggtccccaacccctgagccatggagccgcaaggagccacacagcaggaggtgagcggtgtcgagtgagggagtgagggaagcttcgtctgtatttacagccactcccctttgctcacattcccgcctgagctccaccttctcagatgagcagcagcgttagattctcataggagaacgcaccctgttgtgaaccgtgcatgtgagggatcaaggttgcgccgtccttatgagaatctaatacctattgatctgttactttctcccatcacgctcaggtgggaccatccagttgcaggaaaacaagcttaacacgcccactgattctacattatggtgagttctatgattattttattatatattacagtgtaataatggaaataaagtgcctaataaatgcaaatgtgcttacatcttttggcccagctcctacctcccggcagcctctccaggcccagaactttctccagtcagcctctacagaccaagatcatgactcacaatggcctatttaggcccataccctacgtcacggcagcctccacagatgaggctactgcctcacaacagcctccacaggcacagctccatcgttacaatggcctctttagacccagctcctgcctcccagccttctctccaggccctgaactttctcaagtcgacctcaccaggcccaggtcatgcttctttgcagcctctccaggcccagctcctgcatcttggtggcccctccaggcccagcctctgcctcccgtcagcctctacagtcccaacgtctgcctcacagcagattcttcacgcccagcatctacctcactgtggaccccccaagccaagctcccaacctttcagcagct

SEQ ID NO: 6305 - DNA, 2300 bp, Homo sapien
tgattggcatctgaggttgtggacagtctggtgttactaagcccttaacctgtagggtgtatactaactccaggtaatcagtgtcacagttgaattacaggatacccaattgttttccagagagttggaatattggttggtatgggaaacaccccccaccccccacaatttgctgttaaaagtggagtgttgatagtatagaggaaaatcatggttatttttctttttacagatatagtagtttcaaaattaactattatccctatgggaaataactttataaaatagagtccactgttcgtgtatatagtacgttttgtttttagtctatggattctactcatttccagctcagcacctttggcccaccacttgcaacatacattggtaatacagttagattcttggttgcactctgtattttgtccttatatacttccacatcctaaataatttaatttgtgtagcttgtgatttgttctttgtgcattaaaattctgtgggttttatcaaatgcatagtgtcagatatccactactgaagtagcatacagaatacttcaaatccccaccccagacagtcactgatctgactatcatctctttggttgtgctttttccagaatgttatatgaatggagtcatataatgtatagcatcttcatactgccaccgtttacttagcaacatagatgcaagattcattcatttgttttcatggattgacagttcattcctttctgttggtgaatggtattccattgcatggttgtacttcaaattgattatgcattcagctattgaagaacgttctgattacttcaagttttggccatgatgagtagagtggctcgtatataattacatgctagtttttgtttgaacataatttttcaaagcagctgtctaaacatacacaatttaggggtgcatttgttggattgtaaggtaagacttgtttatctttgggaaaaactgtcaaactatttcccaaagtggctgtacccattcatgcattctgccattaatgaatggccgtacctattgttcttcaacctccaattgttactgttgagcttttttaagagtcccacagttgtactaggtgtgcagtgatatctcagcattattttaatttgcagtctcctaatgagatatattgagcatccttttgtgtgattatgtgctatctgtatattttcttttttttcttttttcttttttttttattgagatagagtctcattctgtcactcaggctggagtgcagtggtgtgatcctgggtcactgcaacctccacctccgatgttcaagcaattctcttgcatcagcctcccaagtagctgggattacaggcactcaccaccatgcctggctaatttttttgtatttttagtagagagggggtatcactatgttggccaggctgatctcaaattcctgacctcaggtgactcacccacctcagcctcccaaagtgctggggttataggcatgagccaccacacctggcctgctatctatatattttatttggctggatgtctgttcagatatttacccagttttatgtgggtttttagttttcttagtgttcgtttgaagagttctttgtgtattttcaatacagtttttaaaatcatgtttgtattttgtaaatatcttctcacagtgtgtcttgtctttttgttctctgaatagggtttttcatagtagaaaatttagttttataaagtctgttctcagtattttcgcgaattggcacttgatgctgtgtgttaaaactcaacaccagatcgaatgtctcttaggttttcttttagattatttatagttttgcatttgaagttgtagtctctggactattttgagtacgtttttgtgttttaatttgtgtatagagtcatttcattctatatggcttccaaataattcttccatcaccatttatgggaaggttatggatatactggcctttatttcggtttgaatttccaaaattatgacactgaataaactgaatattgaattttataggtatttcaggacagccaggagggggcgcacatccgccgagaaactgtgagcaagagcgtctgtgctgaaccatggcgccaccagagggcgcgcgatcccgccccaaccaacttcccgctgaagtgccagaagcagcgaggagcttcaacttcctcagggcagcacgggggtcgtgttaatttggtgttcttcattggtgagtaaaaagctcctgtccacggccctgagtgccaaggagtgagtctttagagtagtcagcagag

SEQ ID NO: 6306 - DNA, 2300 bp, Homo sapien
ccctcctacccacaattgacaagtgcccatccactccagcactagagatgctactaatatgtgaatttttggtggtccctccaggtgagccttcccagactttcccttttccaggaggccccctcctgttcatgtctagctacctatctactctaacaaagcccactatcctgtgtctttcccaaaaatagtgagggaacgattaattggaaaccataagaaatgatatggatatagacgaaaactttacaacttacacaaataatcactcaaaatcatccttacactaaaaatgcaaaactatacaatttctagaagaaacaatagaagaaaagctatctgcctttgggtttggtaatgaattttaacaaatgacacaaaaggtagatatacacaaaagaagtgacagtgtggatttcttaatatttaaagtttatactctggaagagaccttgttaagagaacaaaaagacaagccacatattgaagaaaatatttgcaaaatacacatctgagaaagaatttgtcttcaaaatatataaaaaattattaaaactaaacaataagttaaacagcccaactaaaaatgcacacacatctgaacagacacctcaccaaagaagatctacagatggcaagtaaacacattgaaaccacaatgtggttacaattgaaaaccacaatgagatagcacagctggtctatatctgttagaattgctaaactcttttaaaaatgacaaattgctgaaggaaaaacaagaactcttttcattgccagtggaacacagcgtataagaccaaaatacgccaccccaaaacctaaccctaaccctaacccctaacccctaaccctaaccctaaccctaaccctaacccctaacccctaaccctaaccctaaccctaacccctacccctaacccctaacccttaccggtgaccctactgtatccctgactcctaaccaacgttgatccctaaccctaaaccccttactgtaactataatcttcatcccaccctatccctagccttagtgccatcccccaggctttttccaggatgggattttatgtgattgtttcgaataggtggaaatctctgctcatttaggagtcgttcaatgtaacaaggatcttggtcttcacagagaccctaaacgcgtgtggcccagggccatgtggatgccatcagccactaggtggcagcaggggccctttggatttgaacaatgcagctcagtcagagggctggactgggacacccctactcatggtctctcttggcatggttttgtttggtgactccaggtgtcccaacctcctgtgtccattgtaatatgtcctgggaccatctcccccagggccttcaacctggggggttgaaccccaggatagcaaccccaagccctccttgctatcctggctactgatggaagatgtacctcaagcctgtcccattcctcacttcctgctgagacctggccccaacatggccagctctatgttcctcagaccctctcaggccaccttctctcttctaggcactgtcactgggcttctccccaccccatagatccacagcccccaggtagtcctacagctgtgtccactcgtgcagcctgcacccccttcccctactcggccaccccatctgagtagtaaggggcccctgcctgattggagacccccagatgcagacccagatcacacagcacactgataagaggagggattcgcaccttaaaagaaaggcgtgggaccaaccccagatcccaccactctcggcctcaagggcaggcatgactagaggcccttggtggccaggacccactgccttcttcaccgatcagttggcatggcctctcaccagtgttccctcctaacacacctgttctctctctcacacaccctaaagccgcttgccaaccacctgtcacacagccactccatgcctgttgctgcttggcacccactgggggccagggatgtgaacaaacctcatctaagctggctgccgggtcctaatgggcaggtccggtccgccctctaggagaggtgctgtccggtgaggcataaaatcccgggattctggctggaggcagctcctgagactgctggcatgaaggggagccgtgccctcctgctggtggccctcaccctgttctgcatctgccgtgagtctgtgccactggggtttccagaacattcaggggtgggggggagtggggggtacctgagaaggtaaaatcctggcatcgggcctctgcagtgaacactccacctgcttctgtcacagaag

SEQ ID NO: 6307 - DNA, 2300 bp, Homo sapien
acccacatacagaggatcccactcaaggagcacacgtgcgaaagtccccacagagggacacacaaatggggacatcaggaacacagggccacagccacacacacagacccacatacagaggatcctactcaaggagcacacgtgcgaaagtcccccacagagggacacacaaatggggacatcaggaacacagggccacagccacacacacagacccacatacagaggatcccactcaaggaacacacgtgtgaaagtccccacagaggtacacacaaatggggacatcaggaacacagggccacagccacacacacagacccacatacagaggatcccactcaaggaacacacgtgtgaaagtccccacagaggtacacacagggtccacacaggagcaggcacaccacaggcaagacccaaaatggaaatccaggcagacgccacgtaggcaggtggacagagcacagagccagacaacactgcgtggtcgtccggagggggcgtctggagggggcgtccggagggagacgggcggcagaggcagcggtatgaggtgggagccccagaaagaggaagtgtccaggactgggtggacacagaccccatgtcgcccatgggctaggtcagggcgggggtgctcagcatctgaaagctggtgtcgagccccaagaggacccctgacaaggccaagaaaaaggtacacccatgtccaagggggttgggagccgcaggtgagcagcctctgaggtcagccagggcagccccagcgcccacactgactcacacccaccacaaccagcacagaccctgatcctgaccctggatcccagactctcccacagccagaaccttccagcatttcagctgcccaatctatggtctcttctgggggcacagctgagtggaaccgccccatccttggccaccctgggtgctgagccctgacacttcactgccccggccctcctctccacacctctgtcctgtctgagcctggcaagggggccatgcggtgctgtcggctctgtgctctgtcccacctgcctacatggtatctgcctggatttccatttggctgagggagccctagggagggggccctggaggacttggttacaggggacctggtgaggggacccagtgagggggacttcatgggtgggtgcctggttgaggggacctggtgaaagaaacatggtgagggggcctggtgaggggtggtctggtgagggaacttagggaaacctggtgaggaggacctggtgaggggacatgggggggaccttggtgaggggacctggtgaggggacatagggggaccttggtgagcggacctggtgaggggacatgggggggaccttggtgaggggacctggtgaggaggacatgggggggaccttggtgaggggacctggtgaggggacatgggggggaccttggtgaggggacctggtgaggggacctggtgaggggacatagggggggaccttggtgaggggacctggtgaggggacatgggggggaccttggtgaggaggacctggtgaggggacatgggggggaccttggtgaggggacctggtgaggggacatgagggggaccttggtgaggggacctggtgaggaggacatgggggggaccttggtgaggggacctggtgaggggacatgggggggaccttggtgaggaggacctggtgaggggacatgggggggaccttggtgaggggacctggtgaggggacatgggggggaccttggtgaggggacctggtgaggggacatgggggggaccttggtgaggggacctggtgaggggacatgggggggaccttggtgaggggacctggtgaggggacctggtgaggaggacatgggtggggagccttggtgaggggacctggtgaggaggacctggtgaggggaacatggtgaggggaacatggtcagggggacttataggggtgtcctgttggggggacctggtggtgagatctggtgaggggatcaaaggcagaagccattgtcttggtcacatagacagaatctagaacctgtcatcccacagagccacattctagagtttagagtgggggacctctccccaattctgtaagcccatgaggagagaggaaggcctttctctccatgctccttttgcgggaactccctggcaccaaggccaggggggaaaggacagtctctgatgaggatgggtctctaggctgctctgagtgctgtccctgcactgaagaagttatagttccctcccaggcggccccctccctgcccctcag

SEQ ID NO: 6308 - DNA, 2300 bp, Homo sapien
gtggaaaagcgcttcacgctccctgtaagcaggctggtcatgcttgtgaaatccgagtcctaagggaggaatcccagcaagatcacacagaagtggtgatttgaccacccacccgcaccagtgctgaaggagacactgcaggctctgcagcaggtagtgctagggcagggcactgatacacgcacaccgtgggcccttaccatgccatccaggtaccggttctgatcctctgcatccctatcgatgtccagggcgagctgttcagcagacagagagggcagggttgggccagagcagacacataatacagcactcaccctccccagaccagataaaccctgccaacaactctgccagacacagtggggctgcagcagacagaaaggtccaggtgtcagctggggcctcatgcaggtgagcacagccacgaattggatgaggatggaaaactgcctgaaactcctctgggccctctgccttccctctgatccccattccccaaaggcaccaggtggaggtaagaggacagaccaccactgaccgatttgagcctggtgactttggaggccaggctgtcagccattcgcttgttctcccggtctagaatctcttccacagcgcccgggctctgagctgagaaaagagaggggctgaagggttgcatccatcggtgagcacggcccctgacccctctcactccaaccacatctgggtgagtcagaaatctagggggccctaaccaaggttccagcaggtgaatcttgcacatgagacaggctgcataaaggacgatgtgtgtaagggcctgtcatgtgaacacatgtcctgtgtacacatcaaggtggggatgggcaagcacccacaatgggttcggtccaaccagcaccttctgagactgtgtagcaaaaactggacccagccctggggtgctagtatgatgtgacacttgcatccagggaggtcaccatctgtgtatgtggagcccattcttatagaaaaagagtaaactctgctaagagcatagaaaagacttgggaaaagtacccagcaaggcagcagaaaggctcctgcagagacgacctttgagctaggtcctgaagaggtggcaaggaaccaggacagaacattgggaaggccctttaccgcacagaaaatggctgagcaaagttcccaatttccccgagacgggagctgaggtcgaccaggagcgggatccttggtctgcatcccgcatggggcttcctgcaacacccagggcagagtgctcgcagaggcctggcctgtgacaggctgggccaggggataaggaagttctgtcacatcaggtgcgtgagaaccacctcctccctagcttcagtgtcaggaagggatgccagcgtccttccagccacttcatatttataaattcctttaatcatcataacacctcacagagacaggcatcaatatcccactttgcagacaagaacacgggctccaggaggggaaatggggccaccgaggccaaagtaagagtcctgcttggacaccagcggagcacagcctctactcctagggcctggcctcgggacctgtcgaatgccgactcccgctcaccccgaacccatgcagaacgatctcacagggggcggcggggagtggggagaccccgctgctgcgcgacccctcgctggagctgctgggccgccacgcgcgccttcggtcctaacggcagtgccggccgaaacccggccctgctcggacccggaaggatccgaatccgcccccctgacagggtcctctcggccgaggtcaccccagctgggccagaggcaggcgcacgcggctctacaggcagcggcgtcggtttcggcccggccctgcccccaacggctccgctctcccgcgctcaccccgagcccagtccgccatcgtgccctgccccggctcctcgacgcggacaccgacgcggccacagccgcctcagacgtggcgcagtcgcggggaaagagcttccggccccgcccccagctagcgatggccccgcctccgcaccgaccacgcccctagatagcccagccccttccgcttcgggctcgctgacttccggcttagggccgagggtggggaactgccgggcgcggaagcgatgggcatatctgtggcttattttcagcactgtcgcgcagacagtggcgcgatctcagctcactgcagcccccgcctgccgggctcccaaggtgctgggattacagcagcaccgcggatgtgacgtttggtgttcctgtgaacgtggggcggggcggggccgtttgcttgct

SEQ ID NO: 6309 - DNA, 2300 bp, Homo sapien
catagaaaagacttgggaaaagtacccagcaaggcagcagaaaggctcctgcagagacgacctttgagctaggtcctgaagaggtggcaaggaaccaggacagaacattgggaaggccctttaccgcacagaaaatggctgagcaaagttcccaatttccccgagacgggagctgaggtcgaccaggagcgggatccttggtctgcatcccgcatggggcttcctgcaacacccagggcagagtgctcgcagaggcctggcctgtgacaggctgggccaggggataaggaagttctgtcacatcaggtgcgtgagaaccacctcctccctagcttcagtgtcaggaagggatgccagcgtccttccagccacttcatatttataaattcctttaatcatcataacacctcacagagacaggcatcaatatcccactttgcagacaagaacacgggctccaggaggggaaatggggccaccgaggccaaagtaagagtcctgcttggacaccagcggagcacagcctctactcctagggcctggcctcgggacctgtcgaatgccgactcccgctcaccccgaacccatgcagaacgatctcacagggggcggcggggagtggggagaccccgctgctgcgcgacccctcgctggagctgctgggccgccacgcgcgccttcggtcctaacggcagtgccggccgaaacccggccctgctcggacccggaaggatccgaatccgcccccctgacagggtcctctcggccgaggtcaccccagctgggccagaggcaggcgcacgcggctctacaggcagcggcgtcggtttcggcccggccctgcccccaacggctccgctctcccgcgctcaccccgagcccagtccgccatcgtgccctgccccggctcctcgacgcggacaccgacgcggccacagccgcctcagacgtggcgcagtcgcggggaaagagcttccggccccgcccccagctagcgatggccccgcctccgcaccgaccacgcccctagatagcccagccccttccgcttcgggctcgctgacttccggcttagggccgagggtggggaactgccgggcgcggaagcgatgggcatatctgtggcttattttcagcactgtcgcgcagacagtggcgcgatctcagctcactgcagcccccgcctgccgggctcccaaggtgctgggattacagcagcaccgcggatgtgacgtttggtgttcctgtgaacgtggggcggggcggggccgtttgcttgctcagtgcctagacgatggtggtggaaagacgcttctgtgggttaggtcctaacggttaggaaggattcacaggcgggtcatgaggaaggagcagacccctcgggcagaagcccgcgaggagcactgggtgtggtgggggcaggggtgcctcctctgtcaagtggagatcggcgcctcgctcgtgcctgcgagtgcgcgccgcgtcgaatacagccgtacagaacgcactacaggaaagtgaagccgggagagagactgggaggcggcgcggggactgggggccgtagacgcctttgctcccgggcacttgttagaagagcgagtggatcgcgcttcctgtgcgtcactgaatcctcatgacggccactgaaacggacacgcaggatctttgcttttcaagagggaactgagtccaggccagactgggttgctcccctttctctcggcccctccacctttgcaagtgctgctccttctgcctggagtggctcctccagtcttttcccggctcacttcccaccgtccggtgtcagcaaaaacagcacttcctcacagcccgttgcagcccagcagtcgccttttgcttcttttgaagcacagccctgtgaccgcctcgtgtccttttgtttttccttgtcccccttcccctctggaacataagctccacaaaggcagggacctgggaatcccgttcgcctgcattccccagcaaacgcctaacgaacccaatggcccaggactgaaaattcctttccacttcggctttcccctctacatcccatcggttctgtggagctcgaggggcgtcactgtgtgtgtggcagggcacggtgggggctgagatcgtttcctgttggaacttctggcccaagaagcgcgggtcacaaggagaggggtcagttcggttcagagcgactcagcccctcgactcgggtcttaaaacctccgagccgccagttctgcctcaggccgcgcccccttaaagcgccaccagacgctgcgccccgttaaagcgccacc

SEQ ID NO: 6310 - DNA, 2300 bp, Homo sapien
acactctgcagccagatgacacggtgggagggtggcaagccctgttccaggacggagaccagcagctccgccagtctctgtgggcagggagaagagcggctccaccaggcccttcttcctggggccacccgtccctgcccctttaccccttgggccagcacccaccttccggtcctcctgttgggcatcatcaaacgtgaagctctgggagtgctgcagagagaactagtgaattcaaatccacagaggggtaggatccgcgtccgctgatgcgggcggcctattggcctctaactcaggcagcagccactgctcagaacggatggcagggtcggcactcgcccccatccctacacgcctgccacccaacgggtgcacccccactctccccgcaacactgcatcccagacctgccccccgcaccccgccgcgtcccctacgcttgctgacacagcctctgcctcacccacgccctccctgctacccgcgcacgaccctgccccaccccctccgtgcccgccccccggcctcaggcggccgcttacctcctggttgtatgaccgcagagcttccataatcacatcctcctcacccgtctccacggcttctgcaaccgcccggggctccatggcgcgccggggaaggcgggacgggcccttcctcagccgttccgggccgcagttcgccggccccgccctggcccagaaagccccgcgccagcgcgcgggggaggccgggacggggcgcggcgtctggtggcgctttaacggggcgcagcgtctggtggcgctttaagggggcgcggcctgaggcagaactggcggctcggaggttttaagacccgagtcgaggggctgagtcgctctgaaccgaactgacccctctccttgtgacccgcgcttcttgggccagaagttccaacaggaaacgatctcagcccccaccgtgccctgccacacacacagtgacgcccctcgagctccacagaaccgatgggatgtagaggggaaagccgaagtggaaaggaattttcagtcctgggccattgggttcgttaggcgtttgctggggaatgcaggcgaacgggattcccaggtccctgcctttgtggagcttatgttccagaggggaagggggacaaggaaaaacaaaaggacacgaggcggtcacagggctgtgcttcaaaagaagcaaaaggcgactgctgggctgcaacgggctgtgaggaagtgctgtttttgctgacaccggacggtgggaagtgagccgggaaaagactggaggagccactccaggcagaaggagcagcacttgcaaaggtggaggggccgagagaaaggggagcaacccagtctggcctggactcagttccctcttgaaaagcaaagatcctgcgtgtccgtttcagtggccgtcatgaggattcagtgacgcacaggaagcgcgatccactcgctcttctaacaagtgcccgggagcaaaggcgtctacggcccccagtccccgcgccgcctcccagtctctctcccggcttcactttcctgtagtgcgttctgtacggctgtattcgacgcggcgcgcactcgcaggcacgagcgaggcgccgatctccacttgacagaggaggcacccctgcccccaccacacccagtgctcctcgcgggcttctgcccgaggggtctgctccttcctcatgacccgcctgtgaatccttcctaaccgttaggacctaacccacagaagcgtctttccaccaccatcgtctaggcactgagcaagcaaacggccccgccccgccccacgttcacaggaacaccaaacgtcacatccgcggtgctgctgtaatcccagcaccttgggagcccggcaggcgggggctgcagtgagctgagatcgcgccactgtctgcgcgacagtgctgaaaataagccacagatatgcccatcgcttccgcgcccggcagttccccaccctcggccctaagccggaagtcagcgagcccgaagcggaaggggctgggctatctaggggcgtggtcggtgcggaggcggggccatcgctagctgggggcggggccggaagctctttccccgcgactgcgccacgtctgaggcggctgtggccgcgtcggtgtccgcgtcgaggagccggggcagggcacgatggcggactgggctcggggtgagcgcgggagagcggagccgttgggggcagggccgggccgaaaccgacgccgctgcctgtagagccgcgtgcgcctgcctctggcccagctggggtgacctcggccgagaggaccc

SEQ ID NO: 6311 - DNA, 2300 bp, Homo sapien
ctctcggccgaggtcaccccagctgggccagaggcaggcgcacgcggctctacaggcagcggcgtcggtttcggcccggccctgcccccaacggctccgctctcccgcgctcaccccgagcccagtccgccatcgtgccctgccccggctcctcgacgcggacaccgacgcggccacagccgcctcagacgtggcgcagtcgcggggaaagagcttccggccccgcccccagctagcgatggccccgcctccgcaccgaccacgcccctagatagcccagccccttccgcttcgggctcgctgacttccggcttagggccgagggtggggaactgccgggcgcggaagcgatgggcatatctgtggcttattttcagcactgtcgcgcagacagtggcgcgatctcagctcactgcagcccccgcctgccgggctcccaaggtgctgggattacagcagcaccgcggatgtgacgtttggtgttcctgtgaacgtggggcggggcggggccgtttgcttgctcagtgcctagacgatggtggtggaaagacgcttctgtgggttaggtcctaacggttaggaaggattcacaggcgggtcatgaggaaggagcagacccctcgggcagaagcccgcgaggagcactgggtgtggtgggggcaggggtgcctcctctgtcaagtggagatcggcgcctcgctcgtgcctgcgagtgcgcgccgcgtcgaatacagccgtacagaacgcactacaggaaagtgaagccgggagagagactgggaggcggcgcggggactgggggccgtagacgcctttgctcccgggcacttgttagaagagcgagtggatcgcgcttcctgtgcgtcactgaatcctcatgacggccactgaaacggacacgcaggatctttgcttttcaagagggaactgagtccaggccagactgggttgctcccctttctctcggcccctccacctttgcaagtgctgctccttctgcctggagtggctcctccagtcttttcccggctcacttcccaccgtccggtgtcagcaaaaacagcacttcctcacagcccgttgcagcccagcagtcgccttttgcttcttttgaagcacagccctgtgaccgcctcgtgtccttttgtttttccttgtcccccttcccctctggaacataagctccacaaaggcagggacctgggaatcccgttcgcctgcattccccagcaaacgcctaacgaacccaatggcccaggactgaaaattcctttccacttcggctttcccctctacatcccatcggttctgtggagctcgaggggcgtcactgtgtgtgtggcagggcacggtgggggctgagatcgtttcctgttggaacttctggcccaagaagcgcgggtcacaaggagaggggtcagttcggttcagagcgactcagcccctcgactcgggtcttaaaacctccgagccgccagttctgcctcaggccgcgcccccttaaagcgccaccagacgctgcgccccgttaaagcgccaccagacgccgcgccccgtcccggcctcccccgcgcgctggcgcggggctttctgggccagggcggggccggcgaactgcggcccggaacggctgaggaagggcccgtcccgccttccccggcgcgccatggagccccgggcggttgcagaagccgtggagacgggtgaggaggatgtgattatggaagctctgcggtcatacaaccaggaggtaagcggccgcctgaggccggggggcgggcacggagggggtggggcagggtcgtgcgcgggtagcagggagggcgtgggtgaggcagaggctgtgtcagcaagcgtaggggacgcggcggggtgcggggggcaggtctgggatgcagtgttgcggggagagtgggggtgcacccgttgggtggcaggcgtgtagggatgggggcgagtgccgaccctgccatccgttctgagcagtggctgctgcctgagttagaggccaataggccgcccgcatcagcggacgcggatcctacccctctgtggatttgaattcactagttctctctgcagcactcccagagcttcacgtttgatgatgcccaacaggaggaccggaaggtgggtgctggcccaaggggtaaaggggcagggacgggtggccccaggaagaagggcctggtggagccgctcttctccctgcccacagagactggcggagctgctggtctccgtcctggaacagggcttgccaccctcccaccgtgtcatctggctgcagagtgtccgaa

SEQ ID NO: 6312 - DNA, 2300 bp, Homo sapien
cgggatctttgtttttttttgagacggagtttttgctctttcgcccgggctggagtgcaatggtgccatctcggctcactgcaacctctgccttccgggttcaagtgattctcctgcctccgcctcctgagtagctaggattacaggcgcccgccaccacgcccggctaatttttgtaatttcagtagaaatggggtttcaccatgttggcccagctggtctcgaactcctgacctcgttatccacccgtctcatcctcccaaagtgctgggattacaggcgtgagctaccgcgcccggccaactcttcaggatctattaaacttttttcttttttttttcccacaggtagataagagtcttgctctgtcacccaggctggagtgcagtggctcaatcatagctcactgcagccttgaactcctggactcaagggatcctcttgccttagtctcaggagtaactgggacaacaggcttgcgccaccatgcccggctaatttttaaatttttggtagagatgggggtctcgttatgttgcccaggctgctcttgaactcctggcctcgagcgatccccgtctcagcctccgaaagtgctggtattacaagtgtgagctaccacttcgagactcacttttcaccaacattttcagcagttgtgtcagacagcaagtcaatgtgccattatttacttaaatattcatccattatagggcatctgatacctaacaaccatggaccttaagattttttcctatgtagcctcagttcttagatgcaattactatggagacgggtacgatcacatgccagtgggagtattaaccgcacaacatttatgagggatcattaaagcgttaaatgcatatacttttggacctagcaatcccagtactaggaatttatgcaaacagtgaggtgccaacaaggttattcaccacagcatgatgcacaataactaaaggttagaacgtatttcaatgagggaatggtgaaataaacgacaaaacccccataagtgacgtccacagatcagcataaagacggaggccccggtgttggaacgcacgtaaactcccagacatgccgcaaaggaaacacggcaaggtgagaaagagtgggcgaggtgtcgacaacgaacacgcaagaagtgcttgtccttgcccaaaatacctcgaaaagaagaaactgggagctgctgccctcggctgcctccggaatgccctgggcacctcgggtctgggaggcctctgcaaggggcgcgccgggtccaagggctcaccgcgggccccatggctgcctctcagccccgcactcacatcgtccctgccgccaagcaccagccgacagccgcaggcctgaaacggccccacgcctcccccggcctcgacccgttcaactacccggccccacagccggagggctgccgcggcgcgccaaccccagaacgccatgttccgcgcagtccaaggagtcctccggactcgccccgcccccggcgccccggccccgcctccgcctcccacccccgcccccggcgccccagccccgcctccgcctaccgcccccgcccccggcgccccggtcccgcctccgcgccccgcccccgcctccttgccgacgcctccggcgcgcccaggtagacgtagaggcgagtagaggaagttccctagtctggtgtctcatctctcgccccggaggtcaaacctggagccagcatttctgtaccctgcgctcacacctttttcaacccggatggcggtgatagttaatactttctgagcgcttttactatggtcaggcattatatttacacctaatcctcgcaaaacactactgggaagatcctcatttgacaggagcaattccgggtcacaaaggctgacaccacaaagctagtccgtagcgggttcgaccacaggcgcccacactctttgacgcctcaatggcacagccaagtgcgcgggaagtgggctgcaaacgccggagagttttgtccggagcgcagagacgcgctgtaaccgagcaaccagcggggcccgcccccggcctgctacggcgctcccagcctgccccgcgccgctcggcgccggaagtgagtgagcatttccggcagccatccccgcggtgctgacatcccggttgttcttctgtgccgggggtcttcctgctgtcatgaaggacgtaccgggcttcctacagcagagccagaactccgggcccgggcagcccgctgtgtggcaccgtctggaggagctctacacgaagaagtgagcgccgagcagacgggccctgggccc

SEQ ID NO: 6313 - DNA, 2300 bp, Homo sapien
tgcatttctgataagggatactaaatccatactaaccagtctctacggtgtagcagaaagaatgctaaagcagatgtgataaacctgagttcttttcctggctctgctattgaatggctatgtcactttgagatcacttaacttctctaagactcagttttcccaggtatgaaatggagaacattaatctagattaactcaaagggttattgtgaggtttcactggaaacgagaactttggaatcatacatatctaacttgagatgctggctcttctacctattagctgagtatctcagggaaggcaattaaaatgagcttcagtttcctcctctgtgaaaaggatgaataaaggattaaataagctaatatttaaaacctcagggacagtgacatagcgcttcatccaaaacccaaaggctaatatttaataacgcagataaaatgctttgaaaattaccaagtgctatccaacacaaaccattatttgccaaacattaatttgctctcaaaaactgctaatagcagaaggctgctgaatgctaaacatcatcaaaacatgtatggaacatctatgtgaaaggtattatattaaatgctagggttaacagggaggttactacaggagatgtattttctatggaatagctccagcccaatgccagcaatttattctactcatattaaaaggaggttagtgcttagcaagaatttaattgctctgcaattcatcctgtttctaaacaaacctaaactttaagatctttctaggggcagaaagcccatgagaaatacaatggaaggtaaagacaatgggacggcggaagtggttgcaccccgtgcaaccagctgcagaatgaatagggaaaacagcaaagctgtactagcctctggtttatcaactccagaccatgagaaagataactgtagatacagttacactatgacaaggctaagcacgaatcaccaacatgtttcccaaagtgggtggtggccctgaaagtgtgtttgcttgttagatggaatcaagagctaaaatcaaaggctactcctgaaccgttttagtaagacccgaggtaggagttcagaagcctcagtctcagtcccccgttaaggaagcagtgaatctcagaccgaaacatcctggctacagctcttggccctcgtggtctgtcatccctcttattcctcgaccctgccactcaaggttcctcagcaaaccttgccggcacagccggtcgctacacgtccccgtttccccccaacttgggtctgggcgccctcagcccatcaagggtccgctcctccgcccgcctgccccctccgtctccctctatcgccggggcccagggcccgtctgctcggcgctcacttcttcgtgtagagctcctccagacggtgccacacagcgggctgcccgggcccggagttctggctctgctgtaggaagcccggtacgtccttcatgacagcaggaagacccccggcacagaagaacaaccgggatgtcagcaccgcggggatggctgccggaaatgctcactcacttccggcgccgagcggcgcggggcaggctgggagcgccgtagcaggccgggggcgggccccgctggttgctcggttacagcgcgtctctgcgctccggacaaaactctccggcgtttgcagcccacttcccgcgcacttggctgtgccattgaggcgtcaaagagtgtgggcgcctgtggtcgaacccgctacggactagctttgtggtgtcagcctttgtgacccggaattgctcctgtcaaatgaggatcttcccagtagtgttttgcgaggattaggtgtaaatataatgcctgaccatagtaaaagcgctcagaaagtattaactatcaccgccatccgggttgaaaaaggtgtgagcgcagggtacagaaatgctggctccaggtttgacctccggggcgagagatgagacaccagactagggaacttcctctactcgcctctacgtctacctgggcgcgccggaggcgtcggcaaggaggcgggggcggggcgcggaggcgggaccggggcgccgggggcgggggcggtaggcggaggcggggctggggcgccgggggcgggggtgggaggcggaggcggggccggggcgccgggggcggggcgagtccggaggactccttggactgcgcggaacatggcgttctggggttggcgcgccgcggcagccctccggctgtggggccgggtagttgaacgggtcgaggccgggggaggcgtggggccgtttcaggcctgcggctgtcggc

SEQ ID NO: 6314 - DNA, 2300 bp, Homo sapien
caatgttgtctgtgtgtgtaggtaaaaatgggatatttcctcaataaatgaagagatgtcctttttgtacatctgcatttgtgaaaaatttctctagatcttggtttttttggtgactggctatgtggtggtgaactgttgcggttctagattgagcctgttagaaggcgtaggttgttcatcctggcttttcggaagactgcagttatgaacctgggcgcacgcaattcccacccgagcggtaggtgttcatgcatttcccctctcaacacatttctttacgaatacagctcatctgtgcataactgtcattggtatgactgtttacacttgcagaaacatggatattattattgtctattttattgtgtgaagtggcctatgatgtgttctgtcatatgtcatgtttttatgtttctcaaataaatcccctttaaaaatgtaaatagatggccaggcgtggtggctcatgcctgtaaccccagcactttgggaggctgaggcgggcggatcacctgaggtcaggagtttgagaccagcctgaccaacatggagaaaccccatctctactaaaaatacaaaattagccaggtgtggtggcaggcgcctgtaatcccagctactcagagggctgaggcagaattgtttgaacccaggaggtagaggttgcagtgagcggagatggtgccattgcactccagcctgggcaacaagagtgaaactccgtctcaaaaataaaaaaatgaaaaaaaagtaaataaatatcttttaaataattttaaaattattttttccagaaatatattttcagaattttgatttttcgggatttcagcatgcagaattgtgtctctctgggctgtgatcagctcatgtctgggatgaggcaggagccttggtggggtgcagggagagcagatgagggtaggagcaggaccagcaaggcaggcagtggtcagagcactcaggccttgggggtgagtgaagcctgttggaggatgctgagcagcggcagcaacaagacctgattgttctggaagactgtctgggctgctgtgtggaggagcggttatggaggacaggtttgaggctggacttagggagggtggggagtcagcgggctcgatgtacacatgagtgtctgagggaaatggaggctcacactaagacatttggcctgagcagctgagaggggctgcggaaggttgaagggtgcaccacagggccttgggaacttgacagtgaggtgggtataaaggctagtggtcaatagatcccagcaattgtgactgacgaggaacagctggggtgtcaggccatctggaccagggccaaacgaggtctggagagggtgggtggaaagaccgagaggggtctggggccatgaggtcaggcgaggcctggacgaggtggaaaaaaccaggagctcagacaccagcaaccaaagaggaaaaggctggagaagatgccggacaactgttctttgccagcctagcagacttgtgggtgctttcctccaacaggagcaggccgtggggctctcacattcatcagcttcctggttcctggaggctgggtctcacccgacctggagagctgcaagagctccatgctgtcactgcaggcccaggactgaaagatcacattaaactgtccttccacctaatgttcactctgtgattctttgtgtacgtgcacctccactcccagacggggaacctcaaggtggtttcctttacatgcccagtcccagggatggctcatgtccgcactggggcacaccaggtcacagatgctggtggctatttgaatgatgagtggtgacaaggatgtggatggatgcctgtgtcggggcaggtacctgagagggctggagaagggagtggatacccctaggtctctcttgactaacaataaagataggaccagcgtcttcgttagtccttggtgctggattctgcccgtctactgtatgtgcagggaggagaagggccaaggctacccccaccgtgtcttcccaaggttccaactcatgctttttaacctccaggcacaggcttggcctggaagctaagcccaagaaaacagagccacaagaagaacaaagcagaggggtttattataggaacattctcaaaccgcaacggaaaagatgtccgtacaggtggatggggatggagatccacctcggagtacacagacttcagggggcctcctgcctggcacgttctttctctcccgtatcacctaagaccctgagacccccaccctctgcaggagagacccacaaagaagcctcc

SEQ ID NO: 6315 - DNA, 2300 bp, Homo sapien
agattctgtttctgaagtagtttgttaaggatttttcatgcctgtattcatgaaggatattggtttacagttttcttctgatgagtttgcctggttttggtatcagtgtcacaggcctcagagaatgagttgggaagcattcccttgagagcttttctttgtgggaaagttttttttccctgtaattagtaattcaatctctttacttgttataatttgtcttagtctattctcacattgctgtaaagacatacctgagacagggtaatttataaagaaaagaggtttaactagctcctggttctgtgggctgtacagacttttgcttctggggaggcctcaggaaacttacaatcatggcagaaagcaaaggggaagcaggcaaatattcatgtggccaaaaggacagagagagcaaagtgggacatgctacacactttcaaacaaccagatctcatgagaacttactcactattacaagaacagcaaggacgaaatccaccttcatgatccaatcacctgccaccaggtctctcccccaacattgggaattacaattcaacatgagatttgggtggggacacacagccaaactgttatcagaaagaggtcttgatccagacatcatggttcttggatctcatgcaagaaagaatttgagtcaaatccataaagagtaaagtgccaggcatggtcgctcacaccagtaatcccagcactttgggaggtccaaggcaggcagatcacaaggtcaagagttcaaggccagcctgaccaacatggtgaaaccccgtctctactaaaaatacaaaaattagccaggcatggtggtgcatgcctgtaattccagctactcaggaggctgaggcaggagaattgcttgaacccaggaggcggagtttgaagtgagccgagatcgtgccactgcactccgcctggcgacagaacgagactccatgaaaaaaaaaaaaaaaaaaaaaagagtaaagtgagagcaagtttattgagaaagtaaaggaataaaagaatggctattctataggcagagcagccccaaaggctgctggttgcccatttttatggttatttcttgattatatgctaaacgaggagtggattattcatgagttttccaggaaagtggtgggcaattctcagaactgagggttcctccccttttagaccatatagggtaacttcctgactttgccatggcatttataaactgtcatcgtgttggtgggagtgtcttttagtgtgctaatgtactgtaactagagtaatgagctgtgaggatgaccagaggtcactctcattgccatcttggttctggtggttttgggccagcttctttacaccattatcagcaaggcctttatgacctgtatcttgtgtcaacctcctgtctcatcctgtgacttagaatgtctaccctcctgggaatgcagcccagtaggtctcagccttattttacccagcacctctcatttccacatattaacccccccgttccacacactctcacatttggtcccaggggtctcgaacacccctgacgtccagcctctgcccgccagctgttcaggtcgggtggggaggctgcagtgcagacccctgcccggcgtctccctggagactgccttccctcccatatatggtgcgtgctgctggctgtcccccctgttccctctacctggaagtctttcctcacccctgccttcagagtctaacctctccccaggcctcagctgaaggcctggctctgagccagccacctccttcacacaacccaccttgctctgaagctgcctgctcacagccatgccccgatgccacacccaggggttcttggggaacattaatgggataaaggagtaagaaaatcaaaggtcaccaaacggagcccttaaagggcaatgctctgcgtgtgccacggtgcccaacagcatctcgtgccagctgagctgcggtgtgtggacccggggaatggaccgggctggacaacctctaagacttggctccagctcagcctgtgaaggaatcacctctctgatccccacctctgccccggagtgctagacccagggaggaagagaccccatggaccagccagaggccccctgctccaggtgagtgctggccccagggtggtcactgggaaccggctggtctcagccctctggggcctccacctcacccgctgacttcctcaggctctccacccttgtccacatccttcccccaccctcactcccaggctcaggagccaagcactgcctccccacagagggcatttgtgg

SEQ ID NO: 6316 - DNA, 2300 bp, Homo sapien
aaggcctatgatgcatcaacaagtaacaatgtaataaagattcagaggcggggcggataaatgctgcggaggaaagttaggcagaaccaggggctggtgggaatggatggagcgcagggtttcctgttgcatgaaacgggggtctgaggaagtctaactgacgactgggcatttgaaaacccgaaggagtgagggggcaagccccaaagaggtcttgagaaaaagggcttcaggcaattatgctgccagagcaagccaggcggggagcttggaaagctccagaagcagcaaggaagccaggtagcgacagcggagtaggggagggggaggagatgaggtcagggaacccaggcaggtgcaggaaggggtttgcgggtggagcttgcgtgcttggaaagctccagaagcagcaaggaagccaggtagccgcagcggagtaggggatggggaggagatgaggtcagggaacccaggcaggtgcaggagggggtttgcgggtggagcttgcgtgcttggaaagttccagaagcagcaaggaagccaggtagccgcagcggagtaggggagggggaggagatgaggtcagggaacccaggaaggtgcaggagggggtttgcgggtggagcttgcgtgcttggaaagttccagaagcagcaaggaagccaggtagccgcagcggagtaggggacggggaggagatgaggtcagggaaccaaggcaggtgcaggagggggtttgcgggtggagcttgcgtgcttggaaagttccagaagcagcaaggaagccaggtagccgcagcggagtaggggagggggaggagatgaggtcagggaacccaggcagttgcaggagggggtttgcgccgggtggagcttgcgtgaggagcgcttttggatcgtcctccgtgagttgggcgccatggctgccttctgggcagagtgcagggcctgccttaaatgttgtgggggttctgttctcaacaaaggcgtaagttgggagcgactgagccactccaggaggaggtgtgggcccacggcgtgttggaggtggagccacaggacctgtccataggttggatgctgtgtgggtgacagagagaaaccggggctcacggcctgggcagcgggacgggcggagtcgtcctcacctgtgctggggaccctgtgggagcagcaggcttccgagcacgtgctggaccccggcgtctccggctgcaccgagtggtcaggacattgaggccgggtcagggagcgtgagataccgggacgagcgggcccagggctgagcccagcggcgtccgggtgggcggtggcgttgagatgggaattgggaattgcaccggtggtctcaggaggatggaaaacccaagcagcagctgcaccaggaccgaggcaaagggaccgcagtttaacagaaaacccaaaacgagagcgagaaaacggccaaacacccgtgcgagtgagacgtccatgagccttcccggcaaaacgcccaataagggagaaggggcaggcgcggcgggggccggggttccctgaagtccccttcgtttccagaatccctaaagatcattccgccccccagggaggaaacccaagctccgccgagcgcggcgggtctgtgccttcgcttcgcttccagcctctcgcttccttctgacccgaccccgagttctttctccggacggtgtcgagaacccgggcgccggctggggctggagtctcgctggcctcggagcgcccccgagccctcgggcgacagcgaggcgaggacccaggtggaggcggccgggggcgcgggcggagggaggaggcgcgggagggaacccccggcccgcgggccccacccacagccgccccgggacgcagctcggggtccaggctcgagctttgctcactcagggcgcttcgtgcagggaacgccaggcccccggacgcgacccacgcggccgctgccagcggggaccgaggggagccggggccgcggccgcgagtccacgtcccgcccccgggcccggcccagcgaccgcccccgccgcccagggaccgcccccgcctcccagcgaccgcccgggccctcggggcggggaccgcggaccttcctggtggcgcggcagccgggcggctcctccttcctcccggccctggcgtggagcagagggacacaggttcccacgctggcgcccggcgaccgggtggggctgcggtgagtcccagaggcccccgccccgcagctcccggccgccccggcccgtccccccagcccccggtcgccccatcctccctcccccacccgcgcct

SEQ ID NO: 6317 - DNA, 2300 bp, Homo sapien
cgtttccagaatccctaaagatcattccgccccccagggaggaaacccaagctccgccgagcgcggcgggtctgtgccttcgcttcgcttccagcctctcgcttccttctgacccgaccccgagttctttctccggacggtgtcgagaacccgggcgccggctggggctggagtctcgctggcctcggagcgcccccgagccctcgggcgacagcgaggcgaggacccaggtggaggcggccgggggcgcgggcggagggaggaggcgcgggagggaacccccggcccgcgggccccacccacagccgccccgggacgcagctcggggtccaggctcgagctttgctcactcagggcgcttcgtgcagggaacgccaggcccccggacgcgacccacgcggccgctgccagcggggaccgaggggagccggggccgcggccgcgagtccacgtcccgcccccgggcccggcccagcgaccgcccccgccgcccagggaccgcccccgcctcccagcgaccgcccgggccctcggggcggggaccgcggaccttcctggtggcgcggcagccgggcggctcctccttcctcccggccctggcgtggagcagagggacacaggttcccacgctggcgcccggcgaccgggtggggctgcggtgagtcccagaggcccccgccccgcagctcccggccgccccggcccgtccccccagcccccggtcgccccatcctccctcccccacccgcgcctgccccagccgcctacacccccgagacccccacccgcccggcgccccggcagccccggactccctcccccatcccgcccagcgctccccccaccctccacacacgcccgcccccacgtgccaccaacagacgcaggtcccgaccacagagggtgggggcaagaccggggttgtggggggtgcgtttggaaagcagggttaggactggaattctaaggtagcaggagggagagacacactcaggggctcagctgggttcctggagatcaacctttggggtctgagcccctctgagagtcgagctcctttcctgcgaggccccgtctaggaggggcctcaggaaaatcggggctgcccagctggttccgcaactccccccagttctgagggaggcttcaggggattacagacggtctcaagagggaggcccagccagtcccgcggcccctgacaccccatcaggccgctcaggcccagcagctccatggaggacgccggcgaggaccccaccacgtttgctgcccactctctgcccagtgacccccgtctcttggccactgtgaccaacgcatacctgggcacacgagtgtttcacgacacgctgcacgtgagcggcgtgtacaatggggctggcggggacacgcaccgggccatgctgcccagccccctcaacgtccggctggaggcccctgcagggatgggggagcagctgaccgagaccttcgccctggacaccaacacaggtagcgccacctggcctgcctcacccctgccccaggcattgttccaggtcggtggggcaaccacagcatcgaatcccaccagcacctcctgagtttacacaggaagtctcactaagacaggaggccccagaggcccgcagggtccccccttccctccacctggaggcctcctgtgcagctgtagcgggaacgagcagccgagggcccagagggatccgcctcattgtggggagaggcagcggtcgggtggtccactcctgccccagagaggccatagcttggcaacccacctgccttcgcttctgcctccccaggctcctttcttcacaccctggagggcccccgcttccgggcctcccagtgcatctatgcgcatcgcacgctgccccacgtgctggctttccgagtgtccatcgcccgcctggccccggggagcgggcccatcacgctgctcctgcggtcagccttctccccagaaagcccagacctggacctgcatcagggtcctgacttccagggagcccggtaaggagggggctggatttgcagccagggagtccagggagggagctcatccctgaggcatggccacgctctcacaggtacctgtatggccacaccctcacccctgagcagcccggggggccacagcaagaggtacacatgctgtggacaccagcacccccagacctgacccttggggaaggtgaggaggctaggacgtgggacttcctgacagcagtgggcggcagccaggctgaggctcaggcctgcctcactgaggccctgcagctgcaggccagggg

SEQ ID NO: 6318 - DNA, 2300 bp, Homo sapien
cagacgcaggtcccgaccacagagggtgggggcaagaccggggttgtggggggtgcgtttggaaagcagggttaggactggaattctaaggtagcaggagggagagacacactcaggggctcagctgggttcctggagatcaacctttggggtctgagcccctctgagagtcgagctcctttcctgcgaggccccgtctaggaggggcctcaggaaaatcggggctgcccagctggttccgcaactccccccagttctgagggaggcttcaggggattacagacggtctcaagagggaggcccagccagtcccgcggcccctgacaccccatcaggccgctcaggcccagcagctccatggaggacgccggcgaggaccccaccacgtttgctgcccactctctgcccagtgacccccgtctcttggccactgtgaccaacgcatacctgggcacacgagtgtttcacgacacgctgcacgtgagcggcgtgtacaatggggctggcggggacacgcaccgggccatgctgcccagccccctcaacgtccggctggaggcccctgcagggatgggggagcagctgaccgagaccttcgccctggacaccaacacaggtagcgccacctggcctgcctcacccctgccccaggcattgttccaggtcggtggggcaaccacagcatcgaatcccaccagcacctcctgagtttacacaggaagtctcactaagacaggaggccccagaggcccgcagggtccccccttccctccacctggaggcctcctgtgcagctgtagcgggaacgagcagccgagggcccagagggatccgcctcattgtggggagaggcagcggtcgggtggtccactcctgccccagagaggccatagcttggcaacccacctgccttcgcttctgcctccccaggctcctttcttcacaccctggagggcccccgcttccgggcctcccagtgcatctatgcgcatcgcacgctgccccacgtgctggctttccgagtgtccatcgcccgcctggccccggggagcgggcccatcacgctgctcctgcggtcagccttctccccagaaagcccagacctggacctgcatcagggtcctgacttccagggagcccggtaaggagggggctggatttgcagccagggagtccagggagggagctcatccctgaggcatggccacgctctcacaggtacctgtatggccacaccctcacccctgagcagcccggggggccacagcaagaggtacacatgctgtggacaccagcacccccagacctgacccttggggaaggtgaggaggctaggacgtgggacttcctgacagcagtgggcggcagccaggctgaggctcaggcctgcctcactgaggccctgcagctgcaggccaggggagctctgtatacggctcacgcacaggcctgggcccagctctgggtagaatgtggcttggacgtggtggggcccctgcagctgcgccaggccctgcgtggctccctctactacctgctcagtgccctgccccagcccaaggccccaggatacatctgccatggcctcagtcctgggggcctctccaatgggagccgtgaggaatgctactggggccacgtcttctgggaccaggtgagcactgtacacccagcaccagccacacagcaggcgacacatggaggtccacggtctctgccctccctgggaccagggctatggttggggaagcacagggactgtggcaaaagggaagaggcctggaaggtgtgcaggagtttggtagaggagtgatctaggtgaggggaatggaaggtgcagagaccagagctgagagggcctgaggcactttccagagcgtggggaggggcctccaccaaggcgagaagggctgcaggtccagatcaccagcgtttgtagacagtagtgtggcgcttggagtttacctgagggccagtggagctccagggacctatcaggacggggacctgtggggactgggaaggcctgtggggctgcgtggagcccggtactggaggccgacgggggtgacggggacgctgagggcacagagcggaggggcatgatggctgctgggcgtggaggtgtcgagagtgactgtgctggggctgctccatcgttgtctgagcctcccggtgctgccgctgtggccgtttctttgatgaggctctcagaggccgagtcattcactgccagcctgaagctgcccatgcgcatattcgggctggagcctctgaggccacacaaacgccggctgggg

SEQ ID NO: 6319 - DNA, 2300 bp, Homo sapien
ggcgagaagggctgcaggtccagatcaccagcgtttgtagacagtagtgtggcgcttggagtttacctgagggccagtggagctccagggacctatcaggacggggacctgtggggactgggaaggcctgtggggctgcgtggagcccggtactggaggccgacgggggtgacggggacgctgagggcacagagcggaggggcatgatggctgctgggcgtggaggtgtcgagagtgactgtgctggggctgctccatcgttgtctgagcctcccggtgctgccgctgtggccgtttctttgatgaggctctcagaggccgagtcattcactgccagcctgaagctgcccatgcgcatattcgggctggagcctctgaggccacacaaacgccggctggggaggcgaagtgtggggctgagcaccagaactccaggagcgtctgggctggagacagaactgggtgggcaggtggggagggcctgcagatctgagtgggcagccgaggaggaacccagaagacgccagcgatggagctctgccggggcggaatgtggccaggaggggcgggagcagtgacggcctgtccggcgctagaacgagggaccgtgctctcaggacctctggatgttcccgagtatcctgatgttccacccagaagccgccagggccatcctggagtaccgcatccgcacgctggacggggccctggagaacgcccagaacctgggctaccaggtgaggggacctggggcactggcccgtagggccctgcagggcctgcagcccccacacccctcccaggcctgtatccctctccccaggccccctctggacaaagctgggacatcctagattccccaccctgaggcttgtggggcctcagcagtgccctgcagcccgcacctgagagagaggaggtgggaaccgcagcgggctgggaccctgctttggcccaggaccccctggggtgcccttgctgccctgcaccagggtcagcactcggtgagaactgggcagaagccacctggccccgtgaggacgtgcagtgggccttctagcagtagcacccgccagggtacctggcgcaggccgagccccccctcctccagggcgagggcacgggaaagttggggggccaccgctcccctccaacaaggtcaagtctgccccctcccaacccctcagggagccaagtttgcctgggagagtgcagactccggcctagaggtttgccctgaggacatttacggagtccaggaggtccacgtcaacggggccgtggtgttggccttcgagctgtactaccataccacccaggtgaggtgctgcgtgcccaccattcctgcaagtgtggccaggcagctggtgtagcccccactcctcgtggcttcctgtttggggctggtcctgggaagctggctgaggacaggtgtctcaatgccaggccttgcttctgggcacagacaggccactaggaatgagagtgactggggccctggcctctgtgcctcctcctgctccccaggacctgcagctatttcgagaggctggtggctgggacgtggtcagggctgtggccgagttttggtgcagtcgtgttgagtggagccccagggaggaaaagtaccacctgaggggtgaggccatggtggggaggggctcggggaggaagggtggatgctcccagactcagcagatgattttcagacacctcacgtgtgccagccccacgctgaccaccggcgtggagggaaggcctctgagactctgcactgagcaccatcttggacttgtgtgtccaggagtcatgtcccccgacgagtaccattcaggggtcaacaactctgtgtacaccaacgtcctggtccagaacaggtcagacacaagatcccctcacctcaccccacccccgccccagctggagacctgccccggtgcccccactaggcaggcagcagctggaagtgtaggggttgcagcctcccccacctacctccacctccagcctgcgctttgctgctgccctggcccaggacctgggtcttcccatccccagccagtggctggcggtggctgacaagatcaaggtaccctttgacgtggagcagaacttccacccggagttcgatgggtatgagcctggtgagtggaccccttcaagggctcctcccctgccgtcgagaccctcgagtctgtcctggaacaccttccagtcagcggcacctccctgtaggagaggtggtgaagcaggcagacgtcgtgctcctgggatacccagtccccttctccctgagtcct

SEQ ID NO: 6320 - DNA, 2300 bp, Homo sapien
ttgtcccgtctttccagactgcactaatgagcgtcgtgcatatattgatgtccatgtctccctgaaatgtataaaaccagctgtgccccgatcatcttgcgcaccctgtcaggacctcctgaggctgtgtcacccgctcatccttaaccttggtcctaaatcgactgagaactttctcagatatttagggtttacactgtcatgtgacgctgtaccacagtcagttggaatttggtaccttattgctacgaagagtctgttttgtcagtactatgagctccatctcagtgttaatgctggtcggttgtgcctaaactccacagggaggggatataagtaggcctgtccaacctccctgtcccttcgaggctgtgaattcagtttttcaggtttgtttgggacccccttggccaagggagctccattcagtcatgggggcaggggaggcttagatttttatttttggttttcagtcagcactccagtccagtcaggagggcttcagaccacgaagaggggaggtgtccccacggcagagctagacacagatcccaggacattctgtgtgtgggggagacatggcccagaatagaaggcctgtagaggcctggacatggctaagcccttagagctcaccccagccagcagaaggaggaggacttagggtgttcgacgtcgagaagcactgtgagtcgatggtagacacagccattgttaaagttaaatcttaggaatcttagaaattatcaataaaatttatcttatagagccaaagtcatcgttactcaaacacatcactctgcagttacacggctgcacgctaccgtcatgtaaactctggaatactgacgtggacctgaccacccgctgaggtgaaaggctacagcagggtgagcagctgcccatctctgtaaattccaccctcagcgatgtcctctgcggagtctggcctggtgggagaataagcccaggaaaatgggcccatgtagcacatcaggaattaaacagggcgcaggtcgcggtgcacataggcctgcaggccacgttcctgcccctgtgacccgcactgtcccctctgacaagctcaagtgcacagcatcagctctgtttgctgcaatagcctctgccaaggaaggtccaggaagaagcccagaggccacacaaggtgtttccacagggaggctgtaacctcaggagctgctcagaggcagcaccggttcatgggaaaaacaggcggcaactacaggaagcagctggcacccgtgtgaggacccagggaagaggcagagatgatcagaacctggaaatctggagggtgccccagggaccagccagccagagctctgggcagcgtgggtgctgctgggctgtgtggagcgggtctgggagccgtcacccaggtgggcctccaggggaaagggccatggcttctaactccaccgtccaggtctctgctattggcatcccacagccccctcttctgtcagtgctcccagagtcccctttcctgggcctggagggctcctttggggcaggcaacattggccgccaaccctctgacctgcaccaggagacacggggacctttaacccccaaacccgcatggagcaggactgcaaccccagcaaaggacaagggatgtcagcagatgaggcctgtgacaagtgagatgagggcttttttttttttttgagacggagtctggctctgttgcccaggctggagtgcagtggcacaaccttggctcactgcaagctccgcctccccggttcacgccattctcctacctcagcctcccaagtagctgggactacaggtgcccgccatcacacccggctaatttttttttgtatatttagtagagacggggtttcaccgtgttagccaggatggtctcgatctcctgacctcatgatcctcccacctcagcctcccaaagtgctgggattacaggcgtgagccacggcgcccggcagaggtgagggctttggggaaacggttgtggggcctggagtgtggaggcgtcagcgcaggcctggcaggagccctgaaccgggacagtgaggtcctgcagctgctggcctggggtgtggagactcccaacacaggggaagtctccaggaccccacaccactaacaagatgagacttgtgctcctttgggctctagagaggaagcccctcttagccctcagcccctctttcctccctctcctaaagtaatttgatcctcaggaatttgttctgcccttatctggccctggccagctctgcatttgacaaatgccaggaagaggaaac

SEQ ID NO: 6321 - DNA, 2300 bp, Homo sapien
gtcttggggagtcgaagctgtcttcccaaccctaacccagctcctcggtgggggccacaggaccacatgagcaagattgtggatttaggtggtgccagctgatccattgagtacagggtctgtaaagtatctcaaactctgatcctaggttctacagtagtgctgtgatccccgggagcaatttaggggtggcggggtcagaatcttgcatcctccagccgcgtgactcctaaaccataatttctaatcttgtggctaatttgttagtcctgcaaaggcagtctggtcctcaggtaggaagggggcttgttcagccttgatctataaactgtttctctccagattagtttaggctaagcccagggatgagcaagggcagcttggaggttagaagccaggcggagtgggttagggtcagacctccttcactgtcatcatattctcagttatgacttttgcaaaggtggtttcagttccatgcctgcccctcagaatcctgtctccctcttgtgccctgcagtttcttccttcctaaactgcccgtgatttaaagaagcttccaaaataccttccacgggaaattcaagccccaccccactccgcagtgatgtgtggcctttgataggaggtcacagagccttgtgaggagtttgtgtaggcagtcctcgatgtctcagagcacgctccatccacatccacccctggcttgccgggacccagacatagtttggtctaagtggcctgggatgtggctggggctggaggcggcctgttgaggggtgggtggagggtgggggggttggtgtgcgatttggggaggcccagcagggactccaagcaagggcaagggctagttctttttttttttttttagctgcaatgggtagggaggggctgatggttttggagctcggtgtttgagatgttaagtctgctgatgctcctggccgaataaaggccaaataaagccctttctttcctcaactcgatgtctgagggttttgtctgtggctcgtcctgctacaatttctaacgttaccagtaattttaaagctagcttattaaagattctacttaagtcacatgaacgtgaaaagcatttaggcttattatttaatttatgagtactctttaagtttaagctaaatttggtaacttgtggccaaaaacacataacgaaatatgtgtatgtgcacatatacacacatacacactcaagcaaaagtatggttttacttcagaactccagccatgagatagtaatacaaattcattggtttacacaaacaataaaaagaaatggttggatgcaaacagtggattttatctctgtagaaaagtaacagcagacttaaagcaggcagaaacgaaagcagaaagagaacttaagaacattacattaataattgcaggcccacctttgggctctgatttttcctttatgtaatttgcaatttgtaattcatgatccttgtgcctgagggctcccttctgctactcagtctacaattccccgtccctgtgaaggggcacccaggcctgacagccccagacttggctttgccaaccctccaggtctctcctgcatggctaggacccaacgcctaggtcatccagcactcaccccaaccaaagccatgggaattgctgggacccggaaggtagggggtggcacatgtgtgccctgtgctctgaagctgcccctacaggccctggaatcctccccgtgtctcaacacactaccctctggggagtcagttctccccagagtccccgttcctgggcctggagggctgctttggggcaggaaactttggccaccaggcctctgacctgcaccaggagacactgggaggtttagtccccaaacccgcacagagcaggactgcagcctgaggaaagagcaaggatttcaggagagaggcctgcgacaagtgaggtgagggcttttgggggattgtcctggcgcctggagtgtgggggcctggcaggggccctgaaccgggacagtgaggtcctgtacttgctggcctggggtggacagaacccaagcctgggtaaaatccccagggccccctaaacccaacacttaggaagtcactagtcctgacttgagtttctgatgaggaagcctctctccttagccttcagcctttcctcccaccctgccataaagtaatttgatcctcaagaagttaaaccacacctcattggtccctggctaattcaccaatttacaaacagcaggaaatagaaacttaagagaaatacacacttctgagaaactgaaacgacagggg

SEQ ID NO: 6322 - DNA, 2300 bp, Homo sapien
ttgggaggcggaggctgcagtgagccgagatcccgccacgcgccctgtcctgtgcgacagagaactctgcgtctcaaaaaaaggggtttaataaaccccttctgtcctcgagctgagtcgcccctcccgggtggggccgcaggagctgtcaggtccaaggggagccatgggagtcaggcacgcaagaaaaagggggggaatctcaaaaggccaatcttaagctctaaattatgtggacgaaaagagtcgaactctgtaaaatatttgaagagatttattctaagccaaaatatgagtgaccgtggctcgtgacacggccctcaggaggtcttgagaacatgggcccaaggtggtcggggcccagcttggttttatatattttaggaagacatgaggcatcaatgaaatacatttaagaaatacattgaaaaaaaaatacattggtttggtcgggaaaggcgggacaacacaaagctggggggtgggggggcggcgcagtgccccaggctacaggtgaatttaatcctctggttgacgattgagtccttgagtttgtctaaagacctgggattggtagaaagggggtgttcaggttaaaataaagattatggagaccaaagttcttttgaagtcttatagtggctgcccttagagacaatagatgacgaatgtttcctattcctaaaaggtgctagactgttaatctcttcaggattgggagggtctggaagaaaaagatttagctatgttaatagagattctttacagctgcaaatttccccctacaaagaacagctttgccggggccatttcaaaatatggcaaagaaacttgttttggggcaaaatatttttattttcttcctcatatcgtaatgttctgccagggccaggttggaaagtaagtcatgatatacgtggttaaataaaacccatctgatgagaatttatggtttgtagggcatgactccccaagccccttaggtaggaatttgggcaagataaaaaatcagagtttagtcctcaatcatgatgagctgctgagtttcacacaaggcctgttgtcatttaaactatagcctaaatgtctctcaaagtcagcttggccccaaaaaccaggaataattaaaggaaaggcaagattgtgggtgggctagctcagctcacagttataataattcttctcactgatactgttacagcaggtagctcctccggcttgagcaggacaggagagcgcttcccacccacaaccaggaatgtcaggcgacccctcaggtgatggtcaggtggttgttgcactgtttctctaaaataataattggtagcaaccagcgccaaggaaaggcagtctcccagtagatagaaaaaaacctgaaacgtggtcaggtttatccacaatcttgctcatgtggtcctgtggcccccaccgaggagctgggttagggttgggaagacagcttcgactccccaagacttcatctccaaccggaccggtcagcgctcctgactcactggccgcctacccaccatatcatccttcgaaactcggatccccacgtttttggggagaaggatttgagtaataataaaactcccgtctcccccgcagccggctctgcgtgaattacactttccttattgcgattcccctgccccgatgcgaccaaggggcccgcccaggagcgcagagaaaccattaaggggtcacaggaccgggctcccagggtgactccctggccaccaagtcctccagcaggtcactcctggattccggctggaccccctgcccagggaggggcccaggagacgcggaaatcgggtcccccgcgggtgaaggggaggtgggagccccagaggagggcgggaaggctcggccggggacgtgcccgagggggaggagaggggctcccgtccgggtccggcgctgcgggtctcagggtccgcgtcccgcccaccccgcgggggtctgggctgcgggcggagcctcctccgggacctgcacctgcgccggccgccgccaggggcgccgctgagcacccgcctccgccgcttccccctccccgccgggcggggccgcgcgcctcccacccgggacccacttcggagttcgcccccttcgggactcgcctccgggagacccccgagggggagagggcgcttcctccgcgtccatcgcccttgccgcccctggggtgagagcgcggctccggggctgggggcgggaaagggtggggagggcgagtagatccagacctggagtcgcgggtggacggcggggcgggggcgcgcatggccacc

SEQ ID NO: 6323 - DNA, 2300 bp, Homo sapien
tacaaacacaaaaagtcagccgggtgtggtggcagacgcctgtagtcccagctactcaggaggctgaggcaggagaatggcgtgaacctgggaggcggagcttgcagtgagccgagatcgtgccactgcactccagcctgggcgacagagcaagactccgactcaaaaaaataaataaataaaataaataataacaataaaaggcctcagaggggaagggaatgaggcaggaaattaaataaaattaaaattaaaaagaaagagaaataggttttcctgtatcaggctgactcgtcccggaggcagcagcagacacagctgagacccaggaaaagtcctgataatattatctaatgtgctctgagactctcccagcactcccttaacacagggagaagaaaaaacaaattttcctttgtttttggaatgagtttatagattcctgttctctgtaactagtgacttcaagtattctgttttatctaagaagtacagtgaaggtcatgagacgcctgagcaggcctgaacgccagctgcctgggcaccatagtgaaggtaatgggataatccagctgcctgggcaccatagtgaaggtaatgggataatccagctgcctgggcaccacagtgagggttatgggataatccagctgcctgggcaccacactgaaggtaatgggataatccggctgcctgggcaccacagtgagggttatgggataatccagctgcctgggcaccatagtgaaggtaatgggataatccagctgcctgggcaccacagtgagggttatgggataatccagctgcctgggcaccacactgaaggtaatgggataatccggctgcctgggcaccacactgaaggtaatgggataatccggctgcctgggcaccacagtgagggttatgggataatccagctgcctgggcaccatagtgaaggtaatgggataatccagctgcctgggcaccacagtgagggttatgggataatccagctgcctgggcaccacactgaaggtaatgggataatccggctgcctgggcaccacactgaaggtaatgggataatccggctgcctgggcaccacagtgagggttatgggataatccagctgcctgggcaccatagtgaaggtaatgggataatccagctgcctgggcaccacactgaaggtaatgggataatccggctgcctgggcaccacactgaaggtaatgggataatccggctgcctgggcaccacagtgagggttatgggataatccagctgcctgggcaccatagtgaaggtaatgggataatccagctgcctgggcaccacagtgagggttatgggataatccagctgcctgggcaccacactgaaggtaatgggataatccggctgcctgggcaccacactgaaggtaatgggataatccggctgcctgggcaccacagtgagggttatgggataatccagctgcctgggcaccatagtgaaggtaatgggataatccggctgcctgggcaccacagtgagggttatgggataatccagctgcctgggcaccatagtgaaggtaatgggataatccagctgcctgggcaccatagtgaaggtaatgggataatccagctgcctgggcaccatagtgaaggtaatgggataatccagctgcctgggcaccatagtgaaggtaatgggataatccagctgcctgggcaccatagtgaaggtaatgggataatccagctgcctgggcaccatagtgaaggtaatgggataatccagctgcctgggcaccacagtgagggttatgggagacggggtttcaccgtgtcagccaggatggtctcgatctcctgacctcatgatcctcccacctcagcctcccaaagtgctgggattacaggcgtgagccgcggcgcccggcagaggtgagggctttgggggaacggttgtggggcctggagtgtggaggcgtcagcgcaggcctggcaggagccctgaaccgggacagtggggtcctgcagctgctggcctggggtgtggagacccccaacacaggggaagtctccaggaccccacaccactaacaagatgagccttgtgctcccttgggctctagagaggaagcccctcttagccctcagcccctctttcctccctctcctaaagtaatttgatcctcaggaatttgttccgccctcatctggccccggccaaatcccgatttgacaaatgccaggaaaaggaaactgttgagaaaccgaaactactggggaaagggagggctcactgagaaccatc

SEQ ID NO: 6324 - DNA, 2300 bp, Homo sapien
gggaaagcattagacgcacagccagacagatgcacatagaaaatatgggacttggagaaacagaatgagacacataaaagagcaccactggccgggcacagtggctcacgcctggaatcccagcactttgggaggccaaggcgggaggatcacttgagcccaggagttcaacgccagcccgggacacatggtgagaccctgaatctgttaaaaaaaaaaatacaaaaaattagtccggcatggtgatgcatgcctgtagtcccagctcctcaagaacctgaagtgggaggatcgcttgagcccaggaggtcaaggctgctgtgagctgagattgcaccactgcactctagcctcagagacacagtgagaccctgtctcaaaaaggggtggggcactatattttaatgaatatgcagataacagaaatatgaaaagtggactgcaggaggcaggagatgaggagctgatggggtgggggaaggtttgagagaccgggtgttgtttaagggccggtatgaacagcaggatgtaaccagcttgcttctgtgctcagaagttaggggaggaggatggaggggaaggagggaaggagttgaggtcttaagaaggcaacttctgggcaatcttccattgtgaggtggggtccacgtccccacaacccacgaacttgggtggccgtgcggcatgtggcaaacctgaggggtgactccaagatgcttcactctgtgtgctggaccgggaggctgcccctggcagctgagcctgcaggcgctctggccaaccacccggggtgagcccagccattcctgccgagggtgcactggcttggggcagaagtctctggatggctccagcctgtcccgcggagccggccccaccactcacgtcttcccaccggaggccagcacctcgaggagcagagaggagctgtccccgagtgccctgagttcctgacccacaggacacaggaacacaggaacgctgctgttggacagcactgaagctgggcggtttgctacacacccagagacagctgagcagacagagggagaagagtagggtcacgctggcagctggacaagggaagtactggggggacagagggactggcaggggttggtgcagaccaggtgagaaagggcacgaagtgggacaaggtcccggtgagaggcacgacactgtcacctgcctcaggccgcgctcggtggggcgggggccaccagctgaggcccctcctgccgcccagacagctcggccccctgcggccccagccctgcaggctgagatcccgcaacgactcccacccctgggctgaagccggtgcttgggcccccccgccccccggcctctctcgcccgcccccattccccgccccccaggaccccgggtccctcccctccctcctccgtgttgtccgcctgcagtccttcgggtcactgttctcgggaggccgccccgccccacagtcaggctgtgcccatcccccgccgccccccacggtccccgagccccagcgcttcccagccccgcgtctgtgtgccgcgcccccgcgctccgtggcccaggtggacgcgcgccccgcgccccgcatccctgtccgtcccgcacccctcaccccccgccccgcaccctccgcaccccccgccccgccccgcctcccctcgccccgcctcctccgccccgcaccccgcgccccgccccgccttcccgcgccccgcacccctccccgcgcgccgccattggctccccgcggcctggctcggtccgattggttccgcgcgcgcggccggggcccgatccgcggtggcagccgtggatgctgttcggtcccgccgccgccccaggagcgcggagccgggagcggccgggcggggggcaccgcgaggagccgcccccgccgcccaccccgggcccgcggccgagggcggcctgggggggtcgcggccgcacccggtggccgcgcacggcggacaaaggaccatgcggggccgcgggcgctgagcgcggcggggcgggccggggatgcggcgcggggcgggcgggggccgggggctgcagcggcgccgctgagcgcggcctggggcgggcgcggcggccgcgatgccgcggctcccggtgaagaagatccgtaagcagatgaagctgctgctgctgctgctgctgctgagctgcgccgcgtggctcacctacgtgcacctgggcctggtgcgccagggacgcgcgctgcgccagcgcctgggctacgggcgaggtacggcgcggggggcgcggggggcgcggggggcgggggcggcgcgggg

SEQ ID NO: 6325 - DNA, 2300 bp, Homo sapien
ccaaaactgtgcctggcgggcaccacgcatcctcagggaggcgccgcagctctgggggggggcacccacagccctctctgccaaggggaggagggaaggtgggcagagtcggccctgggggccctgcaggccgcggggtaccggcgttcccatcatagctccagccgcacggaagccccttcactgagtcctcttgtgagcccttcggcctgactgggctgcagaggccctccaggctggcttccccctcatgccgcccagcctggcccctgcagggccccaggtgggcctggggtggacctgggtgcagggcgggacccagcccatgccaggcacatacctccaggcccgctctgcgccgcacaaacttgtctcccaggatttttccacacgaaacctgtctcccagggaatcagccagtccgatgagctgggcgttcccaccccgccctccgaggcccccacagtcctgtccccgccgcagaggctgccccgcacgcgccgggccagggatggagtcctggacacctcggccgtcagcagtggcctctgggatgagctgggaggctggcgggatccggaccacgagccgggtaggtctcccaccccttccccaccaccccgaccccacctggtggccccagcccgggcctcacccatcctttcagtggaccttcccctccccctttaaccccccacgctgacctccgactcctactctccagcttcctcccctcagaactgacctcacccttaatgctgcctcctaaccctgacccggccctcacgccagacccctgccccagccccattaaggcaaaaatcttccagggacggagctagggggcaagggtctgccctggaggagagcccagagccagggtccagggtccagggagaagcagaggctgtccgatgagctcgtgagagaagcccagaggttgtcatagatgttcagctcccacccccagccctcctaggcttatccccacccccatctaccaggggcttgtcccagaggctagagggcctcagagcccatttgctggctgtggtgctagaaggagaccttctgggcacaagccctgcttggtccagggcccccccaccaggggccccccactaccccacccccaccaggggccccccaccctcgctccctctccatccaggcctctgctcttccagacccctggttcttccctgcacacccgctcctgccccagcctgacatgcgctgacaggagtgcaggccctctgagtcaaccccctggggcggccccgcccccctgcaccctgactcatgtgctgggaacggcctcccaccccagggcctggggtgcaggagcagtggtgccagggtcccagaagccagagagggttttggaggcctctgtagggggtgagggggtcctgggggtgagttccagggtctgcaggcttcgggggagggccggtccatccacatgcttcctggtgcggagggggctcgctggattccaaggaccagggccagggcctccatggagtcccgttggaccctaaagctctgtccctccagcctttgtcctgatccctggcactgacccctgactcccgacagtgtctcctgccaacccttcctaggcctcatccccacctcaccaggaaggctgggctaccatggaggctggctgattcttggagctacctagggccctagacccccagggactggggcaccctccccttcatgctgggggtggcaggacataggccccccgcaggccccctgcccttccctgacactcaggacacagagggcccctctgtcccagccccacgacaaagggcccggtctggcctttacaggctgagaacaagaaggacccaggtccccgtggccctgttgtgggatgggagaaaaggaggcgggaggccaggctgggacctggggccatgcagggcctgttcttccgcccaaattccaccttaagcaggcggcggcccctccctcccacctggccaggtgtccccgcccccagctgcgctcagggctgggcaggcgtctgtcttcaggcggctctgggtgaggctggctgggcggggacttcagggagagggcctcgagggacaggacgtgaagatagttgggtttggaggcggccgccaggcccaggcccggtggacctgccgccatgcaggacggtaacttcctgctgtcggccctgcagcctgaggccggcgtgtgctccctggcgctgccctctgacctgcagctggaccgccggggcgccgaggggccggaggccgagcggctgc

SEQ ID NO: 6326 - DNA, 2300 bp, Homo sapien
ccccgactgtatccagacatggtcagagctgggcacctcccccgactgcatccagacatggtcagagctgggcaccccccccgactgcatccagacatggtcagagctgggcaccccccccccccactgtatccagacatggtcagagctgggcacccccctccccgactgcatccagacatggtcagagctgagcaccccccccccccgactgtatccagacatggtcagagctgggcacccccctccccgactgtatccagacatggtcagagctgagccccccccccgcccgactgtatccagacatggtcagagctgggcaccccccgactgcatccagacatggtcagagctgagcacccctccccgactgcatccagacatggtcagagctgggcaccccccccccccaccgactgtatccagacatggtcagagctgggcaacccccaccgactgtatccagacatggtcagagctgggcaccccccgactgcatccagacatggtcagagctgggcaccccccgccgactgtatccagacatggtcagagctgggcacccccctccccgactgcatccagacatggtcagagctgggcacccccctccccgactgcatccagacatggtcagagctgggcacccctccccgactgtatccagacatggtcagagctgggcacccccctccccgactgtatccagacatggtcagagctgggcacccccgccgactgtatccagacatggtcagagctgggcaccccccgactgcatccagacatggtcagagctgggcacccctccccgactgtatccagacatggtcagagctgggcaccccccccccccgactgtatccagacatggtcagagctgagcacccctccccgactgtatccagacatgttcagagctgggcacccccccccccgactgtatccagacatggtcagagctgggcacccccctccccgactgcatccagacatggtcagagctgagcaccccccccgcccgactgcatccagacatggtcagagctgggcaccccccgactgcatccagacatggtcagagctgggcacccccctccccgactgcattcagacatggtcagagctgggcacccccctccccgactgcatccagacatggtcagagctgggcacccccgccgactgtatccagacatggtcagagctgggcacccccctccccgactgtatccagacatggtcagagctgggcacccccgccgactgtatccagacatggtcagagctgggcacccccctccccgactgcatccagacatgttcagagctgggcacccccccccgactgtatccagacatggtcagagctgggcaccccccgactgcatccagacatggtcagagctgggcaaccccctccctgactgcatccagacatggtcagagctgggcaccccccccggctgtatccagacatggtcagagctgggcaccccccccccccgactgcatccagacatggtcagagctaagcaaagccccccgccgactgtatccagacatggtcagagctgggcacccccaccccaactgcatccagacatggtcagagctgagcaccccccaccgactgtatccagacatggtcagagctgggcatctcccatggtgtaggttacatcactcacacccctgccccaaggccaggctgtgtctctggcactgcagcaccccctgcagtggcagctctgttgaaggggacagccaggagtgaggccaactgccatgtcgggagacagggtcccacctagtgttcgtccactgcaccctggggccgtcatggtggccccagggccggtggaggtgatcctggacttgatggcccctccccgtggtcctgggctgcgtgaagtggtgcccattctggccacgtgtgaggggctcaaagagacaccctgctggcctccgagaactctgccagcatccatgcggctgctcagggtcgcatctggtcagggccagtgctgtctgtggccggcagttactggttaactcatcctgttcctgtttaacttgttccctggggatggcggcagcctctgacctgtccaggtgccctgtccagctgactgcaaggacagagaggagtcctgcccagctcttggatcagtctgctggccgaggagcccggtggagccaggggtgaccctggagcccagcctgccccgaggaggccccggctcagagccatgccaggtaggcaggtcagagagggatgggcttgaattccccac

SEQ ID NO: 6327 - DNA, 2300 bp, Homo sapien
cctgggagaaactggccctaccacagccaagccctgggggatccagaccctttctcctgggaatggctggacctgttggtacccctggggctttagtgaggctggggcctgggggtggcccctgccctgcgcccactgacggcaggccctgggctggaggtcagggataactggccaggaccgcagttgggggtgaagttcccagacctggctgcctcctgagtaggccctgccagaacggctccctcccgatgtgaggttccgcatgtcctcttctgatttatccagctctctgacctcgaggagccaccaaactgcagactgggtccccagggccagtctctggcagggaaagtggctggtgatgcccagagtccccacagtccccacaaggcccccggatgtgaagatgtgcttggcccgggagccccgtcccactggacgcagtctgtggcgtggcccccacctcactgtttgctccacaacgcaggctagaagcactctggggcctgaaggggccgccctggaagcccaccccaccccacactcctctcccctctccccagctgcctcaagggctacgtcaaccacagcctgtccgtcttccacaccaaggacttccaggaccctgatgggattgagggctcagaaaacgtgactctgtgcaggtttggaactccccatcccccaagaatgccctctgaactcctgacccctgacctcaggtacttccttaccccagatacagggactaccgcaatccccccgattacaacttctccgagcagttctggttcctcctggccatccgcctggccttcgtcatcctctttgaggtgagccagaaccgggagaggcctcggagtgggtctgggcagtgctctccccagtccttctccccggccctgaacccccaaatgccagctggcacctgaccgtgctgggcctctcctgtgctgccgctagcacgtggccttgtgcatcaagctcatcgccgcctggttcgtgcccgacatccctcagtcggtgaagaacaaggttctggaggtgaagtaccagaggctgcgtgagaagatgtggcatggaaggcagaggctgggtggggtgggggcaggctctcggcccccaatgcctgcccatcccaccccagcatccatcttcagtgccaggagcacagacgtgtagggccagagcccgtccagaggccaccaggagctgagacagtgccaccaccagcacctcccacaagcccaccgctgtgcgtgttgaggggtgctgtgagaaggctgtgcccatgtggggccgcaggaatcccctgtatgttcagggctgtgagctgccaccctattccgcctgctccgtctttgtgggggctctcaggcttggcacagccctgacttgaactctgggtgaccctgggcacccacagaactgggagtgagggctcctcaggcagccacaaggcaggaaaactggcgcaaatttcctgggcctccctctgacttctgggcgccagatcctgccgtgcccccatcctggctgttgggggtgtcctgagcccacctcgctggcctgttcccttcagccaacccgtttctgcagtaaaattaagcctgtctgtcttgctttcctggcctcgctgggtcccgggtggattatatctgccctcagggctagatgggaaacagacccggagtgtggaacgtctggaaccaggtgaggccgcctcaggccgcctgtcccttctccagttttccatgggcttccaagggaggggcgcctatggggtcctctccccgtccctgcacctggggtgttgagggaggcaagagaagacatcggggccacttgagggtggggtgggggtcaaggcaggcttcctggaggaaagggaagagataggggcggacgcgcaaaaccttgagggcggtggacgctccgaagagtccccaaggctctggggctccggggctctgcgcgctggttgggctggtttggccactggccccaggcccgtgcggcagcggctcccgggcagcagcgcagcctccagcgccagccttgggcgcagagcgggacgctggggtccgcccccgccctgactgcggggcggggccgcacctgctgccgctgccggggctacgccgccgccggggctgttgccgctgcgcacctggctcaggtgagctgccccgcccccgcccggcgcgagccccaggtcctggcagcaggtgagtggcggtcgccatcagacccgcgaaggtgagtggaggtcgcagtcctcccagagccgctgcagg

SEQ ID NO: 6328 - DNA, 2300 bp, Homo sapien
ctctgactacaaatacatcctccgttttcttatgggagaacgaggttctccctgcaagtctttcatgctccttggtagttttatagttttcttcatttaggccccacagatgccttgtgagtttcagtctcgttatggtataacttgtgctggtgtctgcgggtgaccgatactttctcatgccatgtttccccgcagctttgccgcacacggaaaagccagttctgctggatgctcgttttgtatccacttgagcactcgattgatttatccacccaggctttcagttgttttattttgattttccaggtacataatcatgttttctaaaagagtcatttttttctttgcaaatgtatactatttatacttcatatttctcttgcttatttgcaaggaattccagaaccgtgttaaataccagttgtcgtgagctacaataggaatgcttttgggatttcaccactgaccatgagcctgacttttggtttaagatagttcatgtatttctcatattatggaaagcaggtgattttaaacacaaaataacccatcgtgccgtttccacggggagaaaccgaggccactcgtaacagacactgtctggagcgtgtgttggagcctgtggccttgcctgtgtgtgtgtgtgtgcgcccacgtgcaggtgcggttcgtctgggagcctgtggcctcccctgtgtgggggtgtgtgtgtgtgtgcgcgcgcccacgtgtgggtgcggttcatctgggagcctgtggcctcccctgtgtgtgtgtgggtgtgtgtgcgcccacgtgcaggtgcggttcgtctgggagcctgtggcctcccctgtgtgggggtgtgtgtgtgtgtgcgcgcgcccacgtgtgggtgcggttcatctgggagcctgtggcctcccctgtgtgtgtgtgtgtgtgtgtgcgtgcccacgtgcgggtgcggttcatctgggtgtgagcacctgtgccccgctcacctgcagggcctgccccgcctgttctgtgtctttcctacccgcttctgtcctgctgcacccaccctgtcagaggcagggcgctgcccgcagtgccccagacttccccttcctccccaggatcaacggccaccccgggaagtccacgcgcctggcgggcttgtggaagctggaagaggtcagtcacccccaggcttcatgccctgtccctgagccactgctcccctgaccgtcccccaggacccctccctgatctcctcctgtctggccccgcagtgccacgccagcggctgcatgatggacctcttcgtgcagatggccatcatcatgggcctgaagcagacgctcagcaactgcgtcgagtacctggtcccgtgagtgccgacccccgcccagccccgggagccccaggcccctccgccccctgcgccctccctgccacgcagctctccccgcaggtgggtgacccacaagtgccgctctctgcgggcctccgagtccgggcacctgccccgggaccccgagctcagggactggcggcgcaactaccttctgaacccggtcaacaccttcagcctgttcgacgagttcatggagatgagtgcgtgggcgctgcggggcgggggttcgcggagacgaatgcggggcgggggtccgcggacatgagtgcggggcgccggtgagcctgacccccaccgcgcagtgatccagtacggcttcaccaccatcttcgtggccgccttcccgctggcgccgctgctcgcgctcttcagcaacctcgtggagatccgcctggacgccatcaagatggtctggttgcagcggcgcctggtgccgcgcaaggccaaggacatcggtcagaccgggcgggcgcaggatgggcgggaactgggcggcctcaggcctgtgggcttcccgctggccaggccggctcacctggaaaaaataatctctcggatctcaggccgcagacagcccccagcccttctccgacggcctcggatgcgggttgagcctgggtgggagggtaccaggagtgggcggggccgagcgctttgtaggctcctcccacaaaccgtcaggatctcagaggggcttgacgcccccaagggggacccaggttctgccagtggctggggctggaacagagcagccggcctctgtcccaagactggccacgctgagacggacaggcagcaggggagcgacgggagctggggcgctggatgtggggaaagggagagaggtgttagggaggcccccagtctcgggcccaggttacaaggtcttaccctggggtgggaacccaggaggtgg

SEQ ID NO: 6329 - DNA, 2300 bp, Homo sapien
ctgcgggcagggttctcccagcacctcactccccctgactcgtgaacccctgtgacccagagaccttcgaggatctgatgaaggacggggtctttgaggccaggttccccctgcacaaggtgaggggtgggctggcctggagagggccctggggtgggaccctgggatgggggctctcactctctgtcacccgagccagggggagggacgcctgaagaagacgtgggcgcggtggagacacatgttccgggagcagccagttgatgaaatcaggtaacgctgcccaaagagagcacaggaaccccgcggacggccccgcctcctgcggacgcccccagatacccgcggacgcccccacacccccgcggaagcccccagatacccgcgggagcccccacacccccgcagacgcccccagatacccacgggagcccccacacccccgcggaagcccccagatacccgcgggagcccccacacccctgcagacgcccccagatacccgcgggagcccccacacccccgcagacgcccccagatacccgcggacgcccccacatccccgcagacgcccccagatacccgcgggagcccccacacccccgcagacgcccccagatacccgcgggagcccccacacccccgcagaagccccccagatacccgcggacgcccccacacccccgcggaagcccccagatacccacgggagcccccacacccccgcggacgcccccagatacccacgggagcccccacacccctgcggaagcccccagatacccgcggacgcccccacacccccgcggaagcccccagatacccgcgggagcccccacacccccgcagacgcccccagatacccacgggagcccccacacccccgcggaagcccccagatacccgcgggagcccccacacccccgcagacgcccccagatacccgcgggagcccccacacccccgcggacgcccccagatacccgcgggagcccccacacccccgcggacgcccctagataccggcgggagcccccacacccccgcggacgcccccagataccggcgggagcccccacacccccgcagacgcccccagatacccgcgtgagcccccacacccccgcggaagcccccagatacccgcggacgcccccacaccccccagacatccacacacaccacccagaagccaccacctcctgtaaacgcccccacacaccacccagaagatgctcccacactgcccacaccctcacagatgcccccacgcccacagatgtgcttcccattcagactcactgatgccaccaaaagagagaccccctcccccacccccctcccaccctgtccctcccccactgccccctccctcccccatccctcccctgccttgccctcccaccctcatccctccccgtccctctcctgtccctcccccgccaccccttcccaccccgtccctcccccatccctcccctgctgccccctcccacccccatccctttcctgtccctcccccaccgccccctgacagctggccttgacccctgctgcctgcaggaactactttggggaaaaggtggccctgtacttcgtctggctgggctggtacacctacatgctggtgccggccgccctgacgggcctcttagtctttctgagcggattctcgctgtttgaggccagccagatcaggtgggccgcagcaggggccgggcatggggggccggggtgggccctgctgcctggaggagccgaccccagcctcatccctgccccttcagcaaggagatctgtgaggcccacgacatcctcatgtgtcccctcggcgaccacagccgcaggtaccagcggctctcggaaacctgcacttttgccaaggtttgtcgcctccgggtccaccccagggcctgcggaagatgggaacggtgcatccacccgaagcgggggagatcaaggcctggagccctgcagagctgctcagctttccccacagggctgacggggaggcccagccccagcccacccgcccatttcctcagcccacctgcccccttccccggctttcctgcctccctccctggctcacctgcccccctccccagctcacccacctcctctccggcccacctatcacccccccagctcacccacctctttgacaatgatggcacggtggtgttcgccatcttcatggctctctggggtgagttgctgcgggacgcctctgcggggccaggggaagtgccagcccaagctccgaggtccacctggcgtagtgcagtgatgcccctcct

SEQ ID NO: 6330 - DNA, 2300 bp, Homo sapien
tgggattacaggcatgagccaccgcacccagccgaagattgttttaacacagtgtgaaaacatgagcacagagacccctgagcgggctgagctggggactggggagcgacacccgtcacggacggtgcaggggctgggaacgtggatcttgcgtgtgagttcctcccatactcaacaagccttgcacattctgtttctgaactagatctaacttggcagctgtgaccccctggtgagactgccggatgttccctctcccgcttaccctgctttcttccatgggaaaagagctcacatgccccaggcttccttgccatagagtgtggtcacgtgactaaccatgtgaagggtgaggttccctccttcgccctttcctcttcccactggctggaacgtggatgtgatgactggagcttgagcagtcattttggaccaggtgctgggaccatgtatttaaggtggcagagcaacaagctgaaggcattctgggtctctgatgactatagttcggccatactagtccaggactagccaactccagatttttgttttgctttgttttaaagacagagtcttactctgtcacccaggctggagtgcagtggtgtgatcttggctcactgcaacctctgcctcccaggttcaagcgattctcctgcctcagcctcccgagtagctgggattacaggcgtgcaccaccatacctggctaatttttgtatttttagtagagacggggtctcaccatgttgggcaagctggtctcgaactcctgacctcaggtgatccacccgcctcggcctgccaaagcgccgggattacaggcatgagccactgcgcccggccaactccagatttcacttataggagaaatacacagcttgtttaagccaccaccattttgcacacagatctgaatgtgttccatttggatttgccccatctgagctcacaggtcctcggccaccacttcactcgcttgtctttgccaaagtggcaaagctgtggtctctgctgccatcccagcctgccaggaggtcccccaaggagaaacatgggtgggaccatgttaccccttggggaaaccagagccgactgttggccctgggcctggaccacagcagagggctgctgggcttgccggggggtgctctggccccagtgggcctggagccgttccgtgtgacagcgtctgcctgcggagctctggccctgcctccccagctttgcagcagctttcagaagcagactcctcgccacacacgctgcagataatgtgtgccagcccacggcctgggcccccactccccgcagcccttccctcctcagggcactccactggacggtcactctcaggacacccagagcctgcccagctgccgccctcagcccaggctgcacagaacgtgctcagggactggggatgcggggtggagggctcctcctccgttgtctacacagcctggggccagccacgtgtccccaggactccaaggattccccagtggggcccagaaagcaggggcttgggtaggagcagacagtttctttgggagtctgtctcgtcgtcagtcctccttgccccagtttctcctctaagggaatcagcactggacctgtggggtggggggccgtggcccggggtggggggccgtggcccggggtgggggaggccgtggcccggggtgggggaggccgtggcccggggtggggggccgtggcccggggtggggggcatggcctggggtgggatgcttttggagggaacatggggatgtgtgagcgggggtgagagaggcaaggcaagtgggggcgttggtgctggctctgtcaggggctctgtgccatcctgcttccccctaggaccaggtgtcatgagacccatctcacagtggaaacccccttcccgggaactccagcctaggaattcccctctggcccctgacccgccatctgggctccaggaaggtgtcccaggctccaggggctggggtactctcctggcctggatgctggctccgccccgactacacccaggcgcggcagctgcaggacgctggaggaggaggagggaggggcgagccccacgcggaagtcaggtaggagcacccgccgctggcagccactctcctggccgccaaaccccagctggaactccggccacagccagcatgcaggtgagtcctgcgctcaaaagggtccacaccttcaaggcccccagccacgcccacacctggggcccccggccccagccccccgccagccccacctggaaggcgcctgtgtgtgtggggggggtcc

SEQ ID NO: 6331 - DNA, 2300 bp, Homo sapien
gtcctcggccccgcccctcacgcgcccttgggccccgcccccgagccgacaggaacgagcgtcattgcgaggcggcctcgcgcgcagcttccttggggccagggaccccagtggggccggtacatctccccgccccggcctctgcaccctggagggacggcaggagggctctctgtgcagtttgagagaacacccatacgcaggaaatgaccccaacgccaccgagagggcgcctggaatgtgagcgccacctgctgggatgggaagaggtctgggaggggacctgaaggatggttcacagggaaccaggcctgtcgggtgattgctggaaagatggcatggacgggagctggctgctctggccactcagccgaccccagctggacgcggccagggcctggggcagggggccaggcctggggaggcccaacagcacgccccctggagccagcgcctcccgcactgcccagcctgtgtgtcaggagctggggtgaaggtcccatcacagtcaggccccatccctgctgggcgtggctgtgcaggagccccgcaaatatgtttatatatttagtatgtgagttatatttcaataaagctgatatgagatatacttcacatatcatgcagttcacccattcaactcgtttcgagtggacagttgagtggtttttaggacattcacagataggagctgaggtcaatattacagcactttcatcgccccgaaagaaacctgctaccctttgtagtcgctccttattaccccttccccagcccccggtgaaaactcatctaatttctgtcttcatagatttgcatttcctggacatttcatacaaatggatcacataatgcgtagtctcctgtgactggcttctttcacctagcatttttttttttttttttgagacggagtctcgctctgtcgcccaggatggagtgcagtggcacaatctcggctcactgcaacctccacctcccggatttaagggattctcccacctcagcctcccgagtagctaggattacaagcgcccgccacaatgccagggcaatttttgtatttttagtaaagatggggtgtcaccactttgcctaggctggtctcgaactcctgacctcaagtcatccgcccgccttggcctcccaaagtgctgggatgacaggcgtgcgccgccgcgcccggcctgcctagcataatgttttcaaggtccagctgtgctgtagcatgcgcatgcttcgctcctctatggctaataacatgccgctattatcaaaatgctgcaactaggagcgctagtgtgtaaatttggcgtggacacttgtttccaggtttgaggagctgccacattgcttttcagagtggctcaggagctaatttttttgcagggtaccatgtcaacaatttgggtcaactaaaatcagcgtgtccgcaccattttcgcccgcccaatttcacgcgatcctgcgaaagaatgacccagaccggtccgggcgcggtggctcgcgcctgtaatcccagcactttgggaggccgaggcggcagatcacaaggtcaggagttcgagattggcctggccaacatagtgaaaccccgtctctactaaaaatacaaaaattagccgggcgtgatggcggccgcctgtaatcccagctactcgggaagcttgagacagaagaatcgtttgaatccgagaggcggaggttgcagtgagccgggatcgcgccattgcactccagctcgggcggcagtgcgagactccgtctcaaaaaggaatgacccgggtcgcatggggtgaagggtcgggaagcgccccaaaaggagaacggggctgggctccgggatccgtcggcgaggaaggggcgaaggggtggagggactcgggccaggccgccggggatgtctgtggttacctccaagctctggaggccttggcgagacccgcgccatccgcagcttggttcctgcgacctcagccgcagggcggtccggctccggtttcccagcaaccaggcgtcatccttcccagcaagcactgcgtccaacccgcgacgtcggaccacaaggcccagcatgccccgcgcggactacaagccccacaatgcaccgcacaccctttactggccggccccgcgctgctctcctaagaccccgcgggccagcgccgcgaccccttcccagcgctcctcgcgctgtgtgcggcgcgtcctctcgccggtgacccggtgtgcgtggggtcgaggcgccgggcggagtggctccgggccgaaacgccatgcggaggggcgagcgcagggac

SEQ ID NO: 6332 - DNA, 2300 bp, Homo sapien
gaggggcaggccagggacaaggggactcctgggccccagctgagcccagcccgtttcccctcaagggctgtctccaggaggacacgttctgtaagtgtagtgttcagcagagggtgagtttctgggtcgccgaatccaggcacccttaggaatgggggcctaagagggccttctgacgtgggttctctgctgtgattgtgggcaggtctctcagtactgaagggccccacggtgtggagctcagcaggaaggctgaggttccctgcggtttcctcatggcttaggactcaaatgcaaatgtatctaaagaaaaaggtggttgatagtcacaatgaaacttttatttacctctggttgtcttaaatgcctagtattgtaaaatatggcagaagaattcactttcatgcctgtaatcccaacactttgggaggccaaggtgggcagatcccttgagttcatgagtttgagaccagcctggaaaacatggcaagaccccgtctctacaaaaaatacaaaaaaatccaacctgacccacatggcaagaccccatctgcacaaaaaatacagaaagttccagcctggagcctccacctgcagtcctgcagctccaccctggctcttcatgaaatcggctaagtccaggtgtgggtgcgttcagtgcagcacccacgtgcaggtgacacgcccatgcaccgccacaaccacgctcacaccagaacattccatcatccggaaggcccgtgtctccgctccagtctgcttttcgtggatgcaaactcatttccttgagtcgtgtgtgggtgacagcagatgggaggtttcttttgtgcctggcgtctgtagcgtgtttttctttttctttttttatcttttgagacgggatctcacgatgttcatgatgttgccccggctggtcttgagctcctggcccaaaacagtcctcctgcctgggcctcccaaggggcgtgtctttgagatctatccacgttgaggtcgttgccagcagcacattcctctgagtgctgagccatgctccgctggtcggagggaccacagtgtttcctccactgatagagttttggtttgtttcccgttttaggttattatacctgaaacatctgcatgtaagtctttgactggacctgtgttttcatctgtctcaggcccacgtttgggagtgtgtctttgactggacctgtgttttcatctgtctcaggcccacgtttgggagtatgtggctggctggatagcagacgtagcataggcctcacttttctgtgccgttttgcagtcccacctgcagtgcgtgagcatcttgctccgagacctcaccagcactctgcattgtgatgttcttaatttcagccgttccagcagatgtgcactgatgctgtgtcgtggcttggatttgtgatgcttttaatttcagccgttccagcggatgtgtactgatgtgtcctggcttggatttgctttcacggtgaccagtgctgctcctcgtttgttcatgtgcttattggccatttgtatgttttccttgtgaagtgtctgttcaattttttgcctattttttcattaaattgtttattgagctgtatgagttctttataaattctggataaaaagtattttttttcttttttttttttgagattgagtctcgctctgtcgcccaggctggagtgcagtggcgcgatctcggctcactgcaggctccgcctcccgggttcacgccattctcctgcctcagcctcccgagtagctgggactacaggcgcccacccaccacacccggctaattttttgtatttttagtagagatggggtttcaccgtgttagccaggatggtctcgatctcctgacctcgtgatccgcccgcctcggcctcccaaagtgctgggattataggcgtgagccaccgcgcctggcctgatttttttttttttttttttttttgagacagatcttgctctgtctcccaggctagagtgcagtggcacaatcatcctagcgcactgcagcctcaacctgggcttaagcgaatctgccacctcccgagtagctgggactacaggtgcctgccaccacgcctggctaattttttatagagatggggtctcactgtgttacccagtctggtcctgaacgcctgggctcaagcaatcctcttgtctcagcctcccaaagcgttgggactacagacgcgtgcagcctacaaagttttatcagatatatgtattgtgaatattttctcccagtttgtgacttgccttttcatttctttagggcacaaatagtt

SEQ ID NO: 6333 - DNA, 2300 bp, Homo sapien
tagagggtggccccgcgcccccgtcacgtcggaacataaggacctgaattggcctccagacggcccctcccatgtggctccccagggtggggcccaggccttgggtgctgcggagacctccctccgtaaggttgagaaagtctggtctccggataagggaccgttagggcctctgttcagatccctgcctcaaccaaagcaggctgccagctggtggtagtgggttcctgaatgtgcttttagctttggctgtgtagggagccagggacttctccagtcacagagaagggcgtttactcccgcattttcatggggtcctcagtgggatccgtgacccacagagattcagaagggcctttctgggatacaacagggtctggccaagcctgaggggtagggacggggctactcccgcagcgctagttgcagatggtcacgggagcactggccaccctgagctcccaccaagctttcccaggaggaggacaccctggggccacctttcatctggctgcagaggacacaggagtgtcaggctggatttggggagcgtgtgcaccctgggcagccccctgaggctctccttccacccgccctcccgcccacagtgcctcctgatgactagattctggagtcagaatttgggtgaccacaccctggtcggttttgctcacgtgcttcgggtcggttggattcagttcctccatgtggggccgtgggatgtcaccaccctttgccactgtccttgcaggccgggcgcccaggcgtgtggacccgagcccagccttgcgtctttcctcccagttggtaccaggggcctcttgcctccactcatgcagagtggaccagccgcctctgaagcagccccggggagaggagtgccaggcacacagactcaggaagctgggggtgtcagggcaccaggagcctctcaagcggtcctgttggccgtctttctgaagggcagctggggttgcatcatttccccaagtggatcctgccaactttctggggcttctggatgagagccctctccccaccccacccacccctccccgcattgtggcatcagtgctgctgcttccagggagccttcctggccatccaagcctcctctccaggttcctgccctgctgtagtccccaggccagtgcttggcaggtgctcagggaatgtatccaccaaccaaggtttggggtggctgtctctgcctgaccactttccccaggcccctggcgggtacctgagctgtgctctcagggcctcaggaacctccttccatattcagggcctgtgcctggggaggcttcagggtgtagcagctgtgcccatcccaggctgacccacccagcttgcctggtagcccagcctctgggctagtgtgccgtggggcaggggatgtgctgtagcctggtgcagagtccccaaccccagaagggggccatggaagctgacaccccaagtggccgcccccctgctctgtcttgcttcggacactgtggccgggtccaggatcctggcatcctgggaggtctctggctttgtgggcagcctgcctggcccgcacagtctgcctgtcctgagggtgagacacaggtcaagcccacagacccccttgctcccctgctggggcctccaggctcacagaccaccccaccctaccctgtccttgcccaagcaaatgagaggcaggggcttcccgggctgctgctgtcccgccctctgtggggcaggaggaggtgcccacagaggctgggtggtgatagccaggagatgggctggcatctgcattacccaagctctgctgcccatggtggcctttctgggggtgggtgctggtccctgccccctgccccacccctgatgtctgctccagagacaaaggtggggagggtgctgaagaggaagtgtttgcccagggagaggctgcggctcctcctgaaacatcagccctgtgggtcctgtttgcagaatctccggcctgtgaaactgtgaggggattcggccaagacgtcctcttccctctgcctcccacccaggccactcttcacctccaccatgagcctggacatccagagcctggacatccagtgtgaggagctgagcgacgctagatgggccgagctcctccctctgctccagcagtgccaagtggtcaggtacgcttgctctcggggtggccttggggtgctggtggggcaggctggcgggtggcggctccctctgaagggtgcattgctctggaacgccttgtttgtggacatgaagtatgaattctgtgcagctaccacgtgcatgag

SEQ ID NO: 6334 - DNA, 2300 bp, Homo sapien
ttcagggccattcttattttaaaaaatgtactgtcgataagaatagttaaaatgtaaaatatttgaagggatttattctgaatcgaatatgagtgaccgcggccggtgacacagccctcaggggatcctgggaacatgtgcccaaggtggttggggcagtttggttttacatgttttagagagacatgaggcattaatgaaatacatttaagatatccattggtttggtccagaaaggcgggaccaaacaaaaaaaaaaagattttgaacatgcttcccgagctcaggcatgaagaactcttgactgacagaaacggagggtgtgtccaaagttttgaggacggccgagcggcgctccaaaacccgtcctcacagcctcgccccgttcgcctcagctacaacaaatcatcgtcaacctgttccaccttctccagtctggtagcaaaaaggggtgtctcaggtttgctttattttattgtttgggcaattcctggaatccggcctgcttgtgggaggaggcaggggccggtccctcgagggtggtgggagctgccagagctggagggatggtctgggggaaggcggctgtacggtggaaaggctggttggggccagagtgggaaacgggatgcggacgtcaggcttcacccccgacccaggggggagtgggaaagctggggtagtagctgggacgaggcccgggggctgagcccagagggtcgagtgggcgacgactagcgggcgcggcccccagggtggactccccgccagccccggcctggaggctccgcccgcccccgcctgggcggaaggaacgcggagcggctctggccttgggtctgcggcggcggcgtcgggtgagcgtcccgggcggagcgggcgcgggcgggggcagagaggcaggggagacccccttcgtgtttttgtgaggtttcctcccagccctttagtctgcagcagggtgtccagaactagcaggttcgagggactcgacgcgggcgcgggcgggggtcccagggaccgggaacttttgcgcgtcgcctgagcgtggcccgtgtctccctagagggtggccccgcgcccccgtcacgtcggaacataaggacctgaattggcctccagacggcccctcccatgtggctccccagggtggggcccaggccttgggtgctgcggagacctccctccgtaaggttgagaaagtctggtctccggataagggaccgttagggcctctgttcagatccctgcctcaaccaaagcaggctgccagctggtggtagtgggttcctgaatgtgcttttagctttggctgtgtagggagccagggacttctccagtcacagagaagggcgtttactcccgcattttcatggggtcctcagtgggatccgtgacccacagagattcagaagggcctttctgggatacaacagggtctggccaagcctgaggggtagggacggggctactcccgcagcgctagttgcagatggtcacgggagcactggccaccctgagctcccaccaagctttcccaggaggaggacaccctggggccacctttcatctggctgcagaggacacaggagtgtcaggctggatttggggagcgtgtgcaccctgggcagccccctgaggctctccttccacccgccctcccgcccacagtgcctcctgatgactagattctggagtcagaatttgggtgaccacaccctggtcggttttgctcacgtgcttcgggtcggttggattcagttcctccatgtggggccgtgggatgtcaccaccctttgccactgtccttgcaggccgggcgcccaggcgtgtggacccgagcccagccttgcgtctttcctcccagttggtaccaggggcctcttgcctccactcatgcagagtggaccagccgcctctgaagcagccccggggagaggagtgccaggcacacagactcaggaagctgggggtgtcagggcaccaggagcctctcaagcggtcctgttggccgtctttctgaagggcagctggggttgcatcatttccccaagtggatcctgccaactttctggggcttctggatgagagccctctccccaccccacccacccctccccgcattgtggcatcagtgctgctgcttccagggagccttcctggccatccaagcctcctctccaggttcctgccctgctgtagtccccaggccagtgcttggcaggtgctcagggaatgtatccaccaaccaaggtttggggtggctgtctctgcctgaccactttccccaggcccctggc

SEQ ID NO: 6335 - DNA, 2300 bp, Homo sapien
acacgaagggggtctcccctgcctctctgcccccgcccgcgcccgctccgcccgggacgctcacccgacgccgccgccgcagacccaaggccagagccgctccgcgttccttccgcccaggcgggggcgggcggagcctccaggccggggctggcggggagtccaccctgggggccgcgcccgctagtcgtcgcccactcgaccctctgggctcagcccccgggcctcgtcccagctactaccccagctttcccactcccccctgggtcgggggtgaagcctgacgtccgcatcccgtttcccactctggccccaaccagcctttccaccgtacagccgccttcccccagaccatccctccagctctggcagctcccaccaccctcgagggaccggcccctgcctcctcccacaagcaggccggattccaggaattgcccaaacaataaaataaagcaaacctgagacacccctttttgctaccagactggagaaggtggaacaggttgacgatgatttgttgtagctgaggcgaacggggcgaggctgtgaggacgggttttggagcgccgctcggccgtcctcaaaactttggacacaccctccgtttctgtcagtcaagagttcttcatgcctgagctcgggaagcatgttcaaaatctttttttttttgtttggtcccgcctttctggaccaaaccaatggatatcttaaatgtatttcattaatgcctcatgtctctctaaaacatgtaaaaccaaactgccccaaccaccttgggcacatgttcccaggatcccctgagggctgtgtcaccggccgcggtcactcatattcgattcagaataaatcccttcaaatattttacattttaactattcttatcgacagtacattttttaaaataagaatggccctgaaagatgtccacctcctaatctccaaacctgtggtgttaccttaagtggcaaaagggactttgcaaatattaagaatattgagatgtgaaggctaccctggggtgtctgggcggccggcatataatcatgagagttcttatgcagagacagtaggttttgaagatggaagaaggtggcctctagaagttggaagaggaaaagaagcagattctccttgggaaactccagaaggaactacccttgccaacaccttgattttaacctcctaaaactcacttcgggcttctgagctccaggcctataaaacagcctgtgacaaattcgttatagcagggatgagaaaatagctcactgcagcctcctcttccagggctcaagtgctcctcctccctcagcgtcccaagtagctgggactacaagcgttcactaccgcaactggctaattttttctatcttttgtagagacgggggtctcactattttggccaaactcagtatgttggtcgcaaactcctgggctcaagagatccgcccgcctcggcctcccaaagtgctgggattacaggctgcagcgcacccagcctaatgtaactttttttttttttttttttttttgagaaggagtttcgctcttgtcagccggctggagtgcagtggcacgatctcggctcaccgcaacctccgcctcctgagttcaagccattctcctacctcaacctcccaagtagctgggattataggcgcctgccaccacgcccggctaattttgtatttttagtagagacgggttttcaccatgttggccaggctgttctcgaactcctgacctcaggtgatccgcctgcctctgactgcccggcccagtgtaactgttaacggcaacatcgtgtgcagtctccggcttgcattcggtttagtcagccaatcgctaagacgacacttgagaccgttttcagatctttaggctttccaccatcctagaagggggcctgcctggttctaaggcccttctgaaacactgccaaactgtcctcgggaaacggtgcagaagtcctctggtttcccccaaggcgcgtgggcaccttggctggaacctcgcccagtaacacgacgtgcctggggccccttcgtcatttccgccaaccccggtgacaaccctgacaccggcccctaagtgccattccagttatgttgctctcctccccgcagccccaggcggcagcttcgcggcccggcgtccggtcccccggtggtcccggagcgaagctccgcaatggagagcggaggaccctccctccccgacctcgcacgaccaagaccgcccacctttcccccaacgcccggctgtgggagccgttcgagtcttctccgccagggcgc

SEQ ID NO: 6336 - DNA, 2300 bp, Homo sapien
aggcatgcaccaccatgcctggctaagtttttgtaattttagtagagatggggtttcatcatcttggccaggctggtcttgaactcctgacctcaggtgatctgcctgccttggcctcccaaagtgttggaattacaggtgtgagccaccgcgcccagccagagtttcatcttgttgcccgaactggagtgcaatggtgtggtctaggctcgctgcaacctctgcttcccgtgttcaagcgattctcctgcctcagcctcccaagtagctggaattacaggtgcccaccaccatgcctggctaatttttgtatttttagtagagatggggtttcaccacgttggccaggctggtcttgaactcctgacctcaggtgatccacccttctcggtctcccaaagtgttggggttacaggtgtgagccaccacgcccggccagaaccaccttctttaaagatgatcaggccgggtgtagtggcttatgccagtaattccagcgatatgggaggctgaagcaggaggatcacttgagcccaattcaagaccaggctgggcaacacagggagacctcttctctacataaaatacaacaattagccaggcgtgctggcgcctgtggtaccagctacttgggaggctgaggcgggaggatcactggagtccgggaggtggaggctgcagcgagctgggatcgcgccactgcagtacagcctaagcagtggagtgagaccctgtctcgaaaacaaatacctaataaaggcagtcagaggagaggtttagcaaattgctaaagaacaaatctgagataccgttagtttccttacttgcaatcttcatctgccaaaatgtcaattctgtgaattgcggactagtcaaaaacttaaagaaaacccacttttgtggaggtggggtcgctttgcgtttcccaggctggtctggaactcggcctgcgcccctcagtgccagggctccaggcgacgctcgggtgtcggcagcagagtggacgcaggagcagctcggaccgcgctcagaacactcgggacgaggccgcggctccgcaggccttgcgggctggggtcccacgaaacaaaggcggcagccagtggccaggacgggcagcgtggttcacggggccgtggctccctcgggggtcgcgagctcggcgcaaacgagcccctctaccaaggtcgcctagagtcgcgaccccgacatgcggagccgccccaggggggtttctcccgggtccctcctgtcccgaggcggccgctttctccgggggccgcgccccgcgccccagcaaggcccgacccgcgcctgcgattccgcccccaaggcgctgccgcaccgggccccggcctcttcctccgaggattctcaggaattgctgagacttgcgtgccagtgcgaggcccacaacacgcacacgcgcccgcgcccgccagaccccgcccccggcaccaagccccgcctactgggggagaccacgcccccaagcgagacctccctcaccgagccacgccccaccaggccccgccgctgcgccaagactgtgcttagccgagccccgcccgccgggccccgccccgaccccgagactactcccgccaggccccgcccccgcgccgagccccgcccagtagtccccgcccacgcacctgaccacgcccacgagccggctcgaacacgcccgcgccgctgactggcgggtggggttgtcgacacgttcaacccgttctgctggctcgagaacgaagtaggccgtctcgctctgggtctccaggcccgcgaccgtccgccagtcgtcccgaggtcagtagctccagcggtgcgtcagcgtctagccaggcctcgcccacgccggccttggtcgggcttcttgtagacgcgggcctggcgctattgaggccgttgctgcgcgggcgagtggcgcgctcccgtggcggggcggggtcgggcggggcaggggtccggggctatcgaggcggggccgaggttgcgctgggcagctgcgccgccgggcggacgtggcgcgccttgaggacgtcatcgcggtgcacgctcccctttggggcttgccggaagtccttgcccggggcgcggggctgcgcctgcgtggttcgtcctcacgtggccgtcaagccctctagtgccttagattccagcgagctacgcaagcaatcctggcccagccgagcttgcttccccaaatcccgtaatccttgaccttattcccccaaagaagcggcctcccgggaaggagcgccctggcggagaagactcgaacggctcccacagccggg

SEQ ID NO: 6337 - DNA, 2300 bp, Homo sapien
aaacattttcttcactcttatgagaattgccacgaacaaatctaagagatcatggcaaagaaaagaatgaaatgaaaccagaacatttcagcagcttttgcaaagatgtcaagagaaccagtccaggagtcagactggcggcatccttccagcttcttgtcatgaattctaaacctcacatccagactccaaagcttagagagttaaagaatcagctactggtcaccaagctcacgtgtgcaggatgagggtcacagccaggttggctgccttccagccctgagctttcttgggggtgtgtgtgtgtgtgtgtgaaccaccttctttttgagacggagtttcttttttcttttttgagatggagtttcgctcttgttgcccaggctggagtacagtggcacgatcttggctcactgcaacctctgcctcctgggttcaagtggttctcctgcctcagcctcctgagtagctgggattacaggcatgcaccaccatgcctggctaagtttttgtaattttagtagagatggggtttcatcatcttggccaggctggtcttgaactcctgacctcaggtgatctgcctgccttggcctcccaaagtgttggaattacaggtgtgagccaccgcgcccagccagagtttcatcttgttgcccgaactggagtgcaatggtgtggtctaggctcgctgcaacctctgcttcccgtgttcaagcgattctcctgcctcagcctcccaagtagctggaattacaggtgcccaccaccatgcctggctaatttttgtatttttagtagagatggggtttcaccacgttggccaggctggtcttgaactcctgacctcaggtgatccacccttctcggtctcccaaagtgttggggttacaggtgtgagccaccacgcccggccagaaccaccttctttaaagatgatcaggccgggtgtagtggcttatgccagtaattccagcgatatgggaggctgaagcaggaggatcacttgagcccaattcaagaccaggctgggcaacacagggagacctcttctctacataaaatacaacaattagccaggcgtgctggcgcctgtggtaccagctacttgggaggctgaggcgggaggatcactggagtccgggaggtggaggctgcagcgagctgggatcgcgccactgcagtacagcctaagcagtggagtgagaccctgtctcgaaaacaaatacctaataaaggcagtcagaggagaggtttagcaaattgctaaagaacaaatctgagataccgttagtttccttacttgcaatcttcatctgccaaaatgtcaattctgtgaattgcggactagtcaaaaacttaaagaaaacccacttttgtggaggtggggtcgctttgcgtttcccaggctggtctggaactcggcctgcgcccctcagtgccagggctccaggcgacgctcgggtgtcggcagcagagtggacgcaggagcagctcggaccgcgctcagaacactcgggacgaggccgcggctccgcaggccttgcgggctggggtcccacgaaacaaaggcggcagccagtggccaggacgggcagcgtggttcacggggccgtggctccctcgggggtcgcgagctcggcgcaaacgagcccctctaccaaggtcgcctagagtcgcgaccccgacatgcggagccgccccaggggggtttctcccgggtccctcctgtcccgaggcggccgctttctccgggggccgcgccccgcgccccagcaaggcccgacccgcgcctgcgattccgcccccaaggcgctgccgcaccgggccccggcctcttcctccgaggattctcaggaattgctgagacttgcgtgccagtgcgaggcccacaacacgcacacgcgcccgcgcccgccagaccccgcccccggcaccaagccccgcctactgggggagaccacgcccccaagcgagacctccctcaccgagccacgccccaccaggccccgccgctgcgccaagactgtgcttagccgagccccgcccgccgggccccgccccgaccccgagactactcccgccaggccccgcccccgcgccgagccccgcccagtagtccccgcccacgcacctgaccacgcccacgagccggctcgaacacgcccgcgccgctgactggcgggtggggttgtcgacacgttcaacccgttctgctggctcgagaacgaagtaggccgtctcgctctgggtctccaggcccgcgaccgtccgccagtcgtcccgaggtcagtagctcc

SEQ ID NO: 6338 - DNA, 2300 bp, Homo sapien
ggcaccagtagtcccagctactggggaggctgagacaggagaattgcttgaacctgggaggcggaggttgcagtgagccaagatcacgccactgcactccagcctgggcgacagagcgagacaccgtctaaaaaaagaaaaaaaaagaaatattgttcagcaaaaatgcacaggcacacacaccaatcttctaatgttagaaattttgggactggccaggtgcggtggctcacgcctgtaatcccagcactttgggaggccgaggcgggcagatcatgaggtcaggagctccagaccatcctggctaacacggtgaaaccccgtctctacaaaaatacaaaaaaattagccgggtgtggtggcgggcacctgtaatcccagctactcaggaggctgaggcaggagaatcacttgaacccaggaggtagaggttgcagtgagctgagatcgcgccactgcatgccagcctggccaacatcaagactccatctcaaaaaaaaaaatttgcaacgtgccgtgtggcactgtgctaaccacgagcaccttgcgcagtgaactctgggactcacgcatcttcccagactgaaatctgttatcagttgaacagcaactcccagctcccctccccagcccctgcccacggccaccctactttctgcttctgagtttgactgcctcacagcagagagtcatgcacttggcaaaacgatagggtaagggttttgtttagttttggtttttttgagacggagtcttgctctgtcccccaggctggagtgcagtggcgctatcttggctcactgcaagctctgcctcccaggttcacgccattctcctgcctcagcctcccgagtagctgggattacaggcgcccgccaccacgcccggctaatttttttttttttttttttgagacagagtttcgctcttgttgcccaggctggagtgcaattccgcgatctcggctcaccgcaacctccacccactgggttcaatcgattctcctgcctcagcctcccaagtagctgggattacagtcatccaccaccacacccggctaattttgtatttttttagtagagacagggtttctccatgtcggtcaggctagtcccgaactcctgacctcaggtgatccgcccgcctcggcctcccaagggctgggattacaggcgtgagccaccgcacccggccaatttttgtatttttaatagaaacagggtttcaccgtgttggccaggctggtcttgaactcctgacctcaggtgatccacccgcctcagcctcccaaagtgctgggattacaggcttgagccaccgtgcccggcctgaaactctacatttttatccaggcctccctggatggatgttgggagagtttacgcgtggccttgtgggatcgctgtggcggactctcagctatcagagggctccatcactccatcgtaaggaggcagctggtggcgagtcctgagcagggatgtgatccgacgggcaggcggcgcccgggacagaagctgacgtcacacaggtgagtcccccacctccccacaggcttcctccaccccctcggcagcccagcagggcctgtcaatcagtgggacctggtcagctggctgctaggggacctcaggcaggggggcttgtccgcagggcctccagcaaggggggacattcatgacacccagcagggctcaagaaggtgagacagagggacactgaacccagccctttacagaagacctgagtccaccgaggaagggggccaaccccctccccgcgtctgcatccccaggaccaccccgggtggagagggccgagtgtggtgcctccgcgggtgctctgacgatcgtctcgagccacgggggtgacagtgacaaggacctgtgtgcacgttagtggggcagccaggcctagctggagaagaaacacacacacgcacacgttcacccacatacacgtgcacacacatgctgccagttcagggggtggaggacgctgactccaggcccagctgacctgcgcggggccctattgtgatgtgtgcagccaccccatgacgtcaccggtgccaagtgccggctgtgtgcggagcagttggagacacagtgggtgtccgagggggggctctgcgtccggaggtgagaggtgggtctcaacacagctgccctcccccatggtatggtgacagtcactaacaggtggcctgcgctggcctccacgtggctgccaagggccatccctgagcactcagcgggtgcctgttccacacggactatgaaaatgactgtctcgttcac

SEQ ID NO: 6339 - DNA, 2300 bp, Homo sapien
gtctttttgggtttgaaagagctaggatgtgcgtctatgtgcttggggtgagccctgggcacttcgctcccctgtggcaacttgtgggtacggtttaactggaccacgctgagcttctgcagcgttggaacctcaagtttggggggactgggcgggcagggtcgcctgccacgcaggcccgagaaagaggagagtggtggagggggcgttctcacgcctggccccagggcacacggctgcgcccgccgcccggaaccccaccggggctgcaagcgtcctcggggtgggttgcggtgggagtaggggagctggggtgcgtggtggtaggtggggtgcgcggccgctccacctgcgcggaagggcagccgggcaaccggaccccgcggccacccgggggcccccagctccgagcatcccgccttggtcccggcggatcccagcctttccccagcccgtagccccgggacctccgcggtgggcggcgccgcgctgccggcgcagggagggcctctggtgcaccggcaccgctgagtcgggttctctcgccggcctgttcccgggagagcccggggccctgctcggagatgccgccccgggcccccagacaccggctccctggccttcctcgagcaaccccgagctcggctccggtctccagccaagcccaaccccgagaggccgcggccctactggctccgcctcccgcgttgctcccggaagccccgcccgaccgcggctcctgacagacgggccgctcagccaaccggggtggggcggggcccgatggcgcgcagccaatggtaggccgcgcctggcagacggacgggcgcggggcggggcgtgcgcaggcccgcccgagtctccgccgcccgtgccctgcgcccgcaacccgagccgcacccgccgcggacggagcccatgcgcggggcgaaccgcgcgcccccgcccccgccccgccccggcctcggccccggccctggccccgggggcagtcgcgcctgtgaacggtgagtgcgggcagggatcggccgggccgcgcgccctcctcgcccccaggcggcagcaatacgcgcggcgcgggccgggggcgcggggccggcgggcgtaagcggcggcggcggcggcggcggcgggtgggtggggccgggcggggcccgcgggcacaggtgagcgggcgtcgggggctgcggcgggcgggggccccttcctccctggggcctgcgggaatccgggccccacccgtggcctcgcgctgggcacggtccccacgccggcgtacccgggagcctcgggcccggcgccctcacacccgggggcgtctgggaggaggcggccgcggccacggcacgcccgggcacccccgattcagcatcacaggtcgcggaccaggccgggggcctcagccccagtgccttttccctctccgggtctcccgcgccgcttctcggccccttcctgtcgctcagtccctgcttcccaggagctcctctgtcttctccagctttctgtggctgaaagatgcccccggttccccgccgggggtgcggggcgctgcccgggtctgccctcccctcggcggcgcctagtacgcagtaggcgctcagcaaatacttgtcggaggcaccagcgccgcggggcctgcaggctggcactagcctgcccgggcacgccgtggcgcgctccgccgtggccagacctgttctggaggacggtaacctcagccctcgggcgcctccctttagcctttctgccgacccagcagcttctaatttgggtgcgtggttgagagcgctcagctgtcagccctgcctttgagggctgggtcccttttcccatcactgggtcattaagagcaagtgggggcgaggcgacagccctcccgcacgctgggttgcagctgcacaggtaggcacgctgcagtccttgctgcctggcgttggggcccagggaccgctgtgggtttgcccttcagatggccctgccagcagctgccctgtggggcctggggctgggcctgggcctggctgagcagggccctccttggcaggtggggcaggagaccctgtaggaggaccccgggccgcaggcccctgaggagcgatgacggaatataagctggtggtggtgggcgccggcggtgtgggcaagagtgcgctgaccatccagctgatccagaaccattttgtggacgaatacgaccccactatagaggtgagcctggcgccgccgtccaggtgccagcagctgctgcgggcgagcccaggacacagccaggatagggctggctgcagcccctggtc

SEQ ID NO: 6340 - DNA, 2300 bp, Homo sapien
cgggagggctgtcgcctcgcccccacttgctcttaatgacccagtgatgggaaaagggacccagccctcaaaggcagggctgacagctgagcgctctcaaccacgcacccaaattagaagctgctgggtcggcagaaaggctaaagggaggcgcccgagggctgaggttaccgtcctccagaacaggtctggccacggcggagcgcgccacggcgtgcccgggcaggctagtgccagcctgcaggccccgcggcgctggtgcctccgacaagtatttgctgagcgcctactgcgtactaggcgccgccgaggggagggcagacccgggcagcgccccgcacccccggcggggaaccgggggcatctttcagccacagaaagctggagaagacagaggagctcctgggaagcagggactgagcgacaggaaggggccgagaagcggcgcgggagacccggagagggaaaaggcactggggctgaggcccccggcctggtccgcgacctgtgatgctgaatcgggggtgcccgggcgtgccgtggccgcggccgcctcctcccagacgcccccgggtgtgagggcgccgggcccgaggctcccgggtacgccggcgtggggaccgtgcccagcgcgaggccacgggtggggcccggattcccgcaggccccagggaggaaggggcccccgcccgccgcagcccccgacgcccgctcacctgtgcccgcgggccccgcccggccccacccacccgccgccgccgccgccgccgccgcttacgcccgccggccccgcgcccccggcccgcgccgcgcgtattgctgccgcctgggggcgaggagggcgcgcggcccggccgatccctgcccgcactcaccgttcacaggcgcgactgcccccggggccagggccggggccgaggccggggcggggcgggggcgggggcgcgcggttcgccccgcgcatgggctccgtccgcggcgggtgcggctcgggttgcgggcgcagggcacgggcggcggagactcgggcgggcctgcgcacgccccgccccgcgcccgtccgtctgccaggcgcggcctaccattggctgcgcgccatcgggccccgccccaccccggttggctgagcggcccgtctgtcaggagccgcggtcgggcggggcttccgggagcaacgcgggaggcggagccagtagggccgcggcctctcggggttgggcttggctggagaccggagccgagctcggggttgctcgaggaaggccagggagccggtgtctgggggcccggggcggcatctccgagcagggccccgggctctcccgggaacaggccggcgagagaacccgactcagcggtgccggtgcaccagaggccctccctgcgccggcagcgcggcgccgcccaccgcggaggtcccggggctacgggctggggaaaggctgggatccgccgggaccaaggcgggatgctcggagctgggggcccccgggtggccgcggggtccggttgcccggctgcccttccgcgcaggtggagcggccgcgcaccccacctaccaccacgcaccccagctcccctactcccaccgcaacccaccccgaggacgcttgcagccccggtggggttccgggcggcgggcgcagccgtgtgccctggggccaggcgtgagaacgccccctccaccactctcctctttctcgggcctgcgtggcaggcgaccctgcccgcccagtccccccaaacttgaggttccaacgctgcagaagctcagcgtggtccagttaaaccgtacccacaagttgccacaggggagcgaagtgcccagggctcaccccaagcacatagacgcacatcctagctctttcaaacccaaaaagacatgtttttaacattttttaaaattgcaaaggaatcagaaatacatcctcattaaaaaacaaaaagggccgggcgcggtggctcacgcctataatcccagcacttcgggaggcctaagcgggtggattacttgaggtcaggagttcaagaccagcctggccaacatgatgaaaccctgtctctactaaaaacacaaaaaattagtcggctgcagtggcgcgcgcctgtagtcccagctactcgggaggctgaggcaggagaatcgctggaacccgggaggcggatgttgcggtgagccgaaatcgcgccactgcactgggcaacagagcgctacttcgtctcaaaacaaaaaaggcgttttacagtcaggcaaaccctgcctctgcccagtccagcgcccgcctcgccctcctgcgccg

SEQ ID NO: 6341 - DNA, 2300 bp, Homo sapien
ggcgaggcttgcggctcccaccccaagggtgcgctcggctctcacctgagggctcagcctaggtgtccggccctggcagctcggccctgggcgccctccacctccaggcgctgtctcctactccaggctgttcttccggccgccgcggggttgcggcctgggcgccatagcaacgggagccaggcctcatttgaatacgcaaatatttataagtcgccgggggctcgggttccgtgcggctgagccacgccccttagcaacggtcgctagggcggggccacgtggactggcacgtgcgtgggcgcccctgctgcgggcgatcccaggggaaggtgacgcgccaccaactcgagttgggtgggcgcaggcgcgtcaggtgccagcttcctgcggctccgtgcctgggccgtcgcgatgcacgtgtcgcgtttcctcgcgatcctggcgcttcccacgcggggcgggtaaaggcggtctctgctggaggctcgcgcccacctttcccaggtggaagggtcgcccctggggccgaggcctgccgtcctgaccttcggttggaagtgaggccgacggcaaaaggaagcaccgggggaagcgcccccgaggaccaggaaacacacaccggacgccggagcgcacccgagtgcccggcccgcgggacacgctgccgcccgccgtccagtcgccgcttctcactcgcgttcatgcgtgtccgccccgagccgagctctgactgcgaccgcgcggtggacggacggcaggcgggacccccgggaccgcacgtgggtggagccccgggtcagcagcgaccggcgcaggagggcgaggcgggcgctggactgggcagaggcagggtttgcctgactgtaaaacgccttttttgttttgagacgaagtagcgctctgttgcccagtgcagtggcgcgatttcggctcaccgcaacatccgcctcccgggttccagcgattctcctgcctcagcctcccgagtagctgggactacaggcgcgcgccactgcagccgactaattttttgtgtttttagtagagacagggtttcatcatgttggccaggctggtcttgaactcctgacctcaagtaatccacccgcttaggcctcccgaagtgctgggattataggcgtgagccaccgcgcccggccctttttgttttttaatgaggatgtatttctgattcctttgcaattttaaaaaatgttaaaaacatgtctttttgggtttgaaagagctaggatgtgcgtctatgtgcttggggtgagccctgggcacttcgctcccctgtggcaacttgtgggtacggtttaactggaccacgctgagcttctgcagcgttggaacctcaagtttggggggactgggcgggcagggtcgcctgccacgcaggcccgagaaagaggagagtggtggagggggcgttctcacgcctggccccagggcacacggctgcgcccgccgcccggaaccccaccggggctgcaagcgtcctcggggtgggttgcggtgggagtaggggagctggggtgcgtggtggtaggtggggtgcgcggccgctccacctgcgcggaagggcagccgggcaaccggaccccgcggccacccgggggcccccagctccgagcatcccgccttggtcccggcggatcccagcctttccccagcccgtagccccgggacctccgcggtgggcggcgccgcgctgccggcgcagggagggcctctggtgcaccggcaccgctgagtcgggttctctcgccggcctgttcccgggagagcccggggccctgctcggagatgccgccccgggcccccagacaccggctccctggccttcctcgagcaaccccgagctcggctccggtctccagccaagcccaaccccgagaggccgcggccctactggctccgcctcccgcgttgctcccggaagccccgcccgaccgcggctcctgacagacgggccgctcagccaaccggggtggggcggggcccgatggcgcgcagccaatggtaggccgcgcctggcagacggacgggcgcggggcggggcgtgcgcaggcccgcccgagtctccgccgcccgtgccctgcgcccgcaacccgagccgcacccgccgcggacggagcccatgcgcggggcgaaccgcgcgcccccgcccccgccccgccccggcctcggccccggccctggccccgggggcagtcgcgcctgtgaacggtgagtgcgggcagggatcggccgggccgcgcgccctcctcgcccccaggcggcagcaatacgcg

SEQ ID NO: 6342 - DNA, 2300 bp, Homo sapien
gcgactgcccccggggccagggccggggccgaggccggggcggggcgggggcgggggcgcgcggttcgccccgcgcatgggctccgtccgcggcgggtgcggctcgggttgcgggcgcagggcacgggcggcggagactcgggcgggcctgcgcacgccccgccccgcgcccgtccgtctgccaggcgcggcctaccattggctgcgcgccatcgggccccgccccaccccggttggctgagcggcccgtctgtcaggagccgcggtcgggcggggcttccgggagcaacgcgggaggcggagccagtagggccgcggcctctcggggttgggcttggctggagaccggagccgagctcggggttgctcgaggaaggccagggagccggtgtctgggggcccggggcggcatctccgagcagggccccgggctctcccgggaacaggccggcgagagaacccgactcagcggtgccggtgcaccagaggccctccctgcgccggcagcgcggcgccgcccaccgcggaggtcccggggctacgggctggggaaaggctgggatccgccgggaccaaggcgggatgctcggagctgggggcccccgggtggccgcggggtccggttgcccggctgcccttccgcgcaggtggagcggccgcgcaccccacctaccaccacgcaccccagctcccctactcccaccgcaacccaccccgaggacgcttgcagccccggtggggttccgggcggcgggcgcagccgtgtgccctggggccaggcgtgagaacgccccctccaccactctcctctttctcgggcctgcgtggcaggcgaccctgcccgcccagtccccccaaacttgaggttccaacgctgcagaagctcagcgtggtccagttaaaccgtacccacaagttgccacaggggagcgaagtgcccagggctcaccccaagcacatagacgcacatcctagctctttcaaacccaaaaagacatgtttttaacattttttaaaattgcaaaggaatcagaaatacatcctcattaaaaaacaaaaagggccgggcgcggtggctcacgcctataatcccagcacttcgggaggcctaagcgggtggattacttgaggtcaggagttcaagaccagcctggccaacatgatgaaaccctgtctctactaaaaacacaaaaaattagtcggctgcagtggcgcgcgcctgtagtcccagctactcgggaggctgaggcaggagaatcgctggaacccgggaggcggatgttgcggtgagccgaaatcgcgccactgcactgggcaacagagcgctacttcgtctcaaaacaaaaaaggcgttttacagtcaggcaaaccctgcctctgcccagtccagcgcccgcctcgccctcctgcgccggtcgctgctgacccggggctccacccacgtgcggtcccgggggtcccgcctgccgtccgtccaccgcgcggtcgcagtcagagctcggctcggggcggacacgcatgaacgcgagtgagaagcggcgactggacggcgggcggcagcgtgtcccgcgggccgggcactcgggtgcgctccggcgtccggtgtgtgtttcctggtcctcgggggcgcttcccccggtgcttccttttgccgtcggcctcacttccaaccgaaggtcaggacggcaggcctcggccccaggggcgacccttccacctgggaaaggtgggcgcgagcctccagcagagaccgcctttacccgccccgcgtgggaagcgccaggatcgcgaggaaacgcgacacgtgcatcgcgacggcccaggcacggagccgcaggaagctggcacctgacgcgcctgcgcccacccaactcgagttggtggcgcgtcaccttcccctgggatcgcccgcagcaggggcgcccacgcacgtgccagtccacgtggccccgccctagcgaccgttgctaaggggcgtggctcagccgcacggaacccgagcccccggcgacttataaatatttgcgtattcaaatgaggcctggctcccgttgctatggcgcccaggccgcaaccccgcggcggccggaagaacagcctggagtaggagacagcgcctggaggtggagggcgcccagggccgagctgccagggccggacacctaggctgagccctcaggtgagagccgagcgcacccttggggtgggagccgcaagcctcgccctatgaccggtgccaggagggaacctgcgccgaggcgtgggcgcggggacgaagcagcacagccatcggggaccca

SEQ ID NO: 6343 - DNA, 2300 bp, Homo sapien
ccctcaggtgagagccgagcgcacccttggggtgggagccgcaagcctcgccctatgaccggtgccaggagggaacctgcgccgaggcgtgggcgcggggacgaagcagcacagccatcggggacccagtgatggccccgcatgtcagatctggtcccctgaggacccttgcctccaccaccccctggccctgcactgaaagggctccctgtcaggagacaggaggggccccaagccctgcccctgagggagactcagaggcaatgacccagggtgctcagggttccagggtggggctcaggaggggagcgggctctgccttccgagcccccatggtgaaggggcgagggcagcaggggacccagaggtgatggctacccaccagggaatggcactagcaggggtgtggagacaggccccccagttaccaatttggggagcatgggggcttgcagaggggacacagggtgggagcagggccgtgaagtgtgtggatgggttcaggcctgggtgagaacactaggtgcagtgtctgaggtgggagttcaatggggtctttggatcccacagcctccaaccccttgcacccccaggccttggggctcagaccagtctgatgcttggggctcttgggcacagaggagacaagggtagctgactcagcccttagtgtcacccataggtgtccaggggctgcccgtgaccccgccagctcacgccctccatgaggctcgaggctggcaggcctgggatggaggtggccagagtctttggggggatgcagtgttggggtcctgctgtgaggcctggggccttgcactggctggagaaaggcaggcagtgggggagatttgggctggaaactccatgagattctgctttgggcttcacttctttgatccttggtgcatggtcaccttccagaccaggccagtgaggcacccagagcctgagccactgccccgctccaacactcccacccaccacctctgtcaacagccggccaactcgcctggcacaggggcagctctagacgggatggagaggatgcatcttcagtgtccacacgtggtcaacagataaaagccatggccagaacgttctaagtggctacatgtgcatctgcctgttcacggattccttcgacaaatatttgagcatcccctcctgcgactgtggacagcagaggagcacgcaggccacgtgcaggccacgtgcagcccacagctctggggcgaggcaggccctcaaccgaacacgtagtaagacacacagggctccgaagggaactcgtctcatcaggaagataaatctgggaaggctgggtggggagtgcagtcaggggatcagtccaggtccagactgaagacacatgaaggtggtcagggaggaggacactggacgctccgagcacacttgtcactccacgcctggagctcatgattccagggcctggggccgaggcagatgtctgcatctttgtttgtttgtttgttttttgagatggagtctctctctgtcgcccaggctggagtgcagtggtgccatcttggctcactgcaagctccacctcctgggttcatgccattccccagcctcagcctcccaagtagctgggactacaggcgtccgccaccacgcctggctaactatgttttttgtatctttagtagagatggggtttcacctcgttagccaggatggtcttgatctcctgatcttgtgatctgcccgcctcagcctcccaaagtgctgggattacaggtgtgagccaccgcacccagccttttttttttttttttttgagacagagtcttgctctgttgcccaggctggaggacagtggcgcgatcttgtctcactgcaagctccgcctcgcgggttcatggcattctcctgcctcagcctcccaagtagctgggactacaggcacctgccaccacgccagctaatttttttttttttttttttgtatttttagtagagacagggtttcaccgtgttagccaggatggtctcaatctcctgacctcgtgatctgcccgccgcggcctcccaaagtgctgggattacaggcgtgagccactgcgccccgccagacgtctgcatctttaaggggcaacaccaggtaagcctgatgcacgtagtcgagggacacactgggcttaggaagaatgggatgcaagagagggacacactgggccaataccctcagaggcctggggaggggctcaggaagaacagggtgcaagagaggacccctgtggagaaggagggaagtgggatttggatgagcagca

SEQ ID NO: 6344 - DNA, 2300 bp, Homo sapien
ccccgcgtcctggtggggcgagggtcgtgagggcggcggccggcccgggaaaggcggccctagagggctccgcgcctggggcggggcaggggccgcggggcgtactggaggaccagggggcggccggggcggggcctggggaagtaggggtccgtcctagcgaggggatacgagggaccgtttctgctgggtcggggcctggggagggaggccagatcccggggacccgcggtccccaccctggtctccggcgactgacccggggctcccgcacccggcctttgcgcaggggtcgaggtgggcgcggcggcttgcgggtgtcggcgccgggcccggcctcagggagcgggaagcggtcgatggacaagtcggtgccgtcggcgaagaccctcggggccggagtctcgcggcgtgggatccggtgctcactgaggacctgcggggcgcgtcggtcacccccacaccccagccccggccgccccaccggggacccgcaccgacctcgcccttggggctcaggagcagcgtcgcgcagccgcggatggagaggaggggaacgggctcccggctcgaggacgcgcgcagcggcttcttggcgctgcgggtcgcctcgccccagacctggaggggcgtggagcggcgggtgaggggcggccgggccgggccgtcggggccgggctcccgggccggggcgcaccgtgacgtggtgccgcggggccagcagcgtgcccggcgggaagcggtacaggcgctccgggaagccgcgcaccagctgcttcagcaccatgccgctcaggtcggccgtgctctcctgcgacgggttgaagatgcggacgaacttctcccggcagctcacagccacgatcttcaggcctgtcgggctgggaagagaggagacgctgtgaggagatgcggccggtccacccgcacagctgcgcgccccgcccggaaaccagctccagtccggcgccggaggcttgggtcactcgccccttacctctgcaggagttccgggctccagtggtccgggtctgtgcagggctggggcgacaggaccggctcgccgtgcctgggtgagtgggttttctggagatctagagagagcagcgcttttggggaggggaccctcgaatggagtccccaccggatgttccccgtgaggtcagaacaggcctgcaacgcctggcggggcagggagcagggccagggtcagatggggcaggaaaggtggctggaccttgggggctggagggccacctccagggctctgagtgagatcacagctctgagggggtggagggtgggtgaagggtaaccaggggagacccgccccactgcaccttctgagtccctgctgtagctgccggcctgcaccagcgcttgctcggaggaagcgcggtggtcccggggcgggtgccctatcacctgcacgaaggaaggcaggcccggccggcagctgctggagtcggagtcagcgccccctgagctgctggtgttcagacagggcagggagccccactccacggtcttgtgatgccgctcggaatgctttccagaggactctgggctccctgtgtccagctgtggccagggccggggctgcctgtggaccacgctctgcttgatggccactccagctccagaccccagccctgcccccgtccagcctcacaaggcagtgcagcagggagcccctcttgcctcccagtacccaggctcagttcatggcaggacagtgatggctgcctcaaccccaacgcattctacagatcagagaacgcgcattggaaggtttaagagacttatccagggacactaaatggtcctttagtgtcctgcgtcttcacttgccaaggtgagccctcccttctggcccctggggagtccctgctctgtgcagttacttttgctttgagctgggctccatgttggtgaagaggttgggataccggcgggcaacgctgttccaatccacgtcctccagccgaaagccctggccaggaagcaagaggcacatggtcctcccctcccgcagggctccagataccagaccacacacgtgggaggcctagctcacctccccggtgggggcctgaatgttttcagagaggtcgcttgggtccatcagagtctctgccgtcactacctgcaagaggggaccggaagccagtgggcaggggctgggtgctcccctacagcacctctcctctttgacctcacctgtgctttgaggcctcctgattcctccctgctggagcccagagttccagaggcacctgagcagggcaggcttccaggca

SEQ ID NO: 6345 - DNA, 2300 bp, Homo sapien
gatccttaccctcatccttgcccgcgctgaccctccaccctgatcctaagttaacacgctatagcctccaccctaaccctgcgcatgtggatgggtgctagacccttgtccagaccagccggaggctggccagccccagcggggctgtactgtgtgcccttggggccaaggtggcagtggagcccctccttctcccctccttcgccactgacctgacattaggaacccctgcctgagcagggtgggggctgctgaggtcacccctcctccaggagctcccacagtcaggagaaactcctgcagaaccaggtccagaagctgatccaggagttgaaggaacagaaggagcgagcccagtgggtgaggcaggggcacagggagtgggcagggtcctggtgttggggagccaggctggggctggcctgggggccttctgcagaagacacccccccaccaccaaccacaggccctctcggagcaggagaaggagcacctggaggagcggctgctgcagaccacccgcacgctccaggagatggaggccgagctgcagaacttgcagaagtcctgcctcctgcagctggcccgctcctcgtgggtgggccgcatgctacgatcccagactggcagtgtggaggtgagcctgtcccccaagccctcctgccccaggctgccctccccagccctccccatctcgtcgggtgcctctgctggggcgccctggcctgcctggaagcctgccctgctcaggtgcctctggaactctgggctccagcagggaggaatcaggaggcctcaaagcacaggtgaggtcaaagaggagaggtgctgtaggggagcacccagcccctgcccactggcttccggtcccctcttgcaggtagtgacggcagagactctgatggacccaagcgacctctctgaaaacattcaggcccccaccggggaggtgagctaggcctcccacgtgtgtggtctggtatctggagccctgcgggaggggaggaccatgtgcctcttgcttcctggccagggctttcggctggaggacgtggattggaacagcgttgcccgccggtatcccaacctcttcaccaacatggagcccagctcaaagcaaaagtaactgcacagagcagggactccccaggggccagaagggagggctcaccttggcaagtgaagacgcaggacactaaaggaccatttagtgtccctggataagtctcttaaaccttccaatgcgcgttctctgatctgtagaatgcgttggggttgaggcagccatcactgtcctgccatgaactgagcctgggtactgggaggcaagaggggctccctgctgcactgccttgtgaggctggacgggggcagggctggggtctggagctggagtggccatcaagcagagcgtggtccacaggcagccccggccctggccacagctggacacagggagcccagagtcctctggaaagcattccgagcggcatcacaagaccgtggagtggggctccctgccctgtctgaacaccagcagctcagggggcgctgactccgactccagcagctgccggccgggcctgccttccttcgtgcaggtgatagggcacccgccccgggaccaccgcgcttcctccgagcaagcgctggtgcaggccggcagctacagcagggactcagaaggtgcagtggggcgggtctcccctggttacccttcacccaccctccaccccctcagagctgtgatctcactcagagccctggaggtggccctccagcccccaaggtccagccacctttcctgccccatctgaccctggccctgctccctgccccgccaggcgttgcaggcctgttctgacctcacggggaacatccggtggggactccattcgagggtcccctccccaaaagcgctgctctctctagatctccagaaaacccactcacccaggcacggcgagccggtcctgtcgccccagccctgcacagacccggaccactggagcccggaactcctgcagaggtaaggggcgagtgacccaagcctccggcgccggactggagctggtttccgggcggggcgcgcagctgtgcgggtggaccggccgcatctcctcacagcgtctcctctcttcccagcccgacaggcctgaagatcgtggctgtgagctgccgggagaagttcgtccgcatcttcaacccgtcgcaggagagcacggccgacctgagcggcatggtgctgaagcagctggtgcgcggcttcccggagcgcctgtaccgcttcccgccgggca

SEQ ID NO: 6346 - DNA, 2300 bp, Homo sapien
agtccctgctctgtgcagttacttttgctttgagctgggctccatgttggtgaagaggttgggataccggcgggcaacgctgttccaatccacgtcctccagccgaaagccctggccaggaagcaagaggcacatggtcctcccctcccgcagggctccagataccagaccacacacgtgggaggcctagctcacctccccggtgggggcctgaatgttttcagagaggtcgcttgggtccatcagagtctctgccgtcactacctgcaagaggggaccggaagccagtgggcaggggctgggtgctcccctacagcacctctcctctttgacctcacctgtgctttgaggcctcctgattcctccctgctggagcccagagttccagaggcacctgagcagggcaggcttccaggcaggccagggcgccccagcagaggcacccgacgagatggggagggctggggagggcagcctggggcaggagggcttgggggacaggctcacctccacactgccagtctgggatcgtagcatgcggcccacccacgaggagcgggccagctgcaggaggcaggacttctgcaagttctgcagctcggcctccatctcctggagcgtgcgggtggtctgcagcagccgctcctccaggtgctccttctcctgctccgagagggcctgtggttggtggtgggggggtgtcttctgcagaaggcccccaggccagccccagcctggctccccaacaccaggaccctgcccactccctgtgcccctgcctcacccactgggctcgctccttctgttccttcaactcctggatcagcttctggacctggttctgcaggagtttctcctgactgtgggagctcctggaggaggggtgacctcagcagcccccaccctgctcaggcaggggttcctaatgtcaggtcagtggcgaaggaggggagaaggaggggctccactgccaccttggccccaagggcacacagtacagccccgctggggctggccagcctccggctggtctggacaagggtctagcacccatccacatgcgcagggttagggtggaggctatagcgtgttaacttaggatcagggtggagggtcagcgcgggcaaggatgagggtaaggatctgcctcagcggttggggttggggtcagacagaaaccaggagtccgggcgaggacagggcggggttgggttgggctggggactgtgctgcagacctcttgggcggaagccccgccacctcttccaggatgtggcagagccgggcgtcctcgccattctggatggcccaccgcaaggcctggatctccagttctcgctgtctccacagcagccgcagtgtgcgagggtccagggactcaagagccaacctgcagcggcagcagaccctgctgcttactcaggccggcccctggccacctggcccaggaggctcaccagtcctccctctcctccttactgcgggtcggcagagcagaccaccggtgcggggtggggcgtggtgtctggcaggcacgtgggagtctcgggggctgcaggtgcgcctgctggaggtcccaggtgaccactgaccgactcttgctctgtgggggacaggagagcctcttcctcggtttcttcaacctcctggccagacttgggggccattctcaatgttcttcgggagctgggaggggtggggggcccgtctgccgtgtgcgcctcgtgtggccacacaggttggagcagcccaggcgtcaccacttactcacagagcgttgctctctgaagggacccacatgtgggtgtccacacccgtgtgtttctgaccaggctggcgcagcaggtcaccacccgacatgtccctggcgtgtacccctgccacccaggtgctggccctttgcctgtgatgtggtgtccctctttctctctcttgtccccccagctcagggccctacccccagcactcacctgaggcccgacctccaagcaggcctgggagggaagggctgtataccgttgccatggataccagcacccagaaggggtggggctgtttgttaccaggagcctccagggagaccccagaccaggcccctaggtgagttctgggccagcccagcctggaggaggtgtgagaggctgagccactgctcagcttagcggggggaccacttagtgaccaacaccctgagggaggccccagcatcccctacctagcctggcagcagcagcgggataaataggggggcactgctgcctgtgagccagcccagcatagccatgggtgtgtgggggaag

SEQ ID NO: 6347 - DNA, 2300 bp, Homo sapien
gtcaggtcagtggcgaaggaggggagaaggaggggctccactgccaccttggccccaagggcacacagtacagccccgctggggctggccagcctccggctggtctggacaagggtctagcacccatccacatgcgcagggttagggtggaggctatagcgtgttaacttaggatcagggtggagggtcagcgcgggcaaggatgagggtaaggatctgcctcagcggttggggttggggtcagacagaaaccaggagtccgggcgaggacagggcggggttgggttgggctggggactgtgctgcagacctcttgggcggaagccccgccacctcttccaggatgtggcagagccgggcgtcctcgccattctggatggcccaccgcaaggcctggatctccagttctcgctgtctccacagcagccgcagtgtgcgagggtccagggactcaagagccaacctgcagcggcagcagaccctgctgcttactcaggccggcccctggccacctggcccaggaggctcaccagtcctccctctcctccttactgcgggtcggcagagcagaccaccggtgcggggtggggcgtggtgtctggcaggcacgtgggagtctcgggggctgcaggtgcgcctgctggaggtcccaggtgaccactgaccgactcttgctctgtgggggacaggagagcctcttcctcggtttcttcaacctcctggccagacttgggggccattctcaatgttcttcgggagctgggaggggtggggggcccgtctgccgtgtgcgcctcgtgtggccacacaggttggagcagcccaggcgtcaccacttactcacagagcgttgctctctgaagggacccacatgtgggtgtccacacccgtgtgtttctgaccaggctggcgcagcaggtcaccacccgacatgtccctggcgtgtacccctgccacccaggtgctggccctttgcctgtgatgtggtgtccctctttctctctcttgtccccccagctcagggccctacccccagcactcacctgaggcccgacctccaagcaggcctgggagggaagggctgtataccgttgccatggataccagcacccagaaggggtggggctgtttgttaccaggagcctccagggagaccccagaccaggcccctaggtgagttctgggccagcccagcctggaggaggtgtgagaggctgagccactgctcagcttagcggggggaccacttagtgaccaacaccctgagggaggccccagcatcccctacctagcctggcagcagcagcgggataaataggggggcactgctgcctgtgagccagcccagcatagccatgggtgtgtgggggaagcagacaggtaacagtgacaagctggggactgtgctgaacgctaactggcaatagtacactcctgcccacagcctgtttttaaattaataattaattctttagagacagggtcttgctccgctgtccaggctggaatgcttcggtgtgatgacagcgcacgttaacctcgaattcctgggctcaggtgatcctcccacttccgcctcctgacttgctgaaactacaggcacccgcctccaccgccaggcccagcccacagctcctttgacctcagtgacaggcactcacctacctgacccccaaactgaagcctcacttttcccagccgtgtccacaccctctgggctaccccattaccatgacaagtattccctctgctccaggagaaaagccaggtcccagacctgacccattaaaacccaatcattccagctttcacccttcatctctgcaactttcggctatgtaagggctccctgggggagcacaggagacaggcgggcaggaggcccacgcccacaactctttctgagctgggcagaacaatcaatggcccacacagctgaccgcgaggctgcggggccctgggcgggacagtagggtagggggtgaaggagcggcttccagccagcttcactgtgtgcatggcctggcactgggtccaaaaggggcaggaaggtgtcggagaagagcctcagctagagtccgggccttctgagcgggcacctcccgcaccaggactctgcgcccgccagctccgcagggctccacctccctcgccgggactggtgaccctgcgaccccgcgacccctgcgcgtccagactactgcagctgcggtaggccccaaaggctggcccgggaagcgaggggaggggctggccccgctgcccctggacgcaggcgggggttgcgggatctcaagcca

SEQ ID NO: 6348 - DNA, 2300 bp, Homo sapien
tgcgggtcggcagagcagaccaccggtgcggggtggggcgtggtgtctggcaggcacgtgggagtctcgggggctgcaggtgcgcctgctggaggtcccaggtgaccactgaccgactcttgctctgtgggggacaggagagcctcttcctcggtttcttcaacctcctggccagacttgggggccattctcaatgttcttcgggagctgggaggggtggggggcccgtctgccgtgtgcgcctcgtgtggccacacaggttggagcagcccaggcgtcaccacttactcacagagcgttgctctctgaagggacccacatgtgggtgtccacacccgtgtgtttctgaccaggctggcgcagcaggtcaccacccgacatgtccctggcgtgtacccctgccacccaggtgctggccctttgcctgtgatgtggtgtccctctttctctctcttgtccccccagctcagggccctacccccagcactcacctgaggcccgacctccaagcaggcctgggagggaagggctgtataccgttgccatggataccagcacccagaaggggtggggctgtttgttaccaggagcctccagggagaccccagaccaggcccctaggtgagttctgggccagcccagcctggaggaggtgtgagaggctgagccactgctcagcttagcggggggaccacttagtgaccaacaccctgagggaggccccagcatcccctacctagcctggcagcagcagcgggataaataggggggcactgctgcctgtgagccagcccagcatagccatgggtgtgtgggggaagcagacaggtaacagtgacaagctggggactgtgctgaacgctaactggcaatagtacactcctgcccacagcctgtttttaaattaataattaattctttagagacagggtcttgctccgctgtccaggctggaatgcttcggtgtgatgacagcgcacgttaacctcgaattcctgggctcaggtgatcctcccacttccgcctcctgacttgctgaaactacaggcacccgcctccaccgccaggcccagcccacagctcctttgacctcagtgacaggcactcacctacctgacccccaaactgaagcctcacttttcccagccgtgtccacaccctctgggctaccccattaccatgacaagtattccctctgctccaggagaaaagccaggtcccagacctgacccattaaaacccaatcattccagctttcacccttcatctctgcaactttcggctatgtaagggctccctgggggagcacaggagacaggcgggcaggaggcccacgcccacaactctttctgagctgggcagaacaatcaatggcccacacagctgaccgcgaggctgcggggccctgggcgggacagtagggtagggggtgaaggagcggcttccagccagcttcactgtgtgcatggcctggcactgggtccaaaaggggcaggaaggtgtcggagaagagcctcagctagagtccgggccttctgagcgggcacctcccgcaccaggactctgcgcccgccagctccgcagggctccacctccctcgccgggactggtgaccctgcgaccccgcgacccctgcgcgtccagactactgcagctgcggtaggccccaaaggctggcccgggaagcgaggggaggggctggccccgctgcccctggacgcaggcgggggttgcgggatctcaagccagagacccttcctgggcgggaacccgccacactagaaggctgctgaggaagtcggcccaggagcggggccagacacctaccccgacgcctgcccgcgggccgcagccaccgcatttccgcgtttttcgcggtaggcgggaggtgggggcggggactgcggctcggcgcccccctccgacccgcccacacctgtagtctcggggggggcggggcgcggcgacgagccaatgggtcggggaggggcgtgacagaggcagccaatgggcgcggggagggggcggaacgcccgcgctgagcagccaataggggtgctaggggcggggcgtgcggaccgcgggccaatgggggcgcggggcccgggtgcgccgcggcgctgggggcggcaggttgcggcggcgccggagcgggtctccaggctggcgagcgcccaggtgagccgcgccgggtccccggtacttgggagcgcggggcgcgcctcgagccggccggacgccgactccaactggggagagttttccgcgatgcccggacggagagcgggggcggcgccgca

SEQ ID NO: 6349 - DNA, 2300 bp, Homo sapien
aggcccgacctccaagcaggcctgggagggaagggctgtataccgttgccatggataccagcacccagaaggggtggggctgtttgttaccaggagcctccagggagaccccagaccaggcccctaggtgagttctgggccagcccagcctggaggaggtgtgagaggctgagccactgctcagcttagcggggggaccacttagtgaccaacaccctgagggaggccccagcatcccctacctagcctggcagcagcagcgggataaataggggggcactgctgcctgtgagccagcccagcatagccatgggtgtgtgggggaagcagacaggtaacagtgacaagctggggactgtgctgaacgctaactggcaatagtacactcctgcccacagcctgtttttaaattaataattaattctttagagacagggtcttgctccgctgtccaggctggaatgcttcggtgtgatgacagcgcacgttaacctcgaattcctgggctcaggtgatcctcccacttccgcctcctgacttgctgaaactacaggcacccgcctccaccgccaggcccagcccacagctcctttgacctcagtgacaggcactcacctacctgacccccaaactgaagcctcacttttcccagccgtgtccacaccctctgggctaccccattaccatgacaagtattccctctgctccaggagaaaagccaggtcccagacctgacccattaaaacccaatcattccagctttcacccttcatctctgcaactttcggctatgtaagggctccctgggggagcacaggagacaggcgggcaggaggcccacgcccacaactctttctgagctgggcagaacaatcaatggcccacacagctgaccgcgaggctgcggggccctgggcgggacagtagggtagggggtgaaggagcggcttccagccagcttcactgtgtgcatggcctggcactgggtccaaaaggggcaggaaggtgtcggagaagagcctcagctagagtccgggccttctgagcgggcacctcccgcaccaggactctgcgcccgccagctccgcagggctccacctccctcgccgggactggtgaccctgcgaccccgcgacccctgcgcgtccagactactgcagctgcggtaggccccaaaggctggcccgggaagcgaggggaggggctggccccgctgcccctggacgcaggcgggggttgcgggatctcaagccagagacccttcctgggcgggaacccgccacactagaaggctgctgaggaagtcggcccaggagcggggccagacacctaccccgacgcctgcccgcgggccgcagccaccgcatttccgcgtttttcgcggtaggcgggaggtgggggcggggactgcggctcggcgcccccctccgacccgcccacacctgtagtctcggggggggcggggcgcggcgacgagccaatgggtcggggaggggcgtgacagaggcagccaatgggcgcggggagggggcggaacgcccgcgctgagcagccaataggggtgctaggggcggggcgtgcggaccgcgggccaatgggggcgcggggcccgggtgcgccgcggcgctgggggcggcaggttgcggcggcgccggagcgggtctccaggctggcgagcgcccaggtgagccgcgccgggtccccggtacttgggagcgcggggcgcgcctcgagccggccggacgccgactccaactggggagagttttccgcgatgcccggacggagagcgggggcggcgccgcacctgcgcccgccctgcggaacggggacgccctggctcccgccaggctggggtcgcggcgcgggcttcggtgcccgcggcggggaccgggactttcggggcgagcgcagcgattaggcggcagcggcggggctccccgggctggcgggggctgctcagacccggagtctgctccatctgcagggtcgaggtctgggttgcgaccccgagcgcctctgcggcctgagcaggtcggggtggggcgttcccatgccggcggccgcggggcctggcgtgcgggcgcctccgcgccgcccggggagggggcagtgtcctccgagccaggtgaggcgagtaggaaatgctggatctggttaatgattcgccttgttccgggagtgcgagcgtggcaagaggaagctggtgaagtgggggaggatgcgtgctccggagggccgccaccccaggaatgtgtggctggcgggtggggctggcacaggagggtggggcccgtgcg

SEQ ID NO: 6350 - DNA, 2300 bp, Homo sapien
caggtccccgggctcacctgcctcccgagtgggaccctgtgatccccgtatctgcccatatcaggggtgggggagtgacaggggatcaggtccccgggctcacctgcaaggctcgctctgctgcctccagggcccggctcaccagagccaggctgccctgcacctccgcactctgccgctcctgaacagccaggtcctggtgcaggcgctcagtggcagatgccataggtgaggggggcccaggggcctccgctgccagctgcagctcagcctccagggcacgggcctgagcgtccagggcctgcagccgggcggcatgctcagcagtggccgcacttagtgcctgcaggcgtgcctgtccctctcgctcccgggcctgctcccggcgcagctcttgctcccagaaggcctcatggcccagctcctcagcattcctctgcaccctgagctccaggccccgcaggtctgtgcagcagcctggtgtgggtgtcacaggggccgcaggcccagggcgtgagaggctgggggctggctcgggggtcagtgttttgcggggctcacagcccagcgcagcccgtggctttacagggaggctggcacgaattaggcagcgttccgggggtggacagctgtctgaggagggcctcccagctaggctgggccctgtgcgcctcaggacaaactggacatcgctggcaaactgtccgcaggtggcctgggcgcccactggacactcttgtggcagcaactgccgctccttctcccgaagccgctgcacaagcacaaagcggccagtctggcctgggaagaagaggagaaggtcagcctatgtccccccgactctctgtccacctggcttgaagagttgggaagaacaaaaaggatcagcaaccagccccactctccttgggggagaccatggagctggaccaccaggtcccacttcagctctacctgcccggcctgcctgaccccgagaggactcacctattgcttgggctagtgcgatgaccacttcctggcaggtggtctgctctgagaccccacagaccacacgctggatgccatccacccacaccttcagctccatggccgccagtcccaacaacatgcctgtcctgtggggagggcgcaggcaccgggtcaggacctgcctactcctatcgcaggctggtcctcctctcctcatcctcttggcctgccctagaaacggctgggctgccgcccctccgcacgggccccaccctcctgtgccagccccacccgccagccacacattcctggggtggcggccctccggagcacgcatcctcccccacttcaccagcttcctcttgccacgctcgcactcccggaacaaggcgaatcattaaccagatccagcatttcctactcgcctcacctggctcggaggacactgccccctccccgggcggcgcggaggcgcccgcacgccaggccccgcggccgccggcatgggaacgccccaccccgacctgctcaggccgcagaggcgctcggggtcgcaacccagacctcgaccctgcagatggagcagactccgggtctgagcagcccccgccagcccggggagccccgccgctgccgcctaatcgctgcgctcgccccgaaagtcccggtccccgccgcgggcaccgaagcccgcgccgcgaccccagcctggcgggagccagggcgtccccgttccgcagggcgggcgcaggtgcggcgccgcccccgctctccgtccgggcatcgcggaaaactctccccagttggagtcggcgtccggccggctcgaggcgcgccccgcgctcccaagtaccggggacccggcgcggctcacctgggcgctcgccagcctggagacccgctccggcgccgccgcaacctgccgcccccagcgccgcggcgcacccgggccccgcgcccccattggcccgcggtccgcacgccccgcccctagcacccctattggctgctcagcgcgggcgttccgccccctccccgcgcccattggctgcctctgtcacgcccctccccgacccattggctcgtcgccgcgccccgccccccccgagactacaggtgtgggcgggtcggaggggggcgccgagccgcagtccccgcccccacctcccgcctaccgcgaaaaacgcggaaatgcggtggctgcggcccgcgggcaggcgtcggggtaggtgtctggccccgctcctgggccgacttcctcagcagccttctagtgtggcgggttcccgcccaggaagggtctctggcttgagatcccgcaacccccg

SEQ ID NO: 6351 - DNA, 2300 bp, Homo sapien
tggagtgcagtggcgtgatctcagctcactgccaacctcccaggttcaagcgattctcctgcctcagcctcccaagtagctgggattacaagctcacactaccatgcccggctgatttttttgtatttttagtagagatggggtttcactatgttggccaggctggcctcaaactcctggcctcaggtgatctgcccacctcggcctcccagagtgctgggattacaggcttgagccaccacacccggcctgttttccctgtcttttataaggacactgatcattggatttagggcccacccagaaagtccaggatgatctcgtttcaagatgtttcccttaatgacatctgcaaagatgctttctcccgatgagggcacatttaggaagcctgggtattaggatgtggatatatcttctttttggcggagggaccatcccactcactacagatgctgagaaaaggtgcctgtgaaattggcaggactgggggcagaagtgggttcacgtcagcagggcacgacaggaacacagagctgccctgtcctcttgccccttcttgtcccctagtctgactgccctaggagcctctgccctgccatgaagacgtgggccttctcagggaccccactgactcttagaggctccttcacgacccacaggatcgaggtcttgctgacccctgacccccaatagaaccgagtggctccgtgatcctctgggcaccttccccatccacaggcagccacaggtgcaaggagccactcggttctatcgggggccaagggtcaaggggtcagcaagacctcggtcatgtcttgctgatcatgtctgagtcaccccagactctgcatctgaatttttgtccccagccttcaagcccctgaggacatgggctggttcggaagctccctggggccccagcactttgccgccggggctggggcagggggcaggctgcggcccaggcctgcgcggatgccgaggcagggaggtcatggggccaggggaggacaaagagcagggcggtgagtttagggccagggagctgaggggagacggcccggggccgaggaccagggtgacagtgccaaggggggccggcggccaaatctcctttggctgccactttggagccccaccccggagtccgatacttccacgtctgaagctggccctgcgagtcctaacgaaggtcaaaccgtcaaggctcctttgattttacacgttttcagcgcacagacaggattctctcgcctcgtcccctcaaagaccggcacagggctgcgaagacccctgagcccttgaggcaccccctccaggctccagaggcttccgcggagacagagcgcgcaggagggacccagagcccccaagggcgccccgtgggggtcgccaggcaaaccaggcagagccagagccccctcttcgccagcaggacggacccgggcgtcctttggggaccccaagccgcccggggggtggtgcgtgcgtcccgaggacgccgtgtccgggcccgcgcaggccccacccgggtcacggcccgggatacgtgcgccgggcgcccagcgggttggggggggcgggcccgcgggacgcgggtgcggggcacggaggcggccgggtcgtaccaccgcgccgcgggaagaggggcagctcccggccggccctgccgccccacgcacacccgcgggcggaggacccgtcgccaggctgcgccccacgcccagcccggaagccccgcgagcccgggccataccaccgcgcggcgggaggaggaccacctcgggccgtaccatccgcccggccgggggacgcgccctggccccgccgcgccctcgcagctggcgccccgcaggccccgcccggcaggtgccgcccctccccgggcagacgtgcagaaaagaacgcgccggcctcgcccgcgaagggccgcgcggcggtgggcggggcgtcgcgaacccccctcgcgcccactggctgcgttgcggtagggcgggcccggctaggccggccattggctgagggaccaggtcatttgcatacggggctgggcgtggagccgcggggcccggggccggtcgggtcgggccggggggcgagagggtgccagcggccgcagctgaagttgggccgagagccggcgacggccccgcgccggggtcgcaggtgacgcgcgagggatcccaggttggcgggcggggcgcccctcagaggccgccctcccgcgggggctgcggggggtcgggctgggcaggcgcggcggggctcggacgcccaagttggaggggacgggggtg

SEQ ID NO: 6352 - DNA, 2300 bp, Homo sapien
tatcacttagaagattcaccctccttaccctgcccccttgtcttgtatgcaataaatatcagcgcacctaggcgctcagggccactaccggtctccacgtcttgatggtagtggtcccccggggcccagctgctctttatctcgtgtctttattacaatctctggtctctgcacacggggaggacacctgctaagcccccgtagggctggaccctacagaaaaccacacccctctcttgccctgctccttagttacctccacctttaccttcccctttgcagcaaattgacctgaaagagaagttggtgttcacagcccctgcgtgctctctgctcactctccaaactccagcccctggccccagcgccgctggccctcggtgagtcgcagtggcccaccctgctgcacccaggctccctcccccgcctgtgtgtgcacgccctctctggcttccagaagcccctctcctggtttgtcctccggcccccacccctagcaccccctgtgccccttcctagtctcctttgcagattccaaacctcttcaagttggagtcccagagttcaggcactggtccccagtcacaccccacatgcgattcccacatagttctcttcatccagtgcagcctctgcccactgcatctcctctgacacgtcccattcccccaagggcgctagataaaggggcacctgcggacacacacgctgaggctcctgggaaggaggaccgaccgcctgtgttcagcttagagcccccgacctccatctgtcgctgctcctcgggggctgctggtagttgtcataataaacacagacacccacgatgagacgtgaacacgctcctcagtgagcattcttgggcagtgcacaacctccccagccatgccagcccgcgctcaggcctcccccgtcttccccgtctctccggcgtcggttctcaagctcgtccttccccgcctcatttctccaaaagtccgcagcaaatcctggcaactccgccttcagcatctaccgggagccggcacttcccacacctgcgcagacccacccgggccccagcccaggcagcccctgcacggggagcccgcgggtctctggcgcccgctcgggacgcctccccagcgctccccgcagagcggccagggggtctcgcgagtccgcgccagctcgggatccccggagcctcccctggtgcgctgcagccacgcaggcctgcgtcccgaggcccacacggcttctgcgcggcatcctcaggacgacctggagccaaatccacacgggacggcacagcagcgtcctgccgagcccgcctcgtccgccagcgcgcacgattcaccgcgcctgctgcgggacgggcggacgcggggctgggctggaatagccggctcacggagggctccggcagtgtttgttcagaggagcgcggcgctggtagcaggcgacgccaggactcttctccccaggtgctcccgccgcgcgcggggctagggaggagctgcgggcggggttgcggcgtgggggcggggctgcgagggtgggggcggggctgcggagcagcgggcgtgaggcggggctgcgagggagggggcggggccgtgggcggccgtcccgaggcagggcggggctgcagacgtgggggcggagctgcgggcgcgaggcggggcggggctgcgggggtgggggcggggctacgtgcgtgggggcggggtggggctgcgggcccgaggagggacggggctgcgggcgtgggggcggagctgacgtacaggaagcagctcccattcgctctgggcggtgggcggagatccgggcggtaccagctgtcccggccgcgggggggacggcctggaccagcccatggtcgcgggttaaacagtacgagctcttccaggatattggtctccccgggcggcagtcctgcattaaagagtgtttccaaggtggaagggaggccgtttgaacgcctcgagacccccggctgcaaggagtggcaccttcctcacttcagtcatttctttcccgctctggtctcagtggttccagtcagcgagcaggacagaggagcccggaagaggcgccgtgcacttccgggtcgaagagcgcacggcggcggcagaggcggcggcggccgggcctaggagcgactctcggtcgtgcagcggcggcgagcgctcgcgagcggctgcgggacgcgaggtttccgggtaagtgcggcggccgcgccggccctgggggccctgctcctccgggccgcgggccgcctgtgggcgccacgcgctttgtctgcggcctgcacc

SEQ ID NO: 6353 - DNA, 2300 bp, Homo sapien
ctagcagagctctggggtggaggaaccactgtgactctcctgcttagcctccagatttgggggattaaagaggaaaacaaaaaactggaaaggctatttctctctcttttcaaattcaggggaaccaatgcattggcagtcccaactgttactaaggaatgaaaagggcctctggtgtccggggtgcctgcaaccccgttccacgccagtctcggcacctgagtgcccatcccaggcactgaacaagcctgcagccaagtccaacacctcaactcaggccgacttttattcttgtattcaccatctgctgtatcagctaggagaactcaaaattgtcaactgcaatggaagtcaaaaagtcaggcacgcacaaaggtctccgcgggcctgagataaacacagccctgctgagggccaaggccaggcttgtcatggccatgatgctgaggtgccatccatccactagcactctgacttaacattcttccaataagaaagaaaaccggatggtccaggagagagatcaactatgccaaacccgaagtcaaacctcagctcggcctcagagcctgtccattgaccactggccagaacgtggttcacccagctgactgctgttctgctgttgtcgaaacaagtaaagcacataaactccgaagaaggggcaacacaagccccgtcaaaaggagcatggtaggagtcggggctggcgcggatccccggctgccggcgctggccagttacttagcctttctgggctccaatcccctcctctgtaaaacgggaacaatacctacacctgagaggctcttgtgaggactgcaagagttaaggaataggaaaaccgccagccacacaggcctgtggacatgcagacaaggccagaagcccacgacggcaaccatgcacaggggccggacacaaggcaacgaagtcacagctctctcccaaacgcggcagggcggactcgcagggggcatgggcgtgggtgccacagagcgaggcgagtgggctctcgccgcgtcctcgcaagcccaggacgtccgcccgcaggccacgggcctcccagtctcggcggggcctcccagtctcggcggggcctcccagtctcggcggggcctcccagtctcggcggggcctcccagtctcggcggggcctcccagtctcggcggggcctcccagtctcggcggggcctcccagtctcggcggggcctcccagtctcggcggggcctcccagcgcgcgcgcgcccgcccgccctcccggcccgcggccagcgcggcgcaggcctcgccccgcggtgcaggccgcagacaaagcgcgtggcgcccacaggcggcccgcggcccggaggagcagggcccccagggccggcgcggccgccgcacttacccggaaacctcgcgtcccgcagccgctcgcgagcgctcgccgccgctgcacgaccgagagtcgctcctaggcccggccgccgccgcctctgccgccgccgtgcgctcttcgacccggaagtgcacggcgcctcttccgggctcctctgtcctgctcgctgactggaaccactgagaccagagcgggaaagaaatgactgaagtgaggaaggtgccactccttgcagccgggggtctcgaggcgttcaaacggcctcccttccaccttggaaacactctttaatgcaggactgccgcccggggagaccaatatcctggaagagctcgtactgtttaacccgcgaccatgggctggtccaggccgtcccccccgcggccgggacagctggtaccgcccggatctccgcccaccgcccagagcgaatgggagctgcttcctgtacgtcagctccgcccccacgcccgcagccccgtccctcctcgggcccgcagccccaccccgcccccacgcacgtagccccgcccccacccccgcagccccgccccgcctcgcgcccgcagctccgcccccacgtctgcagccccgccctgcctcgggacggccgcccacggccccgccccctccctcgcagccccgcctcacgcccgctgctccgcagccccgcccccaccctcgcagccccgcccccacgccgcaaccccgcccgcagctcctccctagccccgcgcgcggcgggagcacctggggagaagagtcctggcgtcgcctgctaccagcgccgcgctcctctgaacaaacactgccggagccctccgtgagccggctattccagcccagccccgcgtccgcccgtcccgcagcaggcgcggtgaatcgtgcgcgctggcggacgaggcgggctcggcag

SEQ ID NO: 6354 - DNA, 2300 bp, Homo sapien
ctcgtagatgccatccccgtctctctgttcatctttttctttgttactggattcagagtgaagccaccactcgctctcgaatcgcgcggacgctgggcctgcgcaggcctgttcacagcagctgcatcccgtcagtgttgaagccagtggagccctctttggggctgctgagagcggatattggagctgcctctctgtctctgtttggagatccttatgagctggatcccttcgacaggtgagtgaactggtgatggtcctgcctgggcacccgctcctctccctgggggctgtgggcacggggccccgaggtgcatgcggaggcgttaggttttgtgtttgagagtgagggtggccattcctcccaccgccatacggtgcaggtgggtggcgtggaactcagaggtctggttcggggcccgaatcacacgtgccgccacatggccagtgctcggccatcctcctccgtgccgtctccctgggctggggtttctgggagctgggagtcacttgttccctttggcctgtgtcctcccctctagcagtgaagagctttctgcaaaccctctttcccctctgagtgccaagagacgggctctgtcccggtcagccctgcagtcccaccagcccgtggccaggcccgtctccgtggggctttccaggtgtgtgagggcagaggcttctggggaggtgggggcagcagttgggcatcggatgggagttctagggtggggccgtgatagcctggctctctgtggccctgggtggcgtcagcacctcccctcagctgtcatgctcatcagtcggcccttggcgtgaggcagtgctgcagcccatcctgtgtcagaggccacggcctgcctgtgagcgtggactgggagttgctgcagctccacgaggtggcccctctgccccccaccccggcctgagagccaccagcacagggacaccgcctcgggcaggagcagtggccctggtgaataaggctgtcatcagaggtcaccttttggccagttcttttgtttcgccacaagaacaaaaaattaaccaaaaccaacaaaacaggtaaaggtgcttgtctgccccctcccacctgttggtggagttgggggtggcaaaggcaccagaggtgacttctcccaaaaacgcctggtttccctggggccagagctgcgaggtggggctccctccctccctccctctgggaggccccggtgagcacctcttagaacagcagccggagccagggctgtgggggaggcgcaggcccggcccagccccactctccctggctcccgcctgctgcggggctctgcctgggtgcgggccctcaggccgtgggaggcagtgacggcagggccttgggtctgtgcccacaggaggcgcctccctgccgcggtgccagagccagacttggaggaggagccagtgcctgacctgctgggcagcatcctgtcgggccagagcctcctgatgctgggcagcagtgatgtcatcatccaccgcgacggctccctcagcgccaagagggcgggtgagtgccttccctgccacggccccttcctctgtgggctgctggtcctcaggctgttcgcaagcactcagcccatgtctcagtcacggaagatgtagctgaagttggggggaccattcctcagccatttttctgcattgatttcccttcttgagcagtttctcagttagctccgagttcttacccagccccacagcttcatgttcataagaacatgtcctgatggggtactgcccccgcccctggttaatatcgtgtcctgatggcctcaggcactgtactttgtcatccacagagtggctgttgaagcagctctccgggtgtggaaaggcgaggtgtccacctcaacaggcagacaggagtttaaagcgcacgacctcacagaaaaccagttgtgataaaaattaaaccactgacatttaagaagagtgggtgggaaatgattgccattgacttttttgttttttagctccagtttcttttcagcgaaactcaggcagtctgtccagaggggaagaaggattcaagggctgcctgcagccccgagcactgccctccgggagcccggcccaaggcccgtcaggaaacaggccacagagcacagggctcagctgtcaaggcaggtcccgcacccccgcccgcaccgcgggggcgcctgtgaggctggacttgccagcagcccctggggcggttcaggctcggaacttgtcaaatgggagtgtgcctggcttcagacagagccacagcccctggttcaacggcacca

SEQ ID NO: 6355 - DNA, 2300 bp, Homo sapien
tgctggtcctcaggctgttcgcaagcactcagcccatgtctcagtcacggaagatgtagctgaagttggggggaccattcctcagccatttttctgcattgatttcccttcttgagcagtttctcagttagctccgagttcttacccagccccacagcttcatgttcataagaacatgtcctgatggggtactgcccccgcccctggttaatatcgtgtcctgatggcctcaggcactgtactttgtcatccacagagtggctgttgaagcagctctccgggtgtggaaaggcgaggtgtccacctcaacaggcagacaggagtttaaagcgcacgacctcacagaaaaccagttgtgataaaaattaaaccactgacatttaagaagagtgggtgggaaatgattgccattgacttttttgttttttagctccagtttcttttcagcgaaactcaggcagtctgtccagaggggaagaaggattcaagggctgcctgcagccccgagcactgccctccgggagcccggcccaaggcccgtcaggaaacaggccacagagcacagggctcagctgtcaaggcaggtcccgcacccccgcccgcaccgcgggggcgcctgtgaggctggacttgccagcagcccctggggcggttcaggctcggaacttgtcaaatgggagtgtgcctggcttcagacagagccacagcccctggttcaacggcaccaacaagcacaccttgccccttgcctctgccgcgtctaagatctcaagcagagattctaagcccccatgtcgcagtgtggtgccggggcctcccctgaagccagcgcccagaagaacagacatctctgagctacccaggataccaaagatcaggagagatgacggtggtggcagacgggatgcggccccggcccacgggcagagcattgagatccccagtgcctgcatcagccgactgactggcagggagggcaccgggcagccagggcgaggcacacgggcagagagcgaggccagcagcagggtgccccgggagcccggggtgcacacgggcagctcccggcccccagcccccagctcccatggcagtttggccccactgggaccatcaagagggaaaggggtcgggtcgacctttgagagcttccggatcaatattcctggaaacatggcacattccagccagctctccagccctggcttctgtaacacgttccggcctgtggacgataaggagcagaggaaggagaacccctcacccctcttctccatcaagaagacgaagcagctgcggagcgaggtctacgacccatccgaccccaccggctccgactccagcgcccctggcagcagccccgagaggtctggccccggcctcctgccctctgagatcacacgaaccatctccatcaacagcccgaaggcccagacggtgcaggctgtgcgctgcgtcacctcctacacggtggagagcatctttggtacagagcccgaaccccctctcggaccgtcctccgccatgtccaagctccggggtgcagtggctgccgagggggcctctgacacggagcgagaggagcccacagagagccagggcctggctgcccggctgcggaggccatcccccccagagccctgggatgaggaggatggggcgtcttgcagcaccttctttggctctgaggagcggacggtgacctgtgtgactgtcgtggagccggaagccccacccagcccggacgtgctgcaggctgccacccacagagtcgtggagctcaggcccccttcccggtcccgctccacatccagctcccgcagcaggaagaaggccaagaggaagagggtgtccagggagcacggacggacgcgctctgggacgcgctctgaatccagggacaggagctcgaggtcagcgtcaccatcagtgggtgaggagcgccccaggaggcagcggtccaaggccaagagccggcggtcctccagtgaccgctccagcagccgagagcgagctaagaggaagaaagccaaggacaagagcagggagcacaggcggggcccctggggccacagccggaggacgtcccggtcgcggtcggggagccctggcagctcttcctatgagcactatgagagtaggaagaagaagaaaaggagatcagcgtccagacctcggggaagggagtgctcccccaccagcagcctggagaggctctgcaggcacaagcatcagcgggaacgcagccacgagcggccagacaggaaggagagtgtggcgtggccccgagaccggaggaa

SEQ ID NO: 6356 - DNA, 2300 bp, Homo sapien
ccacagcccctggttcaacggcaccaacaagcacaccttgccccttgcctctgccgcgtctaagatctcaagcagagattctaagcccccatgtcgcagtgtggtgccggggcctcccctgaagccagcgcccagaagaacagacatctctgagctacccaggataccaaagatcaggagagatgacggtggtggcagacgggatgcggccccggcccacgggcagagcattgagatccccagtgcctgcatcagccgactgactggcagggagggcaccgggcagccagggcgaggcacacgggcagagagcgaggccagcagcagggtgccccgggagcccggggtgcacacgggcagctcccggcccccagcccccagctcccatggcagtttggccccactgggaccatcaagagggaaaggggtcgggtcgacctttgagagcttccggatcaatattcctggaaacatggcacattccagccagctctccagccctggcttctgtaacacgttccggcctgtggacgataaggagcagaggaaggagaacccctcacccctcttctccatcaagaagacgaagcagctgcggagcgaggtctacgacccatccgaccccaccggctccgactccagcgcccctggcagcagccccgagaggtctggccccggcctcctgccctctgagatcacacgaaccatctccatcaacagcccgaaggcccagacggtgcaggctgtgcgctgcgtcacctcctacacggtggagagcatctttggtacagagcccgaaccccctctcggaccgtcctccgccatgtccaagctccggggtgcagtggctgccgagggggcctctgacacggagcgagaggagcccacagagagccagggcctggctgcccggctgcggaggccatcccccccagagccctgggatgaggaggatggggcgtcttgcagcaccttctttggctctgaggagcggacggtgacctgtgtgactgtcgtggagccggaagccccacccagcccggacgtgctgcaggctgccacccacagagtcgtggagctcaggcccccttcccggtcccgctccacatccagctcccgcagcaggaagaaggccaagaggaagagggtgtccagggagcacggacggacgcgctctgggacgcgctctgaatccagggacaggagctcgaggtcagcgtcaccatcagtgggtgaggagcgccccaggaggcagcggtccaaggccaagagccggcggtcctccagtgaccgctccagcagccgagagcgagctaagaggaagaaagccaaggacaagagcagggagcacaggcggggcccctggggccacagccggaggacgtcccggtcgcggtcggggagccctggcagctcttcctatgagcactatgagagtaggaagaagaagaaaaggagatcagcgtccagacctcggggaagggagtgctcccccaccagcagcctggagaggctctgcaggcacaagcatcagcgggaacgcagccacgagcggccagacaggaaggagagtgtggcgtggccccgagaccggaggaagcggaggtcccggtccccaagctcggagcacagggcacgggagcacaggcggcctcggtcccgtgagaagtggccgcagacccggtcccattccccagagaggaagggggctgtgagggaggcttccccagcgccccttgcacagggggagccagggcgggaagacctccccaccaggttgccagccttgggggaagcacatgtctcgccggaggtggctacggccgacaaggcccccctgcaggctccccctgtcctggaggtggcagctgagtgtgagccggacgacctggacctggattatggcgactccgtggaggccggacacgtctttgatgatttctcaagcgacgccgttttcatccagctcgatgacatgagctcgccaccttctcccgaaagcacagactcttccccggagcgagacttcccactgaagcctgcgttgcccccagccagcctggccgtggccgccatccagagggaggtgtcattgatgcacgatgaagacccttcgcagcccccacccctgccagagggcacccaggagccacatttgctcaggccggacgcggctgagaaggctgaggcacccagttccccggatgtggcgcctgcggggaaggaagacagcccctctgcgagtgggagggtacaggaggcagcccggcctgaggaggtggtttcgcagacccccctgc

SEQ ID NO: 6357 - DNA, 2300 bp, Homo sapien
ctctccttggcctcgccgtccttgtccacaagcactatggcccccggctcaagtgctgctgtggcaaagctccggtgaggcccaggatggagaacagggcaggcgaccaggcaggaagtgggggacgggggacaggagaggggagggcagagggacagatgtggagacggaggggtgtccagcgtggaatgagggtgtgcagggccaaggctgcagagacccagggaccccgctgacgcctcgactcccgcctgcaggagccccagccccaaggctttgacaaccaggcgttcctccctgaccacaaggccaactgggcgcccgtccccagccccacgcacgaccccaagcccgcggaggcaccgatgcccgcagagcccgcaccccccggccctgcctccccaggcggtgcccctgagccccccgcagcggcccgagctggcggaagccccacggcggtgaggtccatcctgaccaaggagcggcggccggagggcgggtacaaggctgtctggtttggcgaggacatcgggacggaggcagacgtggtcgttctcaacgcgcccaccctggacgtggatggcgccagtgactccggcagcggcgatgagggcgagggcgcggggaggggtgggggtccctacgatgcgcccggtggtgatgactcctacatctaagtggcccctccaccctctcccccagccgcacgggcactggaggtctcgctcccccagcctccgacccgaggcagaataaagcaaggctcccgaaacccaggccatggcgtggggcaggcgcgcgggtccatgggggtcccattcactcagtcccctgtcgtcattagcgcttgagcccaggtgtgcagatgaggcggtgggtctggccacgctgtccccaccccaaggctgcagcacttcccgtaaaccacctgcagtgcccgccgccttcccgaggctctgtgccagctagtctgggaagttcctctcccgctctaaccacagcccgaggggggctcccctcccccgacctgcaccggagatctcaggcacccggctcatctcagacctcccgctcccgaccctacacagagattgcctggggaggctgaggagccgatgcaaacccccaaggcgacgcacttgggagccggtggtctcaaacacctgccgggggtcctagtccccttctgaaatctacatgcttgggttggagcgcagcagtaaacaccctgcccagtgacctggactgaggcgcgctgggggtgggtgcgccgtgtggcctgagcaggagccagaccaggaggcctaggggtgagagacacattcccctcgctgctcccaaagccagagcccaggctgggcgcccatgcccagaaccatcaagggatcccttgcggcttgtcagcactttccctaatggaaatacaccattaattcctttccaaatgttttaattgtgagagtatctgatattcttgactgaacaatgtaaaaaacccaaagggggctgcgcacggcggctctcgcctaaatcccagcactttgggaggccgaggtgggcagatcacctgaggtcgggagttcgacaccagcctgaccaacatagagaaaccccgtctctactaaaaatacaaaattagccgggcgtggtggttcatgcctgtaatcccagctactcgggaggcttaggtaggagaatcacttgaacccgggaggcggaggttgtggtgggccaagattgtgccaccgcactccagcctgggtaacaaaagcgaaactccatctcaaaaaaagaaacgcaaacggtgcagctgcccctttttcgaggcacgtccacctcccattacccacttccttttttttttgagactgagtcttgctctgtcccctgggctgtagtggagtggctccatctcggctcactgcagccactcccaacgccctccactcctccctactccgcgctggccggggcggggttccgctggtcgcatccaataataagaacaggcggcgcgcgcccttcccggaaactcccgcctggccaccataaaagcgccggccctccgcttccccgcgagacgaaacttcccgtcccggcggctctggcacccaggtactggggaccccagacccacgcggtgcaggccgggagcgagagcctccgtgggggctccgtgaccccggaggggtagagccaagagctgggggagcctgagagatgagggtcgggcggggagggaggcggaggcggaggcggggttccgcggagctgagaaccggacggggtgggatcgagga

SEQ ID NO: 6358 - DNA, 2300 bp, Homo sapien
aaaacagagaaaagaaaatggattgtctttcctcacctgagattctgctggctgcatccccaagtacctgcattatttttctgtggagcacctgccacctcctggctttataaagtcctttttgtctgttgttataagtcctgccaggacaggcaccaccaggcagagatttgtctcttgtgatctctgaatcccaacgcctagagctgtgcagcccctgtagccccccaacaactgaatgagcgagtggacggatggccgtcgaggggtgcaccccactcacggcggggacgggtggccgttgaggggtgcacctcactcacggcggggacgggtggccgttgaggggtgcacctcactcacagcagggacgggtggccgtcgaggggtgcacctcacttagggcggggacaggtggccgttgaggggtgcacctcactcacggtggggacggatagccgtcgaggggtgcacctcacaacggggaggggctgtgggagaggctgacggccacatcctgcaggtgacccagctaagggtgttcgtgtcagtgctggacgtcaatgacaatgcccccgaattcccctttaagaccaaggagataagggtggaggaggtgaggccagcgaagccgcggggactgggcacgggggtgtgggagcccagggtgagggcaggaggtgagtggtggccgggggctcaaccacagtgggggtccacaggggccaagagtgtggccggaccaagcccctctccctccccaggacacgaaagtgaactccaccgtcatccccgagacgcaactgcaggctgaggaccgcgacaaggacgacattctgttctacaccctccaggaaatgacagcagtcagtgccgcccaccctgccccagcacgagcccctcgcctctgacacccacagccgccctcgccctccaaggctcttaggctctgtcctccctgaccctccccagggtgccagtgactacttctccctggtgagtgtaaaccgtcccgccctgaggctggaccggcccctggacttctacgagcggccgaacatgaccttctggctgctggtgcgggtgagcaggtcaccccagccccgagtcccacacacttgaggccccccggccccagctgctcccaggcctgatccagcacagccgtctgttgcaggacactccgggggagaatgtggaacccagccacactgccaccgccacactagtgctgaacgtggtgcccgccgacctgcggcccccgtggttcctgccctgcaccttctcagatggctacgtctgcattcaagctcagtaccacggggctgtccccacggggcacatactggtaatggggagggaggggcagtgcacggggcagggccttctaggcaggctggacacagggacggccaggatcaggagaggaagggcggggtcggggtcagggggtggggccgatttcggtcgtgattttgaaacaaatgcagactctccttgtaaaccaacccttcccatcttgagcggtgagggagcaaaccctgaacacacagggaggagcgtgggccccagagccaggcggtctcaggggcctggggaggtgggctggggccctggagctcttaagggatgctgacatctctgccctgctcacagtcaccactgggcccacacaggctgtctgcaaaccttcctggcaccaaggcacctggggccaccaaacagtacatgggaggcagaaatgcagaccccgggagcccccacttcctaaatgtttgcttacccgtcaagacaagccttgtgcaaatgggactcagtatctttgggccactggactcattcattagtaagggacccacaggggtgttactgattgtgatgctgggacaagggactgtcctaggcaggcagggacgcccggccaccagcgggactgggcccctcctcagccaaccctgcccttgatggggagtcagaggggccaggctggggccatccaccccagccccacgacgtgccctcccttccgccatccctgaagccatctcccctcgtcctgcgtcccggacccatctacgctgaggacggagaccgcggcatcaaccagcccatcatctacagcatctttaggggtgagtggggcccagccctcaacaatgccctgtaccccctctgtccctgtctccatccccaccttgggcagagctggctgggtccctgggcctcagggggccggggctgagcacttccatcatcctcccaggaaacgtgaatggtacattcatcatccacccagactc

SEQ ID NO: 6359 - DNA, 2300 bp, Homo sapien
gtgagccgcccgccaggcccgcccgccccccgggccccacccgcccccagtgcgccctgaccccgacccccgaccgcccgcagggcccggcgacactcagacgggacgttcaccagcgagctcagccgcctgcgggagggcgcgcggctccagcggctgctacagggcctggtggggaagcgcaggtgaggccgggtggggtggggggtcctggcgtggtgccccagcagcaacgcgcgaccccccagctccaggactaactctgttttggggcggggggcagcgagcaggacgcagagaacagcatggcctggaccaggctcagcgcgggtctgctctgcccgtcagggtccaacatgcccatcctgcaggcctggtgagcacccgccccaccgcagaccccactccagaccccaccccagacccctccttctgtcctggcctccccgggtcagcgctggtggccactggaggcccaattccagcagcggggccggggtctccagccccagccctcagaccctcacgtgctgtctctgcaggatgcccctggacgggacctggtctccctggctgccccctgggcctatggtttcagaaccagctggcgctgctgcagaaggaaccttgcggcccagatgaggaaggaaccccctcaccacctgcccggcccaggagcgcagctgcatttggggtggggggcaggatgggggagagggggaggggtggtacttggcaccaataaaggaggaatcagacccagacgctgggagttgtctgtgtccactcagtgtaatcgaggcaacccctgtgtagcggggctgagggatggatggaggcccatccacccaggagggactgaccacacccagctgccctttacacctgcaggcacggcggcccctcatccttatctctggcatcagggccacctcctgtacctcgactaagtactgcagggccccgccccaccccttgtcatccattaggaaacattctggggctcgggggatcccggacaccctctcagctcctgcccgggggcccatgtggtcagtgtttctgtaaggggtagtggggagggtgtgaaggggccaggggggctcaggcgggcaggaagaggggagggtggaggtgtcacctggggtgccaggaatccactctggcgtgaggactccggaccctctgtctcgtgtggcctcggaccagtggcttgacccctcagagcctgtggagcacggagcgtgcagggcttgaaggcgaccatgagggcaccgtgcagggttaggacactgagcccagccccagccatgagaggccagaagcttcggcgcacaggcctggaggaggagaactccacctacccctcacgacagccacttcctcgccccgaccctacccagtggcctctccctagagctgggggcttctggggggccaatgaaaagagcagggcaagtgtcgagtctcacctcaccccctctgtcgggcaccagggccccccaggaactcccagctgcccctcacagccccgccttagcctcagtcactaaggccctgtccagccccgccctgagaagccgacttgtctctggggcaggcaggggtgtccccaggacacagtgaggagagccttttccttcagaacctgctgtcaggcagggagggaggtgctccctggggaacacccgggttctgagcctcaaggggtggccttaggaactttgcctgagggagatcttaggggaggagccaagccagggcagcctgggctagggaggcaggttccagacaccccgacaccaagggccgagcccccgcccccagcccccagcttctctcccacaccctagccctgcccctgccctgcccctacccccacggcacccatgagccgctctccagtcccttctgccctgtgcctcggtgcctgtgacctgagccccctggttgacccctgcactcagtccaacttgggccaaacgactgcccctccttctggcagtgggctggaccagccggccagcgggagcccccttggcagaagccggtcgtaaaggatcataaactgggcggcgtctggctggggcgaaggtcgctgaggtaggaactgcgccagtcctagacgccagacccgctcagaccctcctgccaggtgacagccgccaagatggggtcttgggccctgctgtggcctcccctgctgttcaccgggctgctcgtccgacccccggggaccatggcccaggcccagtgtatgtgcgggcaggggtaggtggggcacgggcggcggggagcca

SEQ ID NO: 6360 - DNA, 2300 bp, Homo sapien
ctgcgcgcagtccctggaagcgctgaatccacagacagaaagtggacggggcgccggggctgaggaggggagggggcgtttgatggggacagagcttcattctgggaggacaggagagtctgagaacggattttgggaggacgggagcgtctgtgaacggattttgggaggacgggagcgtctgtgaacggattttgggaggacgggagcgtctgtgaacagattttgagaggacgggagagtctgagaacggattttgggaggacggaagagtctgagaatggatttttggaggacggaagagtctgagaacggattttgggaggacgggagcgtctgtgaacgattttgggaggacgggagcgtctgtgaacgattttgggaggacgggagcgtctgtgaacgattttgggaggacgggagcgtctgtgaacggattttgggaggacgggagcgtctgtgaacggattttgggaggacgggagcgtctgtgaacggattttgggaggacgggaaagtctgagaacggatggtggggatggatgcaccgaatgatcctgaatcgcgcacttcaaagcagataaaatggcaacaccggccccccaacagtcacgccacgctgaagctggagacgaactcgccccagcaaggtgctccaggggcctccggaactccggccgcagccccttccccggggccccccagtccccccccaaaccctcccccaagccctccggcccctccgcccccgcaggctccgaggcttcgcggtgcggttccctctgcgggtcccaggcccgcgctccgttcgccccccaggccgggacgtccccctcccccagccggccgaggggcgccagcgcggcggagggggcgggaggccgggccggggcgacagctgggggggcggccctgaccttcccgggatcgctgggcgcggccgggccgtcccctttccgggcgccgccataaaggggccttgcgggggcccggggccgtggccgcagcgctcagctcctgcgccccgaccccgccatggccccccggcccctcctgctgctgctgctgctcctcgggggctccgccgcgcgccccgcgccccccaggtgagccgcccgccaggcccgcccgccccccgggccccacccgcccccagtgcgccctgaccccgacccccgaccgcccgcagggcccggcgacactcagacgggacgttcaccagcgagctcagccgcctgcgggagggcgcgcggctccagcggctgctacagggcctggtggggaagcgcaggtgaggccgggtggggtggggggtcctggcgtggtgccccagcagcaacgcgcgaccccccagctccaggactaactctgttttggggcggggggcagcgagcaggacgcagagaacagcatggcctggaccaggctcagcgcgggtctgctctgcccgtcagggtccaacatgcccatcctgcaggcctggtgagcacccgccccaccgcagaccccactccagaccccaccccagacccctccttctgtcctggcctccccgggtcagcgctggtggccactggaggcccaattccagcagcggggccggggtctccagccccagccctcagaccctcacgtgctgtctctgcaggatgcccctggacgggacctggtctccctggctgccccctgggcctatggtttcagaaccagctggcgctgctgcagaaggaaccttgcggcccagatgaggaaggaaccccctcaccacctgcccggcccaggagcgcagctgcatttggggtggggggcaggatgggggagagggggaggggtggtacttggcaccaataaaggaggaatcagacccagacgctgggagttgtctgtgtccactcagtgtaatcgaggcaacccctgtgtagcggggctgagggatggatggaggcccatccacccaggagggactgaccacacccagctgccctttacacctgcaggcacggcggcccctcatccttatctctggcatcagggccacctcctgtacctcgactaagtactgcagggccccgccccaccccttgtcatccattaggaaacattctggggctcgggggatcccggacaccctctcagctcctgcccgggggcccatgtggtcagtgtttctgtaaggggtagtggggagggtgtgaaggggccaggggggctcaggcgggcaggaagaggggagggtggaggtgtcacctggggtgccaggaatccactctggcgtgaggactccggaccctctgtctcgt

SEQ ID NO: 6361 - DNA, 2300 bp, Homo sapien
atcacttgaggtcaggagtttcagaccagcctgggcaacatggtgaaaccctgtctctactaaaaatataaaaattagccagtcatagtggcaggcacctgtaatcccagctacttggagggccgaggcacaagaactgcttgaaaccgggaggcggaggttgcagtgagctgagatggccccacggcactccagcctgggtgacagaacgagactccctctgaaaaagaaagaaaggaaggaaagaaaggaagaaaggaagaagaaaggaagaaaggaagaaaaagaaaaaaagaaagaaagaaagaaagaaagaaaaagaaagaaagaaagaaagaaagaaagaaagaaagaaagaaagaaagaaagaaagaaaagcaagcaagccagcaagccagccagccagccagccccacattgctggcggggctgtgaaatgatgcaaacgctggggaaaatattgtggctgatttaacagacggatacagtgcatgactcgcaaccacagcagaacatcaaagggcttgacggccatttctccgtccactccatgatgtataaatggctcacagacacttgagaacatgctccacatcgctggccattagggagatgccaatcaaaaccgcagcgagacaccacgtcgcacccaccggcatcgttagtacgcgacaaacaaaaagccacaaagtagcaagtgttggcgaggacaagaaccgtgtccctgctgcgctgctgggaagacagtttggcgtttcctcagaatatttaacacataattactctgtcacccagcaattccctcataactatacaccaagaacgcttgaaaacgggatcgggaagcgccgtttgcacacccacgttcacagcagcgttactcgccgtcgccccaaaggggaggcagcccaggtgtccatcaagatgcccacagatgagcggacgcggtcgatgcggtccctgcacacagcgggacacagttccccacaaaagggaaggagattcccacacaggccaggccgcggcggcgaaggcggaggatgctgcgctgagaatccagccggtctccaaaggacaaatcccgtgaggctccccctgcgcgcagtccctggaagcgctgaatccacagacagaaagtggacggggcgccggggctgaggaggggagggggcgtttgatggggacagagcttcattctgggaggacaggagagtctgagaacggattttgggaggacgggagcgtctgtgaacggattttgggaggacgggagcgtctgtgaacggattttgggaggacgggagcgtctgtgaacagattttgagaggacgggagagtctgagaacggattttgggaggacggaagagtctgagaatggatttttggaggacggaagagtctgagaacggattttgggaggacgggagcgtctgtgaacgattttgggaggacgggagcgtctgtgaacgattttgggaggacgggagcgtctgtgaacgattttgggaggacgggagcgtctgtgaacggattttgggaggacgggagcgtctgtgaacggattttgggaggacgggagcgtctgtgaacggattttgggaggacgggaaagtctgagaacggatggtggggatggatgcaccgaatgatcctgaatcgcgcacttcaaagcagataaaatggcaacaccggccccccaacagtcacgccacgctgaagctggagacgaactcgccccagcaaggtgctccaggggcctccggaactccggccgcagccccttccccggggccccccagtccccccccaaaccctcccccaagccctccggcccctccgcccccgcaggctccgaggcttcgcggtgcggttccctctgcgggtcccaggcccgcgctccgttcgccccccaggccgggacgtccccctcccccagccggccgaggggcgccagcgcggcggagggggcgggaggccgggccggggcgacagctgggggggcggccctgaccttcccgggatcgctgggcgcggccgggccgtcccctttccgggcgccgccataaaggggccttgcgggggcccggggccgtggccgcagcgctcagctcctgcgccccgaccccgccatggccccccggcccctcctgctgctgctgctgctcctcgggggctccgccgcgcgccccgcgccccccaggtgagccgcccgccaggcccgcccgccccccgggccccacccgcccccagtgcgccctgaccccgacccccgaccgcccgcagggcccggcgacactca

SEQ ID NO: 6362 - DNA, 2300 bp, Homo sapien
agatgtgatcacatccagttacatttgattttcagataaacaacagaagtttagtggaggctgggggcagtggctcacagctgtaatcccagcactttaggaagctgaggcaggtggatcacctgaggtcaggagttcgagaccagcctggccaatatgatgaaaccgtgtctctactaaaaatacaaaaaaattagccgggcgtggtggcgggcgcctataatcccagctactcagaaggctgaggcaggagaatcgcttgaacccgggagacggaggttgcagtgagccaagattgtgctgctgcactccagcctgggtgataagagtgaaactccatctcaaaaaaaaaaaaaaaaaaaaaacaaattggggttgtctgtcttttctcattgtttccattgtttctggatctgtgtgtcagagatgtgtgctgcacacatcctttctccgcctagcttggttttcactcttggtggtcgcagacatcttgggggctacttgaaggaactctaagccgaccagaggctgggctggactcgccgtttggcgcccagccggagaccccagggccaccctccccggttccatcctgggagagaagaaacttccactgtcccagtctctcctgtggtgacttcttttgctcaagggttcacaagggcagcagactgatctgcacaagagggactgagcctggctgcggccgcacctgatgcctgtgcacacctgtccctggtggtctctcctgtggtgacttcttttgctcaagggttcacaagggcagcagactgatctgcacaagagggactgagcctggctgcggccgcacctgatgcctgtgcacacctgtccctggtgcaggcccttcccccgcagccccgtgaccttgtcctgtgaggctcacggtgcctgctccttctcagagtcctcatttctccctttaacgcacgccctgtcagcgcctccgtctagcccgtgtcctccagaccttcgaggtcaggggcctcaattcctggcacagcccctccactccaggcctcccagaaacagactagagcatcaggatgtgcgccgcctggggtcccacagagtggtgcccccttttagtgtcttctaggccccttagtgacagactacagaaaatacctctcaggtcacaggtcacccctctttggtgaagagtccatagaattctctgctgcgctttgcaagcactttctcttctgcacgtttggaacctaccccggcctgtcgtgtctttctcctggcctcctcgcgagccgaacctactgtccggtcccgggaccccctgcccagggtcagaggggcgcctacctagctcacggtcttgggccggagggaatggaggagggagcggggtcgaccgctcagctgtccgcccagtttcggaggcggccacgcgaggatcaactgtgcaacgggtggggccgcggctgaccgtggtggtcgcgggggctgagggccagaggctgcggggggggggcggcgggatgagctaggcgtcggcggttgagtcgggcgcggagtcgggggcagggggagcgggcgtggagggtgcgcacgaggtcgaggcgagtccgcgggggaggcgggcagagcctgagctcaggtctttctgcgtctggcggaacgggcctgggagggaggttttgccagataccaggtggactagggtgagcgcccgagggccgggacgcacgcacgggccgggtaggatggcgctggcgtcgatgcccgcgcgcttcagggcctggtctggccgcccctccatccttgtcggtttctcgggtcgcggaccccgcgcggcgccgggcgatgctggcctgcccgtggccaccacctcgcttcattcccgtctctttgggccgccgcattcgtccacgtgcccgtctctccctgcgcaaaattccaagatgagcaaatactgggctcacggtggagcgccgcgggggcccccctgagccggggcgggtcgggggcgggaccagggtccggccggggcgtgcccgaggggagggactccccggcttgcgacccggcgttgtccgcggtgctcagcgcccgcccgggcgcgccatggggaaccgcagcaccgcggacgcggacgggctgctggctgggcgcgggccggccgcgggggcatctgcgggggcatctgcggggctggctgggcagggcgcggcggcgctggtggggggcgtgctgctcatcggcgcggtgctcgcggggaactcgctcgtgtgcgtgagcgtggccaccgagcgcgccctgcagac

SEQ ID NO: 6363 - DNA, 2300 bp, Homo sapien
tcttttatgcattcagaaaaatacgtgcaaaaatgacaaaaacctgaaatcaacctcatggctccaaatcccaacgtcaaaccagagtttagcgacggacgccaacccctgagagtcacaaagccttccctcacttttttttcttaaccaaccaaacaagcagcagtgacccctttgccttcgagggccactcagctgaccaagggcagcccagacgctgctggcccccacccagcccccaggccgaacaagcacccagagcacacgcaatgccctgacatacccagcacaccaggactgggatccagttcctcaacccgcaaagctccgtaggggaaaagtgcctcacaacgcaacaagaagctcctcccaagggtctcaacactgagctgtgagtccctgggggacactcgggaactccaatggggaagaatacagtgcgttaggaagccagtgggtggggaagtctatgccccacggacacaagggcgggacacaggaggtgggtggacggcaccagccccgtagggcatctgtgagctctgccacgggctcccagtgttttggagcctgagaaggagactgacctgtgtggcaagaaactataagcagcttatataaaaatgtggactggaaagccacagcagcctccccaaaggaagcccgacaggaagcggggcaggaggagcaggtccttagggaaaaaggcaagaggaagagggaggactgggaggggagcctgcacaggtggctccgcagcccccctgggccaccacacagccacgctgacctctggcatcatggcctccagcaggctgcccacccctggctccccagcgctcaggtcatgcctgaactggccctcaggaagtggggggttcctggtgaccacaggtgcccacccaccccagggcttctccaggacaggtggggggagccaggatggacgaaggcagggcaggggcagagctgcacaggggggaccagtaggaggcggggctgccacaaagaaaaggggggcagggggcaggtgtgtgcagggcagggccaggtcaggtgaggctaggcaggtcaccaggggcaggtgtgcggggcaggtgtttggggtaggtggggcaggctggtcacctggggcaggtatgtggggcaggtgtgcggggcaggtagggcaggccgatcacgtggggcaggtggggaaggctggaaacgtcgagcaggtgtgcgaggcaggtatttgtggcaggtggggcaggctggtcacctggagcaggtacgtggggaaagtgtgaggggcgggtggggcaggtgtgagaggcagatgtgaggggtgagctagtcacgtggggcaggtgtgcagggcgggtggggcgggcgggtcacgtggagcaggtgtgaggggcaggtgtgcagggcgggtggagcgggctggtcacgtggagcaggtgtgagggacaggtgtggcgggctggtcacctgggacagttgtgcggggcaggcgcgcggggtaggcgcgcgggaaccggacgaggcgagaggccggcgggcgcacttgcctgcgaaggctgcggcagcggcggcctcgtcggggccgggcagggcctcggcgcccatgtccatgtgcccgggctccgccgccatcaccgccactgccgtgacccgcggcgtctcccgctccgcctccgagtctgcgtcctcctccgagtcctcgtccctgctcagcaccggctcctccgcctcgcctcctgccgcggccgcggccgccgccgccacagcggccgcggccgccaccgccgccgcctcagccaggcccagctgctttgccgccgagtccgagtcctccatccggactccgccgagccttcccgaaggcgccgtccgggaccgcccgaagcgccggtcgcggagcccgaagcggggcccgaagaggacgcccgagctgggccgaggccgcccgaagccgccgcccgaatagggaccgaaaaggcagccagccgccgagcagagccgagccgagtccgcccgcggagcggagccgaggcgaacagaggctgcccgagtaggagccgaacctgcacgaagccgccgagccgagaccgagtcctgaaccgaggagggtcgaagttccccgaagtgggaagccgaatcagtccgaataggtccgagtcctcacgagggcttccgagagactcggcccctgctctcctcactgtcctgacaggctgaggcggctgtcgtccccggccgacagggctggacggctctaggcagattctcgccggcggccggcgcaattctgcctc

SEQ ID NO: 6364 - DNA, 2300 bp, Homo sapien
gtttttttagagacagggttttgctctgttgcccaggctggagtgcagtggcctgatcacagctcactgcagtctcaacctcctgggctccagtgatccgccagcctcagcctcccacgtagctgggaccacaggctccctgaggtaattttttttttttttgagacagaatttcgctcttgttgcccaggctgcagtgcaatggtgcgatcttggccaactgcaacctccgcaccccaccccccccaccaccaccaccgggttcgagcaattctcctgcctcagactctcaagtagctgggattacaggcatgcaccatcacgccaggctaattttgtatttttagtagagacggggtttctccatgttggtcaggctggtcttgaaccctcgacctcaggtgatccgcccgctttggcctcccaaagtgctgggattacaggcgtgagctactgcgcctggccttccccggggtaatttttaattttttttttgtagaagggggtctcgctctgtcgcccaggctggagtgcagtggcgccatcacggctcactgcaacctcgacctcctgggctcaagtgatccgccagcctcagcctccagaatagcttggcccacaggggtgcgccaccgcctggctgatgtttacagttttttttttatagagggggtcttgctatgttgcccaggctggcctcaaatgatcctgcagcctcggcttcccaaactgtcaggcttacaggcctgagccactgcgcccaacctaaacttaatttttaaccaaatgaaaatacacaaaacaaacctggttactagaggctgtcctgcctatggagtagccattctttattccttcaaaacaatgcacctaattactagagaacacgcacgaaggtttggcacttcagcgcccgcgtatgggagttctggctgtacccacagacagcagaaggcggctcctctgcaggatggccgatttactgctttggtctgtcccttcctcctctcggaggcgagtctctcaggcaggacggctgaggcaccggcgcccgcgattttctttggcgagagttccaaggctaccgaaaccctgcgcccatcccgcccacgtgtcttcacaaaaaccacgcgcgggacaagagctgccggggactggggcccccagagccgctccgcacccaccctgcccggggccaggcgcccgcgcgcgggggagctcttcggggtgcaggacgcccgccacccaggccaggccaggccgcgcttctcgatggggtgacggagctgtctcgctcacgtagagacggtggcacggccccgtgagcgcaccgaaagcggaaaccggattgtcaccacagggaaacgccgcgcccgccgctgcaagcccggaagcccccaccccgcccgagctcacctcgccgcggggccgccatcttacccgccccgcccgccggtccgtcgcgatcccggcagcctctcggcccgcgcgctcgcgctccttcggccattttcgcgtctcctgacgaaggggcccgaccgcgccgcgtttcgggagcggacgtccgagccacggccgaggcccgattagtccgtccggcaccgctcgggcactttcggaagggaagaggtggagaaccgacgttcgggagcattcggcctcggggacattcggctcgtctcggctcggcctcgggctgactcggcttccgccggcggcgggaacgggcgaaacccgcggcactaagctctctctgagaggcagaattgcgccggccgccggcgagaatctgcctagagccgtccagccctgtcggccggggacgacagccgcctcagcctgtcaggacagtgaggagagcaggggccgagtctctcggaagccctcgtgaggactcggacctattcggactgattcggcttcccacttcggggaacttcgaccctcctcggttcaggactcggtctcggctcggcggcttcgtgcaggttcggctcctactcgggcagcctctgttcgcctcggctccgctccgcgggcggactcggctcggctctgctcggcggctggctgccttttcggtccctattcgggcggcggcttcgggcggcctcggcccagctcgggcgtcctcttcgggccccgcttcgggctccgcgaccggcgcttcgggcggtcccggacggcgccttcgggaaggctcggcggagtccggatggaggactcggactcggcggcaaagcagctgggcctggctgaggcggcggcggtggcggccgcggccgctgtggcggcggcgg

SEQ ID NO: 6365 - DNA, 2300 bp, Homo sapien
cagaactgggctcctggaagaggcaccacaggatggaagcaggaagccaagtgcacggcagaccacgccgcatcgcgttcccggcaggccactctttaaacccgatctgttcttttccaggccttagctaaaccaggccacctaaatacctgtcattatctgtgatgatttcgcattaattggggtttttgtcccttctgttccttttcttaaaggctggcttcttaaacacttccaatgtgtctgctagttgctcactgttatagattgaagttatggggcttgggggaaaaactgtataaaagccttaagtgatgtaacattttaataattaatatgaagggcggctataaccagatacgctgttctaacaattccagacctgcaggagctcattctgaccgaacgtagccttggctttcaggacaacattttttgtcagtgacttactataatcacaatgtggctacgaatagctgtgtcaggcagaagttaaacatggaagtgaaagagaacaagtgttttccctgatgtaatggacaagatgtgttaagaaatcttgttttggtatacacttagtttttttagagacagggttttgctctgttgcccaggctggagtgcagtggcctgatcacagctcactgcagtctcaacctcctgggctccagtgatccgccagcctcagcctcccacgtagctgggaccacaggctccctgaggtaattttttttttttttgagacagaatttcgctcttgttgcccaggctgcagtgcaatggtgcgatcttggccaactgcaacctccgcaccccaccccccccaccaccaccaccgggttcgagcaattctcctgcctcagactctcaagtagctgggattacaggcatgcaccatcacgccaggctaattttgtatttttagtagagacggggtttctccatgttggtcaggctggtcttgaaccctcgacctcaggtgatccgcccgctttggcctcccaaagtgctgggattacaggcgtgagctactgcgcctggccttccccggggtaatttttaattttttttttgtagaagggggtctcgctctgtcgcccaggctggagtgcagtggcgccatcacggctcactgcaacctcgacctcctgggctcaagtgatccgccagcctcagcctccagaatagcttggcccacaggggtgcgccaccgcctggctgatgtttacagttttttttttatagagggggtcttgctatgttgcccaggctggcctcaaatgatcctgcagcctcggcttcccaaactgtcaggcttacaggcctgagccactgcgcccaacctaaacttaatttttaaccaaatgaaaatacacaaaacaaacctggttactagaggctgtcctgcctatggagtagccattctttattccttcaaaacaatgcacctaattactagagaacacgcacgaaggtttggcacttcagcgcccgcgtatgggagttctggctgtacccacagacagcagaaggcggctcctctgcaggatggccgatttactgctttggtctgtcccttcctcctctcggaggcgagtctctcaggcaggacggctgaggcaccggcgcccgcgattttctttggcgagagttccaaggctaccgaaaccctgcgcccatcccgcccacgtgtcttcacaaaaaccacgcgcgggacaagagctgccggggactggggcccccagagccgctccgcacccaccctgcccggggccaggcgcccgcgcgcgggggagctcttcggggtgcaggacgcccgccacccaggccaggccaggccgcgcttctcgatggggtgacggagctgtctcgctcacgtagagacggtggcacggccccgtgagcgcaccgaaagcggaaaccggattgtcaccacagggaaacgccgcgcccgccgctgcaagcccggaagcccccaccccgcccgagctcacctcgccgcggggccgccatcttacccgccccgcccgccggtccgtcgcgatcccggcagcctctcggcccgcgcgctcgcgctccttcggccattttcgcgtctcctgacgaaggggcccgaccgcgccgcgtttcgggagcggacgtccgagccacggccgaggcccgattagtccgtccggcaccgctcgggcactttcggaagggaagaggtggagaaccgacgttcgggagcattcggcctcggggacattcggctcgtctcggctcggcctcgggctgactcggcttccgccggcggcggg

SEQ ID NO: 6366 - DNA, 2300 bp, Homo sapien
ttgattctattgtgtgttttctatgtttggaataattacacccaaatatctagatattttctcttcaccgcattttgtaaataaagagatgtgtatgcctccctgaattctcctaattatggccacctcccccaccccatctccagttctcctgccctgcaagagagcacaccccacttgccagctggtcagttcctggctggcctcgccctcgggccctggctgccgggcgccttccgctcggtggactcctgagggcaggaggctgcgggactgtcctgggcctccactggggctccctcggctggggtggctgtggctgtggcacctggacagtctttcctgcctgtcttcgtggaagcggtgggagcacccagttgtcctgggccgacttcctttgacctgtctgtggcccccagtggccacggtgagctgcaggacagccctgaggacccacttcacacaccagcgcctgagcgcctcgggccacctccctcaccagcgcctgcactcgcagaagaccagctgggcacacctgccatctggaggacccagcccacaaaccatgcagaccagggaaggaccccctccctgaagctggagacctgttgccttcatggttaatggatcctgatacctccagtctcagcgagcacacaaaggcagtggtcacctgttccacagggaacgccatggctccaggtgacccggagtggatggggcccgagaggccagcctggactgtctcctgagggcaggctccgcactcaaaatcgtgttgacaggcacccgtttaggagtggagagggaccccaccccccagctgtcctctccagcgcctgtttcccacttggccactcccagctctgcctccaggaagggtgagggcacgggtgcaccgaggggttggcgtgtgtgaccctgagctctgggtcagggcaagctcatgcatggagcaggatcacggcaggttcctggagatcaaacggcaaaggctgtaaaccaggaagccaggtcttgcctgggctcaggggcaggcactgggcccgaaggaggagggccacttcctgccagccctccaccgagctcacctatggcgcctccccaggaagtgctccggccagcccagggtaaacacgctagccctgcccctctgggaccatagcccggggacccagactcttggccacgctcattcccacccctacccaggaccggcagccggagccttgggtccctgcatgggcctggggcgccctgtgccccttcacctcgtcctcgtccagttgactgctgtggcagccggtgctacccgctgtgtccactgcaccctggccctgttctgagcggtcacagcagctggggagaagggccatcctggaagccgggcagatgaggacggaaccagacagtcccactgtggtgggcagaggtggggcctgggcctgaccacggggcagtgcaaggagagaggcatcctgagagggcctgaggtgtccccacctcccctgacaccccatccctcagtgcccaggctgggcagaaaggggggcctggaggagcagctgcactgtgaactcagggctccaggcctggggtgggcatggctgggtcctgcctgacacccacccactcaccgaagcctctgcccctgggcctgcggtgggcccggtaagggaagtgactctgccccatgcctggggcacctgaggggtgcacctggcccggcggaggctctgacctccccagggctggagccctccccagcaatgcgccagcgctgcccccgaagtcccattggcagcgttcccccgtcccccggcctgctggggcgcagctaggccctgcccaaggaagagctcgaggcctcgccctgctcatcccgcggaggcggccctgcgccccgcctgtccccagcgccccagctctaggggctaggcccgcggaggggcacaccaggcgggtgttggggaggacgcagagggctggggctggagcccaggcggggcagggggcggggcggagctgggtccgaggccggcgggggcgcctccatcccacgccctcctcccccgcgcgcccgcccgctctcgggtgactccgcaacctgtcgctcaggttcctcctctcccggccccgccccggcccggccccgccgagcgtcccacccgcccgcgggagacctggcgccccggccgaggcgcgaacagacggacgcaccggcgagcgccgaggggacaggccgagcgcggggcgccggaggcaggtgagcgctgcggacacgggggagcgcgcccgcc

SEQ ID NO: 6367 - DNA, 2300 bp, Homo sapien
tgcactcgcagaagaccagctgggcacacctgccatctggaggacccagcccacaaaccatgcagaccagggaaggaccccctccctgaagctggagacctgttgccttcatggttaatggatcctgatacctccagtctcagcgagcacacaaaggcagtggtcacctgttccacagggaacgccatggctccaggtgacccggagtggatggggcccgagaggccagcctggactgtctcctgagggcaggctccgcactcaaaatcgtgttgacaggcacccgtttaggagtggagagggaccccaccccccagctgtcctctccagcgcctgtttcccacttggccactcccagctctgcctccaggaagggtgagggcacgggtgcaccgaggggttggcgtgtgtgaccctgagctctgggtcagggcaagctcatgcatggagcaggatcacggcaggttcctggagatcaaacggcaaaggctgtaaaccaggaagccaggtcttgcctgggctcaggggcaggcactgggcccgaaggaggagggccacttcctgccagccctccaccgagctcacctatggcgcctccccaggaagtgctccggccagcccagggtaaacacgctagccctgcccctctgggaccatagcccggggacccagactcttggccacgctcattcccacccctacccaggaccggcagccggagccttgggtccctgcatgggcctggggcgccctgtgccccttcacctcgtcctcgtccagttgactgctgtggcagccggtgctacccgctgtgtccactgcaccctggccctgttctgagcggtcacagcagctggggagaagggccatcctggaagccgggcagatgaggacggaaccagacagtcccactgtggtgggcagaggtggggcctgggcctgaccacggggcagtgcaaggagagaggcatcctgagagggcctgaggtgtccccacctcccctgacaccccatccctcagtgcccaggctgggcagaaaggggggcctggaggagcagctgcactgtgaactcagggctccaggcctggggtgggcatggctgggtcctgcctgacacccacccactcaccgaagcctctgcccctgggcctgcggtgggcccggtaagggaagtgactctgccccatgcctggggcacctgaggggtgcacctggcccggcggaggctctgacctccccagggctggagccctccccagcaatgcgccagcgctgcccccgaagtcccattggcagcgttcccccgtcccccggcctgctggggcgcagctaggccctgcccaaggaagagctcgaggcctcgccctgctcatcccgcggaggcggccctgcgccccgcctgtccccagcgccccagctctaggggctaggcccgcggaggggcacaccaggcgggtgttggggaggacgcagagggctggggctggagcccaggcggggcagggggcggggcggagctgggtccgaggccggcgggggcgcctccatcccacgccctcctcccccgcgcgcccgcccgctctcgggtgactccgcaacctgtcgctcaggttcctcctctcccggccccgccccggcccggccccgccgagcgtcccacccgcccgcgggagacctggcgccccggccgaggcgcgaacagacggacgcaccggcgagcgccgaggggacaggccgagcgcggggcgccggaggcaggtgagcgctgcggacacgggggagcgcgcccgcccgggcctcagtttacccggtggcgatgggacgcggggcttctggttcaggacaccgggacgaacgcggcgtcgcagggcgcggggcacttggagggcggccgggccgagggcgcggggcaaggggctgggggcctggtcgagtccccacctctcctggacgggtcctgctgcagcccggcctgcccccgtcggtcctgggcggcggccggcgagcaaggatatttttaagccagcgatgggtgactcacctgccccgtcctgcccactcccagctctggggcttggtgggggcaatccctgcgtccggagagcgctggtggtagggaggcttctcccggttctgtgagcagcaggaccctcccgagggcctgaccgtggaggtagcactgcacacccactccctgtgggccggagccaggaggcacttcctgggtgtcggagcccagaaggaaaccagtggccgggaagcaccagctgggtcagtctccaggtcagggttgggggt

SEQ ID NO: 6368 - DNA, 2300 bp, Homo sapien
cttcctccctcaagccatagcttccaaacaaggacagggccagggcctgaggggcctccccattccagggccccacccagcgcctatgagggcagcctggagcccctgtgactcagctgacccctccccaaggtcactcagcatgtggagctggaacttgaacttggagcccgtccctctaccctcctgccctgctgggacctcctcccctccacagcccgactgaccgggcaccccgctctgcctcacttcacaccgggaaaatgaccacagtacaaagtgcagcctgggcctccagggcttcgtccccaccaccagtgggccaaagaagcctccccaggggggcggggctcccacagggcaggaggcagccccatacccatgtgcttcagacccagacaccacacctggacccaccccactgctgcccggccctgcctgggcctgaggtccccgatgccctgcaggcaaccgaaggccaggaacctggccttccccaggggggtcgcgtgtcacagccctccatgtttgcgtgcccccaggcctgagtctgcaagggtgcgttggtgtctcgcccaggtgtgtgcctggacacacgtgcctggcgcccttggtggagcccgccaggaatcccattaagcaaacactcaggctcgccactgagcccgtgaacattccagacattctccacggatagatggatggaggaagtggccataccccctggtgcacccagcccctcatgtcagcggcagtgcccccgggcctcccagaccctcccactaggccagacctggtcaaaccagaaagtcccgggtgctccgagccactcccttgaccctccataccaacagcagtggctggtgacccccaccgtggcagacccaaactctgaagccacaggggacagccctgcagccctggcaggaggcagatggtgtggacctgtggggagctgatcacagagccacagaacagccaggtccccacagggcatagtccccttgggacaagtcagcctggttcagggccatcaggctctgtccatccccccgggaagcccctagggtccagcccaaatcagacccacctgtctgccctggcggctgggccttagtttccccaaaatgctcggggaagaggtcagcactaggagcccagagacaggctctgaggattctgcccctgggggaggccagaggcacctgccccatagccaccctacctcgttggaggggcagtgatactgtgtgttggggccactggactggctcccagtctcagcccccaccacacctgccctccagtccctcccctaggcttggctgctgccaggggttctgcgctggccacctggccgcatccctgccctcgaggtgaggaaacactgcaccccggggaccccagggtttcctgcccgcacagcctcttccctgccaggtctcccaggcccaggaaagagccaagggccagcctctttgctggggcctggacagaggtggcatgtgtgggtggcaagtccacatgtgggtgcaggagccccttggggtgcaggcctggggtggggcaggagtggcggctagagccgggctccctctggacttcaggacctaccccaactccagcctcacctctcctgccatcctgcagctcccacccgccctcccccaacccccaccgcacccccctccccccacactcccacctcatccccctccccttacccatcccacccccctccccacagcaccagggccttaaactccatgctgcccagcttggaaggcgccttctgcccccagggcccttgtcagagcctcccagtcagcctctggggggtccctgtggagcacctagggtctgaggcatgacgaggctgatcgactgtcaactgggacgtggggccaactgggacgtggggccaactgggatgtcgggcaggggctctgccccccaagggacccccacccaggccaggccagtcagggatctggcccagggaaggaggggaggaaccagccaggccggaggaagtgtcagcgcagcccttctgtccacccaggtgtgggacaggcactggcctcagaccggggccacactgaggtctgcccttctcccgctggccgccacccaagacaccatgagccagtccggggccgtgagctgctgcccgggtgccaccaagtgagccctcccacccatcccgaataccccaccctcaccctctgaacagtccccagggaggggtgcagtttggccctgccctgacagcccctcccctgcagtggcagcctgggccg

SEQ ID NO: 6369 - DNA, 2300 bp, Homo sapien
gtcacagccctccatgtttgcgtgcccccaggcctgagtctgcaagggtgcgttggtgtctcgcccaggtgtgtgcctggacacacgtgcctggcgcccttggtggagcccgccaggaatcccattaagcaaacactcaggctcgccactgagcccgtgaacattccagacattctccacggatagatggatggaggaagtggccataccccctggtgcacccagcccctcatgtcagcggcagtgcccccgggcctcccagaccctcccactaggccagacctggtcaaaccagaaagtcccgggtgctccgagccactcccttgaccctccataccaacagcagtggctggtgacccccaccgtggcagacccaaactctgaagccacaggggacagccctgcagccctggcaggaggcagatggtgtggacctgtggggagctgatcacagagccacagaacagccaggtccccacagggcatagtccccttgggacaagtcagcctggttcagggccatcaggctctgtccatccccccgggaagcccctagggtccagcccaaatcagacccacctgtctgccctggcggctgggccttagtttccccaaaatgctcggggaagaggtcagcactaggagcccagagacaggctctgaggattctgcccctgggggaggccagaggcacctgccccatagccaccctacctcgttggaggggcagtgatactgtgtgttggggccactggactggctcccagtctcagcccccaccacacctgccctccagtccctcccctaggcttggctgctgccaggggttctgcgctggccacctggccgcatccctgccctcgaggtgaggaaacactgcaccccggggaccccagggtttcctgcccgcacagcctcttccctgccaggtctcccaggcccaggaaagagccaagggccagcctctttgctggggcctggacagaggtggcatgtgtgggtggcaagtccacatgtgggtgcaggagccccttggggtgcaggcctggggtggggcaggagtggcggctagagccgggctccctctggacttcaggacctaccccaactccagcctcacctctcctgccatcctgcagctcccacccgccctcccccaacccccaccgcacccccctccccccacactcccacctcatccccctccccttacccatcccacccccctccccacagcaccagggccttaaactccatgctgcccagcttggaaggcgccttctgcccccagggcccttgtcagagcctcccagtcagcctctggggggtccctgtggagcacctagggtctgaggcatgacgaggctgatcgactgtcaactgggacgtggggccaactgggacgtggggccaactgggatgtcgggcaggggctctgccccccaagggacccccacccaggccaggccagtcagggatctggcccagggaaggaggggaggaaccagccaggccggaggaagtgtcagcgcagcccttctgtccacccaggtgtgggacaggcactggcctcagaccggggccacactgaggtctgcccttctcccgctggccgccacccaagacaccatgagccagtccggggccgtgagctgctgcccgggtgccaccaagtgagccctcccacccatcccgaataccccaccctcaccctctgaacagtccccagggaggggtgcagtttggccctgccctgacagcccctcccctgcagtggcagcctgggccggtccgacggtgtggccaagatgagccccaaggacctgtttggtgagtgaggtttgagaacgggctggacgtcacaggggagaaatgggcactgcatccaggtgggggacagctgctcctgccccacagctgtgcctggtctggcccaggggatctccgggtgcccagggaggcctctggaccctaatcaaccttccgaaagctcctggccactggatcccctcccccacacccgtaaggggagaggcctttactaataattcagggagcatcaatattgattccgctgcactcattgctgtaacctgatcacagcgaggttcaggcaggataagccgccaggtgtctgctccaggaggggggcctggccagcccccacctccccccactctgcccttccccagagacgaccctgccctctcgctagctagatgcacccttcacttatgtctttggacaaggtgcctagtctggaaagcgagaagacctgggagggcagggagagtgaagct

SEQ ID NO: 6370 - DNA, 2300 bp, Homo sapien
gcactttgggaggctgaggcgggcagataacctgaagtcagtagtttgagaccattctggccaacatggagaaaccttgtctctactaaaaatacaaaaattagtcgggtgtggtggtgggtgcctataatcccacgtactcgggaagctgaagcaggagtatcacttgaacccgggaggcggagcttgcagtgagccaagatcacaccactgcattccagcctgggggacagagcgagactgtctcaaaaacaaaacaaaaactaacaaacaaacaaaaaaacccgccaaaccgacaaaacactaaaataaaagaggctcagagtttcaaattgtaattctttcattcaatggtgttgcatacaattttttctttgagtttttgcatgcttttttaatttttttttttttttttagtttgagacagggtctctctctgttgcccaggctcagtgcagtggcacgaacatggttcactgcaactttgacctcctgggctcaagcattcctcccacttcagcctcccaagtagctgggatgacaggtgtgtaccaccacacctggctaattttttaatttttttaatttcttttttttttttttgagatggagtctcactctgtcgcccaggctggagtgcagtggcacgatcttgattcactgcaagctccgcctcctgggttcacgccattctcctgcctcagcctcccgagtagctgggactataggcgcctgccaccacgcctggctaattttttgtatttttagtagagacggggtttcaccatattagccaggatgatctcaatctcctgaccttgtgatccacccgcctcggcctcccaaagtgctaggattacaggcatgagccactgcgcccgatcttttttttttttttttgagacagagtcttcctctgttgcccagcctggagtgtagtggtgcaatcttggctcactgtaacctctgcctcctgggttcaagtgattctcccacctcagcctcccgagtagctgggattacaggcgcccgccacaatgcctggctaattttttgtatttttagtagagacagggtttcaccatgttggctaggctggtctcgaactcctgacctcaggtgatccacccgcctcggcctcccgcagtgctgggatgatagatgtgagccaccgcgcccggccacacaaacttttatgttttgcgttttgtggttgtctttgactgtcctgtagttcaagttagtgtttatccagctgtgccagcattgtgcaccgaacggccaacccttcgtgggagggttttacttagtgaacacggcagcttggctggaggagggggcctgagccaggcctggaaagaggagaggtgaagggcacagggcaggggccaggctggccgcagatcctcagggatggacgcatcccgcacacacttgtcgagggtcctctgtgcaccaggctttgccctggacctggggacacagcttagcaagtggcaaccggaacagtgccttggagtagcgagcacgctggacgcacagcacaccacgtgcagcgcgacgttgggtctgattcagggaattagggcaggtcgggatggggtgacggctggcattgtagccaggtggccacagaggggacgtctgagaaggaagagagctggggaggctggcaaagctggtgcagtgggcgggtactgagcctgcaccaggaggtgggcgggtgaggatggtggcgcggggccgggcagcagttggaattcctttgaggatagtttcaggacacaagcatggcccctacagatgcctgccaaggcagaatagagactccccccaccaaaggcggggccggtccccgttctagccccctacccagggttggctgtggcccctcagcccctcaggctgtggcccctgggggctgggctttcgacacaaggagggctctgcccagcagtgaccacctgcccacccccagcacctggccacattcatcatggacaagagcgaagccatcacgtctgtggacgacgccatccggaagctggtgcagctgagctccaaggagaagatctggacccaggagatgctgctgcaggtgaacgaccagtcgctgcggctgctggacatcgagtcacaggtggggcccagcgccacgggggacagggagcacagtgggtagaggcggtggcagccaccggctgcagcccggatgtgcggccggtcctctctgcagggccggccatgccctatcattctggtccctggaagaggatgggacaagggtgggcagagggccg

SEQ ID NO: 6371 - DNA, 2300 bp, Homo sapien
tttttttttgagacagagtcttcctctgttgcccagcctggagtgtagtggtgcaatcttggctcactgtaacctctgcctcctgggttcaagtgattctcccacctcagcctcccgagtagctgggattacaggcgcccgccacaatgcctggctaattttttgtatttttagtagagacagggtttcaccatgttggctaggctggtctcgaactcctgacctcaggtgatccacccgcctcggcctcccgcagtgctgggatgatagatgtgagccaccgcgcccggccacacaaacttttatgttttgcgttttgtggttgtctttgactgtcctgtagttcaagttagtgtttatccagctgtgccagcattgtgcaccgaacggccaacccttcgtgggagggttttacttagtgaacacggcagcttggctggaggagggggcctgagccaggcctggaaagaggagaggtgaagggcacagggcaggggccaggctggccgcagatcctcagggatggacgcatcccgcacacacttgtcgagggtcctctgtgcaccaggctttgccctggacctggggacacagcttagcaagtggcaaccggaacagtgccttggagtagcgagcacgctggacgcacagcacaccacgtgcagcgcgacgttgggtctgattcagggaattagggcaggtcgggatggggtgacggctggcattgtagccaggtggccacagaggggacgtctgagaaggaagagagctggggaggctggcaaagctggtgcagtgggcgggtactgagcctgcaccaggaggtgggcgggtgaggatggtggcgcggggccgggcagcagttggaattcctttgaggatagtttcaggacacaagcatggcccctacagatgcctgccaaggcagaatagagactccccccaccaaaggcggggccggtccccgttctagccccctacccagggttggctgtggcccctcagcccctcaggctgtggcccctgggggctgggctttcgacacaaggagggctctgcccagcagtgaccacctgcccacccccagcacctggccacattcatcatggacaagagcgaagccatcacgtctgtggacgacgccatccggaagctggtgcagctgagctccaaggagaagatctggacccaggagatgctgctgcaggtgaacgaccagtcgctgcggctgctggacatcgagtcacaggtggggcccagcgccacgggggacagggagcacagtgggtagaggcggtggcagccaccggctgcagcccggatgtgcggccggtcctctctgcagggccggccatgccctatcattctggtccctggaagaggatgggacaagggtgggcagagggccgcatagagctgagagtccagggaagtttggaagccggggtcagccttgcggtacagctgcggggtgtgtcccgggcctagtcctcatctttgggagcccattccccagcggcgccagaggggcctgtgctccaggcttgtccacagctccggccactccctgccagagtgcccagaccccgggtgcgagtcgtgtccgcgcgatgtacccgcaggaggagctggaagacttcccgctgcccacggtgcagcgcagccagacggtcctcaaccagctgcgctacccgtctgtgctgctgctcgtgtgccaggactcggagcagagcaagccggatgtccacttcttccactgcgatgaggtggaggtgaggcggtgccgggcggggcagggtggggccccgccgcgccgcgccccgccctcctggccgcctgacgcccgctttcccaggcagagctggtgcacgaggacatcgagagcgcgttggccgactgccggctgggcaagaagatgcggccgcagaccctgaagtagggcagcgggcggagcggggtcgcagggggcggggaggggaggagcccggcaggggaggggaggagccggcaggggaggggaggagcccggcagggagggagggtcaggtgcgttcccggcggggctgagcaggaccccctcgccctccaggggacaccaggagaagattcggcagcggcagtccatcctgcctcctccccagggcccggcgcccatccccttccagcaccgcggcggggattccccggaggccaagaatcgcgtgggcccgcaggtgccactcagcgagccaggtgggccgaggggctggagggggctccacagggctcgttgtggggggctcggtgagcagccgccgtgt

SEQ ID NO: 6372 - DNA, 2300 bp, Homo sapien
tgaacgaccagtcgctgcggctgctggacatcgagtcacaggtggggcccagcgccacgggggacagggagcacagtgggtagaggcggtggcagccaccggctgcagcccggatgtgcggccggtcctctctgcagggccggccatgccctatcattctggtccctggaagaggatgggacaagggtgggcagagggccgcatagagctgagagtccagggaagtttggaagccggggtcagccttgcggtacagctgcggggtgtgtcccgggcctagtcctcatctttgggagcccattccccagcggcgccagaggggcctgtgctccaggcttgtccacagctccggccactccctgccagagtgcccagaccccgggtgcgagtcgtgtccgcgcgatgtacccgcaggaggagctggaagacttcccgctgcccacggtgcagcgcagccagacggtcctcaaccagctgcgctacccgtctgtgctgctgctcgtgtgccaggactcggagcagagcaagccggatgtccacttcttccactgcgatgaggtggaggtgaggcggtgccgggcggggcagggtggggccccgccgcgccgcgccccgccctcctggccgcctgacgcccgctttcccaggcagagctggtgcacgaggacatcgagagcgcgttggccgactgccggctgggcaagaagatgcggccgcagaccctgaagtagggcagcgggcggagcggggtcgcagggggcggggaggggaggagcccggcaggggaggggaggagccggcaggggaggggaggagcccggcagggagggagggtcaggtgcgttcccggcggggctgagcaggaccccctcgccctccaggggacaccaggagaagattcggcagcggcagtccatcctgcctcctccccagggcccggcgcccatccccttccagcaccgcggcggggattccccggaggccaagaatcgcgtgggcccgcaggtgccactcagcgagccaggtgggccgaggggctggagggggctccacagggctcgttgtggggggctcggtgagcagccgccgtgtcccccatcaggtttccgccgtcgggagtcgcaggaggagccgcgggccgtgctggctcagaagatagagaaggagacggtgggtgcccgggcccggcaggtggcccctctcttccccgcccccagcagtggacactggtccttgctgtccctccggccagtccccagcctgtggctgcccctccgaaggtgtggggcccagctcctcccatcatctgtggggctgtccctgcagcaaggcggggcggtggggagtgtcaggggctgacccctgaccccctctgaccccagcaaatcctcaactgcgccctggacgacatcgagtggtttgtggcccggctgcagaaggcagccgaggctttcaagcagctgaaccagcggaaaaaggggaagaagaagggcaagaaggcgccagcaggtgcaggggacagggacggggccggcaggtgcaggggacggggccagcaggtgcaggggacagggacggggacggggccagggacatccatgggggctactcatggaggtggaggaaggtccagcccacacagatgggctgcgtgggacagaaggcgcaggggccggggagatcagggccagcctggctcacgcggtgcctcccatgccagagggcgtcctcacactgcgggcacggcccccctctgagggcgagttcatcgactgcttccagaaaatcaagctggcgattaacttgctggtgggtccggtggccccagccctgccccactgtctgtgctgaggggagggtggaggccccgccccgccccggcacctgctcacttgttcccacccccaggcaaagctgcagaagcacatccagaaccccagcgccgcggagctcgtgcacttcctcttcgggcctctggacctggtgcctggggccgggcggcaggggcgcgcagggtgggggcccagaggcctctgcagcatctccccggggtcggggttggggcagcaggtgcccgccttgggcagcccggttcacgctgtgtggccactctccctggggtccaaagtcccttcccgagggccagcctgtggagctacgggggtgctgggccagggtctgtgggcctcagtcccctctgaacctcactgtgccccagatcgtcaacacctgcagtggcccagacatcgcacgctccgtctcctgcccactgctctcccgagatgccgtggacttcctgc

SEQ ID NO: 6373 - DNA, 2300 bp, Homo sapien
gagatgccgtggacttcctgcgcggccacctggtccctaaggagatgtcgctgtgggagtcactgggagagagctggatgcggccccggtagggcagggcagagcagtgccggggcttcatggggggccagcgctgcatgggggccagcaagggggtcctggtgggccagttctggagaggcagggctgacttcaggacctctcaccccagttccgagtggccgcgggagccacaggtgcccctctacgtgcccaagttccacagcggctgggagcctcctgtggatgtgctgcaggaggccccctgggaggtggaggggctggcgtctgcccccatcgaggaggtgagagcaccagcagcccccatccctaccccagccccaacacccactcctcaccagagctcccccccagccctgacacccacccctccccagagctccccccccagccctgacacccacccctccccagtgctcccctccccagccccgacacccacccctccccagagctcccctccccggccccgacacccacccctccccagagctcccctccccagcccacctccacccaccgccccttcagccacagctcagctgcccctagcccctgccaggagaggcaacccatgctggcatcaccgggcatcaggctccatcaccctcagtgatgcatcagtcacaggacattagcccagcccctgtcatatgccccctcgtcctgggacccagccccgccccatgtctaactcaggtcgcccaccttccccacaggtgagtccagtgagccgacagtccataagaaactcccagaagcacagccccacttcagagcccacccccccgggggatgccctaccaccagtcagctccccacatactcacaggtaagcccccctcaaagtgagggagcatgaaagtgaaacccttcagaacctacagtctctaaaaacatatgggtacgctgccaccaggtggtggcaagtgcattgttcaagtggtttaaaatacttttccagatttgaagcggttttcatttcaactgcatgatatataattaaaggaaacatttcaaaagtcatgcacaaattctctaccctaatatatcagctttttctgtgcatccacatgtatgttttagaaccaaggttagaaactactaaaccactgaacttgagtggtttcaccaaacactggcaccctgttggggctgttgggactgattcaggcccaacctctggtagagccaaaagaggagactggggttctgggctagtgaagcctctcccctcctcccacccccagccccacctgtttccaaagaggacaaagaacaagcctatggcactaggggagtcccgtctttccttgcctctcctcttcccttctgtgctcattcctggtccaatctgcatgggaagcccctgaccctcccacaccccaggattcaattttggggtaaagaggggccagcaatccatcttctaagcaagcatggcctcccctcacccacagtgtcagcctggctcccgtggtccctggcctaggaccacacttaaaaacatttccaccctttgacttcagctcctggtctgtccaccctggccatgtcctgacagtccatggccacttcatttccctgagcacctggacacgggagctgccctgatgaccagggccacactgaccaggatggacggcctggccaggtgacagccacaggcctgctacatgccaaagccaggacccctcagccagggccagcccccccgcgcttttgaggtgcaggtcccaccccacagagaggagcttgagacccgtcctccactggaccatttgggctgtgttcagtcctcagaggggccacggctctgaagacatgctggccctcactggccagctgcggggagctgtgaccctggcgtttcccaggaacgcccctggctctggttcccctggggtgccggactggagacccctgaggtggcctgggatgggccagccttgctgtaccacaggcccctgcgccacgcccacctcctgcctgccccgcctccacgcagggccccaaagctctggggctgtcacagtttccattccgggctgacgctgcctgcagcctctctccacggtgacctccagaacagaaaagaggcagccagtcgtgcacctgggaagctgctgccccccagccactgcccaggtctcagaggagacccccaccagactgggcctcagcccctcctgttcctcacaggggctaccagccaacaccagccatggccaagtacgtca

SEQ ID NO: 6374 - DNA, 2300 bp, Homo sapien
gagcaagcaaagactccttagagaagataccaaaaaagaggagtaaatataaaattaaaacttgataaattgaacttaatcaaaataaaaagctaacgttcattaaagacactattaaaatgaaaagggaacacatgctgagaggaagtattgaaaccacctttgcaaaattataactaaggaaattatgacagtgaaagataacagacttaaccaattccatcttgtttctaaccttcaaacggtccttgtccattactggccataggccaaacaagtcttgggaaggaatttaatttatagtttaaataatagcccttccccaaaactagactgttcttgtaaaatgaatgaaaggccaccagccaccaagttagaatgagaggggctggaagtctaaatattatcagccattattctggaggtcataagataagatttgcaacttccccaagatatcaacactactgtgaacctagggttggccttttttttttttttaaatggagtctcgttctgtagcccaggttagtgtacagagggacaatctcggctcactgcaacctccacctcccaggttcaagccattctcctgcctcagcctcccaagtagctgggattacagccatgtgccaccacgcctggctaattttgtatttttagtagagacggggttttgcatgttggccacgctggtctccaactcctgacctcaagtgatcgcctgctttggcctttcaatgtgctgggattccaggcctgagccaccgcgtcagcctaggatttgccttttaagaagtcttttccgccgggcgcggtggctcacgcctggaatcccagcactttgggagactgaggtgggcggatcacgaggtcaggagatcgagaccatgctggccaacatgatgaaaccccgtctgtactaaaaatacaaaaattagccgggcgtggtggtgagcgcctgtaattccagctactcgggaggctgaggcaggaaaatcgctcgaacccgggaggcggaggttgtagttagccaagatcgcgccactgcactccagcctgggcaacaagggcgagattccgtctcaaaaaaaaaaaaaagtcttttcaggtttttgcatttctgacaaccggatggccccacctggacctgccaaccagttgtgtggcctctacccagggactgactcagcataagcggacagcttcgactccctgtgatttcatccctagctgaccagtcagcacttctgactcactggccccctacccaccaaattattcttaaatactgggatccccgagttttggggagactgatttgaggaataaaactctggtctcccgaacaatcggctctgtgtgaattatgctttctctattgcaattcccctgtcttgacaatagactctgtcccggcagctggcaaggcgaacccatggggcggttacagtgtctgcaacgcagacacaagcgacagagacttgatcagaatatacaaggaactctgcaagtcagcgatggtaagaagcagggcagctgggcctcctacgcctgcctcgccgttcggtcccccggacacctctgggcttaggactcaggggaacagattcccagaagcaggttccccgccgcgtccggcgcccgggctctgcagccgccccctgctctgcctcctgcacccgcagggcgtcccccgccgctccctcccctgcttcctgcagcggcccccgaccccagtcctggccccaccatggatcctgcatcgccgggttcggccctggcgggttcagccccgcagagtcggcacccgggccaggtccatctcctccagccctcccggtgcgtcccgcggggcaggaaggaggcgaggcccagccgccccgtgtcgtgcaggtgttttcccgggcccgtccgcggcggctgctgaggacctggggagacccagcctgtaggatccgcagctgcggtgcgcggccggcagtggcgctcgggcttcgtccccgggggcggggcttcgtccaggcgcgcagggaccagcgggcctcgccctcccgcgccgctttccgattggcagccgcccgcggggcattgtgggccgtccgcgcgcccgtcccgtcgccgccgccgccgccgcagacccctcggtcttgctatgtcgagctcacccgtgaagcgtcagaggatggagtccgcgctggaccagctcaagcagttcaccaccgtggtggccgacacgggcgacttccacggtgaggacggcgcggagcccgggcgcggcgcaagcgccctccagaggc

SEQ ID NO: 6375 - DNA, 2300 bp, Homo sapien
cacccggtgcttttgcccaagctttgaccacacgtctgtcctgcaggaaatgaacctgctgggtagatgcaccccctgagacagcccaggtgtctccagaggcagccccgtctcaggcttcagggaccccgcctcttccctcctgacaagggccctggatggcagcctggtctggccctgatgggattgttggaggcctcctggaatcagctctgagggggtgtcggctctcctggagggtccaaacccccatcctcctgcatgttctctggtaggaggcagagaaaagaccccacgtgcctggagagctgtgctagctgctaggtggtcctcgggaattccaggctgggttttctagggaggactggttgtcacgtgtggtcactgttgactagacagagtcggctcgggggtcctctgtgtgggtttgccctgctgtggcctgtctgccacccaccacctctttcactgttggtgggggccttgaggggagggcccagccggcgggagctggctcagaactttggccaaaggtgaacggaattttttaggagcagcagcctcctgccccaaggccgaccggcactggcagcactttcctgttgaagaaatcttcctggcgtgtggtttcaaagtgtaagcacctcagtgatgcaccctgtcctaagcattgagaggcacgtttacttgtgaatatgagaccatgagattctcaatgataggaaagtgctgtcccccacggccttgcacagtggcctcgggtagagcggctatcaagagcagacagtggtccagcctgctgggcacctggcctgggctgtggccctccagcgggctgccccctggccccaggttagggcgtccaggagaggcttaggccctctacttcctcacagttccccagtttgagccatcgaaggccttcttcctgcccacctccccgtctcagccacagccgttcccaagcaccagcgtggctcctggtgccagtgacctgccaggaggccccttgtgattataaaaccgttcagttgggccgggcgcagtggctcacacctgtaaccccagcactttgggaggccgaggcgggcggatcacgaggtcaggagatcgagaccatcctggctaacatggtgaaaccccatctctactaaaaaacaaaaatacaaaaagttagcctggcatggtggtgggtgtgtgtagtcccagctacttgggaggctgaggcaggagaatggcgtgaacctgggaggcagagcttgcagtgagctgagatcgtgccactgcactccagcctgggcaatagagtgagactccatctcaaaaaaaaaacgttcagttggctgggcgcggtggctcacgcctgtaatcccagcactttgggaggccaaggtgggtggatcatctgaagtcaggagtttgggaaaagcctggccaacatggtgaaactaaaatacaaaaatgagccgggtgtggtgtcaggcgcctgtattcccagctacttgggaggctgagacgtgagaattgcttgaacctgggaggcggaagttgcagtgagccaagattgcgccattgcactccaacctgggcaatgagtgaaactccgtctcaaaaataaaaaataataaaataaagccgttcaataaggagaatttggaaaaaagtggaagaaggaagcgctgcagccacatccccgccctgaaggctgcgtccctccagtgcctcgcagattagtcaggatgcccacttagcactggccacggggccttgctctgtcccgggtccactctcatccccgtgtggtgatggacctctgtggacaaatgctttttattttatttattttttgagatggagtttgtctctcgtcacccaggctggagtgcagtggcacaatcttggctcactgcaacctctgtctcccgggttcaagcgattctcctgcctcagcctccggagtagctgggattacaggtgtgcgccaccacgcctggctaatttttgtatttttcgtagagaccgagtttcaccatgttggccaggctggtctcgaactcctgacctcaagtgatcctcccgcctcggcctcccaaagtgttaggattacaggcgtgagccactgcgcccggcgtaatttttgtttttagtagagatggggtttcatcatgttggccaggctggtcttgaactcctgacctcaggtgatccatcttcctcagcctcccaaagtgctgggattacaggcgtgagccgccacgtccggctaacaagtacttttttatttttattttattttttgg

SEQ ID NO: 6376 - DNA, 2300 bp, Homo sapien
gccaggcaggcggcacaagcctgggggagccacaagcaggggcatctgggaggggcttcagggtgcgggtggcggggtccagggcctcaacgccatgtacggctttcagaacccatctgcgccgtcggccacggtgtcgccgccctgtgctgtgccaccaacgaggacagatcctgggtgttcgacagctacagcctgacaggggtgagtgtctggaggccgaggcacgctgtgctccctgctctgtcctcccccatcacagccagaggtgaggtcggaggctccagggtgagtgcctggaggccgaggcacgctgtgctccctgctctgtcctcccccatcacagccagaggtgaggtcggaggctccagggtgagtgcctggaggccgaggcaggctgtgctccctgctctgtcctcccccatcacagccagaggtgaggtcggaggctcccgaacctctggcccctagtctcccggaagcccaggcccactcaccaggggacgtggggagggaggggcatcagacttgcgtgtgcagtcaggaggggctgagagcccagccagggtgtcctcggagacacagcctttgtcaatctgaggcccaaaggctgtgaagtgggctctgtggacactgggggcggctgtgggagtggctgatccacaggccctgaggcagggagaggtggctgctgtgcggaggctggtttcactggaagttaaacaggcctggcccccagctcagatgtcacttcccctgctgaggggacccttcctcagtgggtactcagtggtgccctccgaggggtgacaccaacccagtctcaggttacaagtgggcgtgaccccttgagtgagtggttagattcactcctgcccagagggtgccccgccccagcactctgcccaaggggctcaccccaccaagcccttctcattctagtcacctgtgtgctccggtgctgggggagctggcccgtcctcctgtagtggccgtgtcgctctcagggacaccccatgggaagatggctagactttgtcatctctccgccctccagccttagcagctgtccctgttatgagcagtgacacccccggtcccacttggttgggtgaggctccctgccctgacttgaccttcctgacccctggggtgggccgcagggcctgggcctgtctcaggagcccccaccccgctcccgcagccctctgtgtgtgagctcgtcagggcccccggcttcgcccgcctgccgctcgtggtggaggacttcgtgaaggattcgggcgcctgcttcagtggtgagcctcgagggtgccccctgcacttacagaagatggggtggggggcttccctgctgcagcctgggggagaagcctcctgggccctgggttctatagacccccatggcactgactcagacccagacaggctgacctactgctgaccctgggagcccgcctggagttcgaggctctcagtgggtgaggtggacattgcctgaggttggtgccctcggtcctccccagcaagcgagcctgacgctgtccacgtcgtgctggaccgccacctggtcacaggccagaatgccagctccactgtcccggccgtgcagaacctgctcttcctctgtggcagccggtgagggcaccagggtgggcacattcctgccacatcagagctgcacccggtgcttttgcccaagctttgaccacacgtctgtcctgcaggaaatgaacctgctgggtagatgcaccccctgagacagcccaggtgtctccagaggcagccccgtctcaggcttcagggaccccgcctcttccctcctgacaagggccctggatggcagcctggtctggccctgatgggattgttggaggcctcctggaatcagctctgagggggtgtcggctctcctggagggtccaaacccccatcctcctgcatgttctctggtaggaggcagagaaaagaccccacgtgcctggagagctgtgctagctgctaggtggtcctcgggaattccaggctgggttttctagggaggactggttgtcacgtgtggtcactgttgactagacagagtcggctcgggggtcctctgtgtgggtttgccctgctgtggcctgtctgccacccaccacctctttcactgttggtgggggccttgaggggagggcccagccggcgggagctggctcagaactttggccaaaggtgaacggaattttttaggagcagcagcctcctgccccaaggccgaccggcactggcagcactttcctgttgaagaaatcttcctg

SEQ ID NO: 6377 - DNA, 2300 bp, Homo sapien
cctcaactgtccatgccactcccacaccccagcctcatcctagtgctaacagagccacgagagacctttctgaaaggcaaacccgggtgtgagggtcacagagttcagctcatcctctcactgaaccaccagggactcaggccctcaggcaccatggagaacgcagaagtgtcctggccccccctcaccccttccagggaagccgctcagagggaccctttcctcacaagggttctgggattatacccctcccccgccagctcttcctagcatccttcggcccctcaaaaaacttttaaaaaagaaactcaacacaccacacccaatccagaaggctctgggggcctctgtcctaccaggggaaggacacagccccgcccaccctgcctgccggagagcacttacaagtttattccaaagtagcgtgagctgtatctctctacatttattttaactctggggcccaatccctcagcttcatttttatcttcattctttttttttttttttttttttttttgagacggagtctcggtctgtcgccaggctggagtgcagtggtgcgatctcggctcactgcaacctccaccttccaggctcaagcaattctcctgcctcagcctcccgagtagctgggactacaggagggtgccaccacgcccagctaatttttgtacttttagtagagacggagtttcactgttttagccagaatggtctcgatctcttgacctcgtgatccgcccgcctcagcctcccaaagtgctgggattacaggcgtgagccactgcgcccagactcttcattcttatataagttaatacatattcactgtaaaatgtccacttatcgaggaaaaacaaagtgcccagtagactgccgcaggctctgttcccccagctgcccgcccttccggcctcctgaagtgctgcccccagcctgctggcgctaagaccccacgtcctcaacatgccggacctcctcacgcctacctgctctggaaacaagccccaacccacccccccaggactgaaccccactcgaggctcctcccacccgcagtctgggggcatcactcaggacccctggagctcagcacatcgtgacgccacaaccccacagccccatctccccgtccacacttgaggagctacagacttcaagaggcagacccctgggtcgcaaccccggcccccacctctccgtggtgcggtgaccttgggctgctcacttccctctccaaaaggctcagaacaaggccaggcaccctcgtgctccgctgctcatccctcccctgctgccctgagaccctgcaggctcagcgccaggggacgcaccccgctgcgctccgacccgcgtgagccccaggccagtactgccctggtacccttgccccaggacgggggccgcggggcgccttctccaggagggggctccgggtctcctcagaagccggtggctcagaaggtcagggtccccgcggccgcccgacctcagagctgggtcaactcccggaatggcccctccccacacccgggctcccctctcgcagcgcagcggcctcagagaccaggcccaggcacgcggctccctccgctagaaacgtcgggcccgggccgcctcgccgggcagacgagactcggaggagcgacgcggcgccgggatccatcacgaccccccgaccccgccccgagctccatcccaccaacccgcgaccccacccccgcccccgtccccgccccgagctccatcccgacaccgaccccgctccgccctcccccggcccctgcccggcgcccccagcggcctcggcctccggcgccacgtgacgcgcgcccaccgtgtcccgaacctcccgccccgggcagccccctcgcggacgctcttcggacactggccccggccgccgggcctcaccttcggcggcgccgctggccacgagcagacaggcgggcctgttagggagccgctcggacgccatggctcgggctcggcgctgggtctgcgcgtgcgcggcgtctgggcgcgcccgggagttcgcgggtcacgtgccctggcggccgggggcggagccgggtgggactgggcgcctgcgcgttcgtacccggtccgggtcggctgggctgcccgccgctccgcgcgcccgggcggtcgcaggtcgcgcctgctttggccccggcgggttcggcatccgagcctggcaggggccaataggtagggtcgcgagggtcctccccggccgcatgcgcagtctgagcgcgcgcggggtagggctcttggcctggggtgggggcgcgggc

SEQ ID NO: 6378 - DNA, 2300 bp, Homo sapien
ggaaccagcgatgcccacacacagacatgacaccttggactacggtggggacccaagggtacactagggggcacaccacctgtggacacaggtgcacacacacgcattagacttgccgccagcgtgagggccaagcctggcttccagcttcctcctccatactgctgttctaacttgggggaggggaagaggaatggggagggggctgctgcagactcagccctgcacctgtggctggtccagctcagctccatcagggacaccttggggccagtgcaggtggggctgggcaagcaggtagacctgctccaacctgcccctcctgctcccgggtttgaggcccacagtgtgtgtctgtgggggacaagatcctgtgcagatccagaaagctctccaagcggctaggcccagcctgtggtgtgaccgcaggcctgcgaggcttcagacacctccatccactaacacccccacccacctaacactggacactcactcagctccgtcctctgctccctaacccaactctcggccttgcctgtaccaggagctcccagctcccacttcccctgtggtgggagggctctgtgtcaggtgaggcagggtgcactgcttgtctgacgggggtcagggacccttctccaggctgggccagggggagccagaggccagtggcttttttttttttttgagaaggagtctcaatctgtcgcccaggctggagtgcagtggcgcaatcttggttcattgcaacctctgcccccgctgggttcacgtgattctcccgcctcagcctcccaagtagcttggatgacaggtgctgccactgctaatttttgtatttttcttagtagagacggggtttcaccatcttggccaggctggtcttgaactcctgacctcgtgatccacccgcctgggcctcccaaagtgttgggataacaagcgtgagccaccgcgcccggcggaggccagtggttttcagggggtgtgacccacagaattcctcaccttggctgttcccaaccatgacggttcccctggttggagcagaggcttggtgggaccttcatactggcagcagggggccagggacctgggcggcccgctcgcctgctggctctgtctcaagcgcccttttggcctcaaagggtgcctgcctgtctgccaaccactccacgtggtctcaccccctccaactacagtctaaggaaaaactgcttcaggccaggcgcggtggctcacgcctgtagtcctcgcactttgggaggccaaggcaggcagatcgctttagatcaggagttcgagaccagcttggacaacacagtgagaccccctctctacccaaaacacaaaaaaattagctgggcgtggtggagtgtgcacctggggtcccggttgctcaacaggctgaggtgggaggatcgcttgaacacggtaggcagacgctgtagtgagccgagatcacgccactgcactccagaggccctgtctcaaaaaaaaaaaaaaaaaaagaaaaactgcttcaattctcctcaccaaagccagcacgcccgaggtgtccccatctcaggaagtgacactccgtcctcccaggagctcagcccgacgccccacaaccctgcaggcctccccgcgacgcccccgtcctgggccggcggagcccaccccgcctcctggaccccgccgtccccctcctagtctccggggacacccggagcttctgaccccgcagccccccggtctcccctgctcctcgggtgtggccaccggaacaccacgggcaccttcgcgccccgacaccgccgcctggctctgctgatgcccgcgcccccaccccaggccaagagccctaccccgcgcgcgctcagactgcgcatgcggccggggaggaccctcgcgaccctacctattggcccctgccaggctcggatgccgaacccgccggggccaaagcaggcgcgacctgcgaccgcccgggcgcgcggagcggcgggcagcccagccgacccggaccgggtacgaacgcgcaggcgcccagtcccacccggctccgcccccggccgccagggcacgtgacccgcgaactcccgggcgcgcccagacgccgcgcacgcgcagacccagcgccgagcccgagccatggcgtccgagcggctccctaacaggcccgcctgtctgctcgtggccagcggcgccgccgaaggtgaggcccggcggccggggccagtgtccgaagagcgtccgcgagggggctgcccggggcgggaggttcgggacacggtgggcgcgcgtcacgtggc

SEQ ID NO: 6379 - DNA, 2300 bp, Homo sapien
ttgcagtggtgaagacgcggctccagtcacttcagcgaggcgtcaacgaggacacctactctgggatcctggactgtgccaggtggggaggtcccacggcgggtggggcctgggggcctgcgtaccgggctgaccctttcgtccttcctccacaggaagatcctgcggcacgagggcccctcggccttcctgaagggcgcctactgccgcgcgctggtcatcgcgccccttttcggcatcgcacaggtggtctacttcctgggcatcgcggagtccctgctggggctgctgcaggacccccaggcctgagcccagcacccgctccaccccagccagctgggcagggccggtgtggggctggagccaggcagctagcccaggacggagcaagggaagacccctccccagccctcccgtcggcaggggcagcagggggcagggtgcagggtccacataggtggtgcacacgcaagccccccggggtgctgcctgcaccgttgggatcaatgtctcatttatgtagaaaatgcagaaatctttacattcctcaagctagcccctgccccaatcctgccctggcctgaacacccccagggacagagctggtctctgggctgggggcccccgggcctgggccgggcaggctggaccatacccccagtccaccagctccagtctccacagccatcctggcccacacaggcaccccacacaaacctatttattgaatctgctggacccaagcggctctccagcccttccgtccttccccagccgctcttgtcgccttggcaggacttgactctgcctccctggccagccttgcaagaggactggggtctcctgccctctctgttgagccaggaatcccaagtgaggggttgccctgaggtctgactcttggggcaagcccgccacccactgtgggactttctggtgggctcctcagctcccaccccaggctggggcccagattgtgaggtctgtgtgcatgtgtgtgtgtatgtgtgtgtgcatgcgtgtgtgtgttgtggggatctggcctggcccttggggatggggctgctggggactgccccccttcccgccgtggccaggcgctctgtgtgctgtgtgtgccccaggctctgttgaccccgtccaggaactaacttacccagcttggtctctcctgagtcctccaccctggcctgggattggccagggagcagggcgggcattgggaccagtgtggagcctgagggtgcctgccctgctctggagggagggccaggagctgccacacccccaagtcctctcagggcccaccctcctttttcagcctctgcataaggcccctgggtacactgcagaagccccatccttcccgcctccgggcataaggcccctgaccacacttcagaagccccatcccccctgccaccgggcgatccctgctgtgagccgaagctctccctgccccgccctggccatgtgatcgtgttggtgacagaccctgatgtgctggtgctgtgtccccaaaaccggggccctccacagaggccccttcccagcgacactacctggggctcaggcctggacccccccagttcacggttgctcctgggagctgcccctcccgtcacatcagaaccttggaagctgctgctgctgcttacagaattatatttttttcttttgaagagttttaagaagttgtaactttttgtgtcttgtcatgtcagagaataaataaatattctaagtagatgctgctgtctgtctgggggtctgtttgggggcgggggagggcagtcccctcttcccataactggctcccttcagactgcagggctaggcctgcgcacccacccaccgacccctcacccaccgacccgtcacccaccgaccaaggggcaccctggcctagaggggatgctgagcgggacccgcctcctgcctctggcagtcccagatgggacttggaccccgcagttgctctctcggaccctaagtttctacccctggatctaaggcggagctgggtttgcggatcccacggttcccggcggggcggggcccggtcgcccctccccctccccgccctcctgcgccgggagcagtgcattgtgggaaactcccgagctctcctccgcgttcgcagccgccgtcatcccgcggaggagcgcgcagccccggggaggccggaggacgcgtaaggcggggggctcccggcgggcggggcgggcggggcgggcgcggcgtcctgcggggcgaggaggcggctccgggccttgaaggtcactgggtttgcgcgcggg

SEQ ID NO: 6380 - DNA, 2300 bp, Homo sapien
gcccaggtcggggggtcttagggcgcccgggaccccagcccctagctcgaagggggcaggtgccggctgctgctctctctgtgctgaaggatgtgggggatggtcaccacagctgtccaggtcgaggtgctccggtaggcaccctggccccggcccctggcactgcccccagaggtgcctggccctttaaaagccggagctggctggggtgcacgtgagccccgagcgtgagcggcgtgtgaggctggctgggaagacgctggcggtggggagggggggactgaaaggaagccaggtggtcccaggggtgagcatgggactgggtggcaggtgcctcccgctgctgcaccctcaggacgcagtgacggcttcagtctggggtggtgggtgaggggctgcgtgagagagggaggctgggggaggattactcttcgggtggccccaccctcactcattcccattccctcatccttctaggacagaagtggcggttgctgacgcctggaaattcccctgaaggtggagcaccacccaacccccctgggtcccaccctccctcaaggcctcctccacctccacctccaccccgcctggcctggcgtccacctctgcggctcctacctgggtgcaatcgagttaaatggctgataagcagatcaggtcagactccagtcctggctgcgtgcctcacccccaccctgacccatggtcaaggaagccggtcctgacacccctgtccacacagcctgccagccaagctcatcaatggcggcatcgccgggctgatcggtgtcacctgcgtgtttcccatcgacctggccaagaccaggctgcagaaccagcagaacggccagcgcgtgtacacgagcatgtgagtgtgccgggcggtcgcggggagtgggcccagcatgtggcagcaggagaggtgggggctctgctcctgtgccccccaccctgtttgacagaagggaaacgggaggcaggcgggcctaggggagatcccacgtgggtcaggactggggtcggggctgggctgaggacttggcctcttctatcagccctagacagtccagggaccctggcctccggctggccccagctggccctggctcaccctgtccccttggccacaggtccgactgcctcatcaagaccgtccgctccgagggctacttcggcatgtaccggggtgaggtttggctcggctgggctcgatatgggcaggcctgggtagcgcccgcgagtcgtggcagggagcggtgggggaggcagggcagggcggccagcctgggcctggtgtgtgagcgtggacgtgtttgtgggggctgtgcctgtgcaggggggactggatctctggtgagtggtagttctcagcctctcccgtggcagctccccacccccacttagtgcctggtgcgtgggatgccatggtacatctgtctcttctctggtggccacagctgcctctgccttctgggccaggctggaccccgtttgtggctggggatgggagggagtaaggggcattaccgcaaagcagcttaggacacaatccagagcctagatttggcagaagctctccagccctgagccttcggcactgagatgggggctctccacagcctcccccgagctctggcccagtccagaccacacactcctgtgacctctggccccagccccctgccagcacaagcaccatctgtcctccagggagggagaggtatcctagggaggcctcaggggctccggggcagtcctcatgccctgagcagcaagatgctgcccagaatcagagacagatggagctgcagtgggcatgggagagcctgagcctgaggtgctgccccatccctgcctggccccgccccacctggcacacaccaggcccaaatgtgggtgagagaacagatggtggccaggagtgactgggacagggttttgccagccaggaggcaagtcctggccaagcgcctccccactcaggccaccgagcatgtccccccagctgaccccctgccccacaggagctgctgtgaacttgaccctcgtcacccccgagaaggccatcaagctggcagccaacgacttcttccgacatcagctctctaaggacgggtgagggttctgcctggcagacactcgaggggtctttggcttcagataaaggatgggtccaccctgccagctgggtcccacctgggggctctgcctgtcttcagccccttgcttggggcttctttgacctcgtggggcaccctccctcctttcccctgaccaggggagcaaagcagatgtca

SEQ ID NO: 6381 - DNA, 2300 bp, Homo sapien
ctctccgccctgggatctctgggcctgcttctcttcttgggacgaatggccgctccccacctcggtcggcctgacttccaggattgcccctatcatgcaggtgtcctcatcccagactggagataggctcccaggaggaagggggttgctcagtccctggagggccagggtacacccctgggagggactagagtggagatgaagggcccagcgcagcccggagagctgtggccagtctgcacccgaagagtggggcggcaggggtggggggggctaggagggatcaggtagaagttcagaggtcagcttgtcaccaccactggctgaggcagggaaaggcaggtctgacggtgaagccctgagtgggacgggtggtggggcagagggctctgggcatgccagctcgtgtgccctctggacctgccaggtgagcagggcctgtgggtggcaacagtggcctctggcacccagctagctcttccctgtggacagcaggccttttttgtggcccagcatgaggcttccctgacatgcatctgcccctagcagacacacatcccacagacacgagtgggtgttagcccatctctgctccacagcaccggattccctgtccaggtacatacagggtaccctggcccggagaaagcctcattctcagagtaccagccctagacagatccaggccaggaaatgctatagggttcaacccacaggcagcagacaggaacacatgtgtgctgggggtgtggtggccacgcgctgaggtccctgtcggtgggtggcctcgctgtgccaggtcagcctgagtcagacccacccctgctcatctctcctctcaaggctgccggaagcctctgcttgcccaaagtgaaagagaaagtgcccccccacccaagcccgccccaccccgccccacggccaatccctgcggcccctcgcctcctcccccggcagcttccccttctgtgtgagtgctgggctggagtgtggaagagccatccagagtgagtgcctggggcagagtgagagcaggaccagcgggcaggtggcggagcgggggtcggtggtggatggcccagccctggaaagccgaggtgaaggttacgagtccctgaggatctgtgggtgtgagccagccgcgtggccctgggcaacggcgctgccggtgggtgaaacagctggcctctggggggcccagggaggggggaaaggcccccgaagctgggattttatggccatgaccctatgggaggcccctgaggctggctgtggctccccagccttgctgcttagtgggagaggcctgtcctctcctcctctgtagtggatgggggtgccagccacagggggcctcagaaggccagccatcccccacccccaaggcttccaggggtcccatcactggcttctgtgtgtccatgagtgaaactcctgggaggggtggaggggaggaaggggcgggcaaggggctggctgtggggggtgtgggcatcgtggggaggagctctgcaggccctaggtggagctgccatgggaggagagctatacctgggatagctgagcccaggtcggggggtcttagggcgcccgggaccccagcccctagctcgaagggggcaggtgccggctgctgctctctctgtgctgaaggatgtgggggatggtcaccacagctgtccaggtcgaggtgctccggtaggcaccctggccccggcccctggcactgcccccagaggtgcctggccctttaaaagccggagctggctggggtgcacgtgagccccgagcgtgagcggcgtgtgaggctggctgggaagacgctggcggtggggagggggggactgaaaggaagccaggtggtcccaggggtgagcatgggactgggtggcaggtgcctcccgctgctgcaccctcaggacgcagtgacggcttcagtctggggtggtgggtgaggggctgcgtgagagagggaggctgggggaggattactcttcgggtggccccaccctcactcattcccattccctcatccttctaggacagaagtggcggttgctgacgcctggaaattcccctgaaggtggagcaccacccaacccccctgggtcccaccctccctcaaggcctcctccacctccacctccaccccgcctggcctggcgtccacctctgcggctcctacctgggtgcaatcgagttaaatggctgataagcagatcaggtcagactccagtcctggctgcgtgcctcacccccaccctgacccatggtcaaggaagccggtcctgacacccctg

SEQ ID NO: 6382 - DNA, 2300 bp, Homo sapien
aggccgagggcggagcgcgcgcggcgccgagcggacgcgcctccccgcctaggtgctggccgagcgcggggcgggcaggcgagcgcggcggcggcggcgagcgtggtgagtgtctgcccggcggctcccttctgctgcgcccatccgaacgcggccgggctgcgggggcgagaggtgctgcggcggccgagggaggtgacagctgcccgaacaacgtggcctggcgggcgggagggggggtcctggaccagcggatgctccgatccgcggctgctctggcgtgagacgccgtgctcggccccgacggttccgggcgcgctccccgcacatacgtgtccccgagggtgggtgtccggggcccgagcccaaggaagaaaggccgacccgtgtgggacgcacacgtgggagttcaccggacatctgtggacacgtgcgtggccggagtcgcggtggccaggcggaggacggagcggtcggctgagccccagcagtagggcaggggcctgagccggcctccgagcgcagagagcggcccccaacccgcttctcctttgtcctctggccgaggcatcgcgcagttggagtccccttccgggaccctccagccagcaggatagaaagcaccgccccaagaggacggggacagcgggagattgaatggggagccgccggccagactcggagcctcacccccattgcctttcttgggggtaggaggagcctggcggcttcttgggtggaggattttacccctgcagattcggaagcagcggtatcttcctgtggggtggtctctgctctcctgctgtctccctggcttgcctgtggcctcagttcacctgactatgaaggggggacagtgacggctcacagcccggggcccggctggggctgcagggtttctatagcaacatcagtgcagggggagggccctggccagctgtctcataaaccaggggtgggaactgccgagtgagggcagagaaaggcggggttggcgttcagagggaacccctgccggttcttccccaggcagagcccctcactgtcatcattctccacccagaagctcctctccgctgcactgggtgacgtgcgggcccaggcctgcctctccgccctgggatctctgggcctgcttctcttcttgggacgaatggccgctccccacctcggtcggcctgacttccaggattgcccctatcatgcaggtgtcctcatcccagactggagataggctcccaggaggaagggggttgctcagtccctggagggccagggtacacccctgggagggactagagtggagatgaagggcccagcgcagcccggagagctgtggccagtctgcacccgaagagtggggcggcaggggtggggggggctaggagggatcaggtagaagttcagaggtcagcttgtcaccaccactggctgaggcagggaaaggcaggtctgacggtgaagccctgagtgggacgggtggtggggcagagggctctgggcatgccagctcgtgtgccctctggacctgccaggtgagcagggcctgtgggtggcaacagtggcctctggcacccagctagctcttccctgtggacagcaggccttttttgtggcccagcatgaggcttccctgacatgcatctgcccctagcagacacacatcccacagacacgagtgggtgttagcccatctctgctccacagcaccggattccctgtccaggtacatacagggtaccctggcccggagaaagcctcattctcagagtaccagccctagacagatccaggccaggaaatgctatagggttcaacccacaggcagcagacaggaacacatgtgtgctgggggtgtggtggccacgcgctgaggtccctgtcggtgggtggcctcgctgtgccaggtcagcctgagtcagacccacccctgctcatctctcctctcaaggctgccggaagcctctgcttgcccaaagtgaaagagaaagtgcccccccacccaagcccgccccaccccgccccacggccaatccctgcggcccctcgcctcctcccccggcagcttccccttctgtgtgagtgctgggctggagtgtggaagagccatccagagtgagtgcctggggcagagtgagagcaggaccagcgggcaggtggcggagcgggggtcggtggtggatggcccagccctggaaagccgaggtgaaggttacgagtccctgaggatctgtgggtgtgagccagccgcgtggccctgggcaacggcgctgccggtgggtgaaacagctggcctc

SEQ ID NO: 6383 - DNA, 2300 bp, Homo sapien
caggtgggcgaggggagtgggtgaggggagaggccccccaggccgcttgggcagaggaccgaactccgaaccccattcgatgccccttcaggtgtccttctaccgtggcgcggtgcctgtgcgggtgcccgaggaggctgaggctgcccggcagaggaagggcgcagacgccctgtggatggccactctgcccatcaagctgccggtgggactgagggacagcagaggggcggggcaggaccgaggcccaggggtgaccagggtgacatggtggagttgggggtggagcccagggcttaatgcactttttccttccaacagagacttcgagggtccgaggggccacggcggggggctggcctctccttggcacccttgaatctgggagatgccgagaccggctttctgacgcagagcaacctgctgagtgtggctgggcgtctgggtctggactggccagccgtggccctgcacctgggggtgtcctaccgggaggtgcagcgcatccggcacgagttccggtgaggctcccactgcccgctggctgccagccccagggctgagccctggctgcctggagggcccacctgattctgacagaagtttcttccaggggaggtgggggaagggcaaacaccaggctggaaaggaaaggtctggccgcacctggccccaggagccgggaactcccccacactccgaggcagagtgtggtggggggtcctgggcaggtggacaggacccctctgtcgcccatcctctgcctgcagggatgatctggatgagcagatccgtcacatgctcttctcctgggctgagcgccaggctgggcagccaggggctgtggggctcctggtgcaggccctggagcagagtgaccggcaggacgtggctgaagaggtgcgcgcagtcttggagctcggccgccgcaagtaccaggacagcatccgacgcatgggcttggcccccaaggaccccgctctgcctggctcctcggctccacagcccccagagcctgcccaggcctaggccccacagacttttaggctggcccagatattccccagtggatgggcagagcccccaccttcaagtctctccagtgtgtggggacgggtccctgtgagcaacaaaactgcactgtttctttcacctcagagcttgatttatttgttggatggagaagccgttggagggcggagggtggtggggtagaggcctggcccctgcggggagggaggcctgtgtgcacaggtgccccacatcctggtcctgtcctctcccactgtgcctggggcctcctgtgggtcctcatcttcctgggagggaggagctgtgctacaaagtaacccacatgggctactttttttttttttttaaatggagtttctgtcacccaggctggagtgcagtggcatgatctcagctcactgcaacctctgcctcccaggttcaagcgattctgcgtcaccctctcaagtagctgggactagggcacttgccaccacgctggctaatttttgtatttttagtagacggggtttcaccatgttggccaggctggtctcgaactcctgaccttaagtgatccgcctgcctcggcctccaaaagtgctgggattgcaggtgtgagccactgcgcccagccccaagtggggtgctttggatacaaagtcgctgttcggcgggtggggttgtgcctccacttctccattgcgctggcccagcagttccacggatcacctgtgtctgccctggaggccacgcctcccccagggcaccctcatccaccggcgctctgccacctgcccgcgccccgcgggtccttgtgcctgcaggggcctgaggcccggaaaccaagaaaggaccttggggacgcgcggcccggcctctgcgcgcagaactgccaccctgcccgggggaacccacggccagggggcgggtgggcgcgtggctgtggcctggctgggcgcagtagcctcgacggccaggagggggagccgaagcccggaggaggccgagggcggagcgcgcgcggcgccgagcggacgcgcctccccgcctaggtgctggccgagcgcggggcgggcaggcgagcgcggcggcggcggcgagcgtggtgagtgtctgcccggcggctcccttctgctgcgcccatccgaacgcggccgggctgcgggggcgagaggtgctgcggcggccgagggaggtgacagctgcccgaacaacgtggcctggcgggcgggagggggggtcctggaccagcggatgctccgatccgcggctgctctggcgtgaga

SEQ ID NO: 6384 - DNA, 2300 bp, Homo sapien
gtcacggccttcctggtaaaacggatgtaaatagaagggggactcatctccaggactggggaacagcccctatgacctcgcagctccacggctccattggccagatttccaggaccaggactgaagcctcactaccccggctttgctgctcatagcgaggtctccctgcccggtgctcctgcgagccatggcggtcccattccccaaccctctttccagtggtgacccaggcctccggggttcagggtgaccacaaggtctcccccactctgcagcccaggcccagatggcctggctctagagctccccactccatccagagtccctgtttccccaaagagaagggcccaccccggctcccgctcactcctcctcctgcctctgcagcttccccgggcgctgcctggacaggcctgcctgcgtgctgggacatgtctggcctccaaggaccgtcggtgggcgatggctgcaacggtggaggggccagagctggaggcagctgctgccgcaggagatgcttcagaggattcggacgcagggtccagggcgctgcctttcctgggcggcaaccggctgagcttggacctgtaccccgggggctgccagcagctgctgcacctgtgtgtccagcagcctctgcagctgctgcaggtggaattcttgcgtctgagcactcacgaggaccctcagctgctggaggccaccctggcccagctgcctcagagcctgtcctgcctccgctccctggtcctcaaaggtgagttccacctgttctgggccctgtctccatctctcgctctgccctgcctctgctgcatgttctcaaaggcaaaccccagtcccagccccagctccaggccgcccctcccggctccccaggtgtgaactgttctgctcttggtcctgtccagccccatcgccatcctcggtgatcaccacccccagtgtggggctggctgggccctggctcctggaccctgacgctgcccagtgggggtctctccagaccacagtgcagatgttgttcctggggaaggttgtgggtgatggttgtcagctgagatgagccggtggtctccacccctgcctccttccatttgcgggcacctctccagtgtttctgtctgtctgtccctgtctggctggggtgggggtggggtgggaggtctgtgcctctcgagcagctgtttctctggctggcagggtcgatctgggacctcggaccctggctctgagggccacatccgcctccccccttcccaggagggcaacgccgggacacactgggtgcctgtctccggggtgccctgaccaacctgcccgctggtctgagtggcctggcccatctggcccacctggacctgagcttcaacagcctggagacactgccggcctgtgtcctgcagatgcgaggtctgggtgcgctcttgctgtctcacaactgcctctctgagctgcctgaggctctgggggccctccccgccctcaccttcctcacagtgacacacaaccgcctgcagacgctgcccccagcactgggggccctatccaccctgcagcgcctcgatctctctcagaatctgctggacacgctacctcctgagattggaggcctgggcagcctcctggagctcaacctggcctccaaccggctgcagagcctcccagcctctctgggtgagtagcccctgcgccccgacacactggccccacgggagggtccctgaagcctgcctgtcttctgcaggggcctctgcacccacaggcttggtccacagctgcctcttggttgtccctccacctccctggcctttgagactccctcagtggctttgtcagagttctctgagcccagctgtggaggagagtctgaaacagctgctctgggaggcggcagcaggagtgtcccagcgccgtgggctgggctggtgccaagcctaagccagcaactgcccgcagcgggacttcggtccttgcggctccttgtcctgcacagcaacctcctggcctctgtgccagctgacttggcccgccttccactcctcacccggctcgacctgagggacaaccagctccgggacctgccccctgagctgctagacgccccctttgtgcgcctgcaggggaaccccctgggtgaggcctcgccagacgccccgagttcaccaggtaggcttggtgctagaaggggcagacctgggataggacatgagtctcctcactgtcctgagcacatgtctgtcccctgcacagtggcagccctcattccagaaatgcccagactgttcctgacctcagat

SEQ ID NO: 6385 - DNA, 2300 bp, Homo sapien
atggaaggggctggggtgaatggaagcagggaggcctggaagagacctgcctgtcccagagggagggatggtggtagctgggaaatggaaggaagaaggagccgccgatatgacctcaggaaagaagcaggcatagctggtggtgtctgttccctccctaaacacctgctctcctgggcgaggaagctggtgaataaagcacaggcccgctcgggggtatcatgttggtggggaaggaggagccgctgatatgacctcaggaaagaagcaggcatagctggtggtgtctgttccctccctaagtacctgttctcctgggcgaggaagctggtgaataaagcacaggcccgctcgggggtatcatgttggtggggaaggcggacagggcagatttcaggttcttggctttgaccctcaccagctacagggcctcgggcaatatctgattttttttttttttttttttcagacggagtcttgctctgtctcccaggctggagtgcagtggcaccatctcggctcactacaacctccgcctcccgggttcacgccattcttctgcctcagcctcctgagtagctgggactacaggcgcgcatcaccacgcccggctaatttttgtatttttagtagagacggggtttcaccatgttggccaggctggtctcaaactcctgacctcgtgatccacccgcctcggcctcccaaagtgctgggattacaggcgtcagccaccgcgcccgctcaatattttatctcttaacgcctccttctcccctgcgcgattgaaggagacagtgccaggaggctcactgcttctggcccagagtgatggctcgaaaggaagggtctttgcaggcccagagaggaggtcctggcaggcttcccggaggaggccgtttgggctggtttggaaaggacactgcaattgttccggcttgtagcaggggtgggtgcggggcagcggcaagagtacccccgtcaccccggcctgggaacgcacctggggccgggtctgcctcggagcggcccggggccccgagaacctcggaaagggcgggtttcgtggccttccgggcgggggaggctgtacggctccgaccccgcggactaacaggaagccgagcgctgctgcgcgggcggctcggcagatggacgggtcgcgtccgcgtctccggggctgcgacaggcggagggaaggcgggtcggggaggagccgggagacctcccccgtggaccccagcccggcggagggggcgcgtcccgagggggcggggcccaaggggcggggtctgcagtccccgcccacccagaaacgcgccggcgggatcccaggcgccgagcgcccgctgagcagccaccctttgcgcgccgcctgcagcgcaggtacgcgccggcctgggcgggcggagggggcggcggggacacgtttgcttttgggaggctgggggccgttcccatccccgacgcccgggggatcccgagcctgcctcggggctggggcccgccccccacgccgtctgagcggtgcgcggtgcaccaccctccccagtggaccgaactggaaaggccgggagaggtttcctccggggctcacgaattggggtcccggccccaggaccccgaagctgcccaatggctcacgccccaggccctcacccttacacggccttccctgactttcggggcgcagtcacccccgcggtaggggagggtcacggccttcctggtaaaacggatgtaaatagaagggggactcatctccaggactggggaacagcccctatgacctcgcagctccacggctccattggccagatttccaggaccaggactgaagcctcactaccccggctttgctgctcatagcgaggtctccctgcccggtgctcctgcgagccatggcggtcccattccccaaccctctttccagtggtgacccaggcctccggggttcagggtgaccacaaggtctcccccactctgcagcccaggcccagatggcctggctctagagctccccactccatccagagtccctgtttccccaaagagaagggcccaccccggctcccgctcactcctcctcctgcctctgcagcttccccgggcgctgcctggacaggcctgcctgcgtgctgggacatgtctggcctccaaggaccgtcggtgggcgatggctgcaacggtggaggggccagagctggaggcagctgctgccgcaggagatgcttcagaggattcggacgcagggtccagggcgctgcctttcctgggcggcaaccggctgagcttggacc

SEQ ID NO: 6386 - DNA, 2300 bp, Homo sapien
caccacgcccagctaattttttagtagagacagggtttcaccttgttagccaggatggtctcgatctcctgacctgatccacccgcctcggcctcccaaagtgctggaattacagatgcgagccacagcgcccagcctgtttttttttttttttttgagagggagtctcactctcacccaagctggagtgcagtgccgagatctcagctcaccgcaacctccgcctcccgcgttcaagccattctcgtgcctcagcctccccagtagctgggattacaggcgcctgccaccacacctgggtaatttttgtatttttaatagacacacggtttcaccatattggccagactgggcttgaactcctgacctcaagtgatgcgcccacctcagcctcacaaaatgttgggattactggcgtaagccacagcatcaggcctgtggttggtttttaaaaagatctcttggccgggtgcggtggctcaaacctgtaatcccagcactttgggaggccgaggcgggtggatcacgaggtcaggagttcgagaacatcctaggtaacacggtgaaaccccgtctctactaaaaatacaaaaaaattagccgggcgtggtggtgggcgcctgtagtcccagctactcaggaggctgaggcaggagaacggtgtgaaccctggaggtggagcttgcagtgagccgagatcacgccactgcactccagcctctgggacacagccagactccatctcaaagaaaaaaaaaaaaaagatccctccaggccctacatggaaggggctggggtgaatggaagcagggaggcctggaagagacctgcctgtcccagagggagggatggtggtagctgggaaatggaaggaagaaggagccgccgatatgacctcaggaaagaagcaggcatagctggtggtgtctgttccctccctaaacacctgctctcctgggcgaggaagctggtgaataaagcacaggcccgctcgggggtatcatgttggtggggaaggaggagccgctgatatgacctcaggaaagaagcaggcatagctggtggtgtctgttccctccctaagtacctgttctcctgggcgaggaagctggtgaataaagcacaggcccgctcgggggtatcatgttggtggggaaggcggacagggcagatttcaggttcttggctttgaccctcaccagctacagggcctcgggcaatatctgattttttttttttttttttttcagacggagtcttgctctgtctcccaggctggagtgcagtggcaccatctcggctcactacaacctccgcctcccgggttcacgccattcttctgcctcagcctcctgagtagctgggactacaggcgcgcatcaccacgcccggctaatttttgtatttttagtagagacggggtttcaccatgttggccaggctggtctcaaactcctgacctcgtgatccacccgcctcggcctcccaaagtgctgggattacaggcgtcagccaccgcgcccgctcaatattttatctcttaacgcctccttctcccctgcgcgattgaaggagacagtgccaggaggctcactgcttctggcccagagtgatggctcgaaaggaagggtctttgcaggcccagagaggaggtcctggcaggcttcccggaggaggccgtttgggctggtttggaaaggacactgcaattgttccggcttgtagcaggggtgggtgcggggcagcggcaagagtacccccgtcaccccggcctgggaacgcacctggggccgggtctgcctcggagcggcccggggccccgagaacctcggaaagggcgggtttcgtggccttccgggcgggggaggctgtacggctccgaccccgcggactaacaggaagccgagcgctgctgcgcgggcggctcggcagatggacgggtcgcgtccgcgtctccggggctgcgacaggcggagggaaggcgggtcggggaggagccgggagacctcccccgtggaccccagcccggcggagggggcgcgtcccgagggggcggggcccaaggggcggggtctgcagtccccgcccacccagaaacgcgccggcgggatcccaggcgccgagcgcccgctgagcagccaccctttgcgcgccgcctgcagcgcaggtacgcgccggcctgggcgggcggagggggcggcggggacacgtttgcttttgggaggctgggggccgttcccatccccgacgcccgggggatcccgagcctgcctcggggctggggcccgccccccacgccg

SEQ ID NO: 6387 - DNA, 2300 bp, Homo sapien
caatcctcaagcctggcccacataaactactctgtatttatattaaatttgtcttagcatctaccttttaggtaggtacttgaaatctgaaaatacactgaatgaaaaaagccagacacaaaaggcaaaatactgtattatttcagtcttacggggtgctacagttgtcaaaatcataggaagagaaagtagaatgtgtttatcaagggtgggggagcagggaatagggactttaataggtacagagtttgtttgggataataaaaaaaaagtgagatggggctgggcacagtggctcgtgcctgtaatcccagcactttgggaggcggaagtgggaagatcacttgaagtcaggagtttgagaccagcctggccaacatggtgaaaccccgtctgtactaaaaatacaaaaattagccgggcatggtagtgggtgcctgtaatcccagctactcaggagactgaggcaggagaatcgcttgaacccaggaggcagaggttgcagtgagccaagatctcaccagtgcactccaacctggggaacagtgggactcctcagaaaaaaagaaaaaaaaaagttggggccgggcgcggtagctcacgcctgtaatcccagcactttgggaggcccaggtgggaggatcgcttgagcccatgttggacaacgctgtctctaccaaaaaattttagccgggtgtggtggcacacgcctgtggtctccgctaggaggctgaggtgggaggatcacctgagcccaggaagttgaggctgcagcgagctgtgatcgagccactgcactccaggctgggcgacagaatggggcccagtctcaaaaattacaaaataagaaaagtcccattgttcccaagatggtttcccgcctttaccccagatgtgtgaccctgagcaaaaaaacctttctgtacccaactgcctcatctataaaatgggggtaatgataacgaggccacagaaggcgactgtgaagtcgagttccagtgcttgacgtatacacaccccagggtttgcactgctgttagagcccaacgggagctggcgctgcctgctaacacggtagatacctgcatctgaccctgttcctggtgctcgcccgggatattggcagggatggctccttctcatctctcagctcaagctttctcaggctgcccagaggaccaagtctccctctgtccctgtccttcggatcgcctccctattcacctcctgcgtcctcgcacaagaactcaagtccttaggaggcagggccaaccctgttccctcccaggacccgagaatgtagcggggtccctgaggtgctgatgtccacatggacaccgaggtcagttccgggccaaagcggccagcgcaggggctgaccactcagacctcactcctcgcaggggtgagcgggcgacgctgcctcacgtcattgtcctgccctccaaggcccgcgctcgtcctctgacaggatgccctgacaccgcagtgcgggggcggcctcccagatagggccgcagtcgctaagtccgaggcggctggctcacctcactgagcccggctggacgtgggaccaccggtcgccgcggccagggaaccaccaaggagtcaaggcgagcctaccgccagcagcttctgcccgggcccacgcgccgttccgggtaggcccgcggcgcaggccacttccggcagcggtgcaccatgggacttgcagttcgctggcaaaggttgagtcccgggcgtggcggccgcgctccatgttgggagctgtaggcgccgcgtggcatgctgggggtgctaggtaccgaaggcagatgccgtccctttggactcgcttcgtccaacgcccccacgagtttcggtggcccttcgccccacgctataagagcagtcacttccggaactgctgcccttcgcctttgccgcgaaaagtgcctgacgggggctgggaagggggagggggaaggagtcaacgactccctccccgtcgtcattggctgagcgcctcgtgacgtcactctgaggcgcctcatgcggcgccgcgcacgggtcccagagccttctgggtagcggtttaaccccgcctcttgcgtcggcgccttccttttcctccctgtcgccaccgaggtcgcacgcgtgagacttctccgccgcctccgccgcagacgccgccgcgtgagtgtggtgaccgggcccggggtgccggctggggacgcggagtccgtggggatgcggggtgggcggcggggtatttttgggacggaggcctacgggccgagccacgcgcggcctcgcccggc

SEQ ID NO: 6388 - DNA, 2300 bp, Homo sapien
aacctgaagcagacaatcacagggctgttaccaggaatgtacgattgtatccccggccctctccctcccagagtcacagcaggactgggttccccacatgggaataggccctgaagtttccagaactgcactgcccaaagggagccaccagcctcacttgggaagtgatataaaaataaatggacactagctttcttagacttaggactgacaaaaggacacagggcatctcactacttatgttgactactcataggtatcttcaacactggcaaaataaactggcaatgaaattgactttgacttcaggctggagtgcagtggtaggatctcactgcagccttgacctcccgggctcaagtgactatcccacctcagtctgggactacaggcatgagcaaccaagcctggctaattttttattgtattttagagacgaggcctggttctgttagactgcagtggcacaatcactactcagtgcagccttgacctctaaggctcaaatgattctcccgcatcagcctcatgagtagctgagactacagatgtgcaccactgcctccaaccatttttttttttttttttttttgtggagaccgggtcttgcaatgttttccagaccagtctcgaacttcaaggctccaataatccactcgccatggcctcccaaagccgggtgagccatgcgccaggactgcttttttttttttttaacgcaatcttacgcagctcactggtattaaacttccaaagcttgttaatcacgattttgcctcgtacccaccctgcttttttttttttttttccttttgagacagggtctccttctgccacccagactggagtacagtggcacgatccgtgcaacctccatctcccgggttcgagcgattttcctgcctcagcctcccaagtagggggactacaggcacccaccaccacgcccggctaatttttgtatttttagtagggatggggtttcgacatgtttaccaggctggtctcgaacccctgacctcaggtgatccgcctgcctcgtcctcccaaagtactgggactacaggcgtgagccaccgcgcccgacctccgcccggcttacttctctatccaagaaatcgccaactagactgaaacgagcctctccccgaaccctccagcatgtggccggatcaggcagaagaatcgcctgtatgggacactggggccccacggcggctgcggggcaagggcggccgctaccttgttgagccggtcgtcgtccgcctcgatacccacgctgtccaagatcttcttgatgtccttggcgctgggggaggagttgccccctagggcagccagcaggtaggaggcgacgtagcgcatcctgaggcgggcggagaggacgcgacggcggagttaccccggcggcctcctgccggcccatcccggggccgccgggcgaggccgcgcgtggctcggcccgtaggcctccgtcccaaaaataccccgccgcccaccccgcatccccacggactccgcgtccccagccggcaccccgggcccggtcaccacactcacgcggcggcgtctgcggcggaggcggcggagaagtctcacgcgtgcgacctcggtggcgacagggaggaaaaggaaggcgccgacgcaagaggcggggttaaaccgctacccagaaggctctgggacccgtgcgcggcgccgcatgaggcgcctcagagtgacgtcacgaggcgctcagccaatgacgacggggagggagtcgttgactccttccccctcccccttcccagcccccgtcaggcacttttcgcggcaaaggcgaagggcagcagttccggaagtgactgctcttatagcgtggggcgaagggccaccgaaactcgtgggggcgttggacgaagcgagtccaaagggacggcatctgccttcggtacctagcacccccagcatgccacgcggcgcctacagctcccaacatggagcgcggccgccacgcccgggactcaacctttgccagcgaactgcaagtcccatggtgcaccgctgccggaagtggcctgcgccgcgggcctacccggaacggcgcgtgggcccgggcagaagctgctggcggtaggctcgccttgactccttggtggttccctggccgcggcgaccggtggtcccacgtccagccgggctcagtgaggtgagccagccgcctcggacttagcgactgcggccctatctgggaggccgcccccgcactgcggtgtcagggcatcctgtcagaggacgagcgcgggccttggagggcagga

SEQ ID NO: 6389 - DNA, 2300 bp, Homo sapien
tttgtttattttactttttattttaaaaatatttttattattttattttatttatttattgtttttgagacggagtcttgctctgtcacccaggctggagcacagtggtgtgatatcggctcactgcaagctccgcctcccaggttcacaccattctcctgcctcagcctcgcaagtagctgggactacaggtgcctgccaccacgcacccagctaatttttttgtatttttagtagagatggggtttcaccgtattagccaggatggtctcaatctcctgatcttgtgatctgcccgccttggcctcccaaagtgctgggattacaggagtgagccactgtacccggcatttttattatttatttattattatttttgagacagagtttcactctgtcgcccaggctggagtgcagtgcggcgatctgggctcactgcaagctccgcctcccgagttcacaccattctcctgtctcagcctccggagtagctgggattacaggcgcccaccaccacacctggctattttttttttttgtatttttagtagagacagggtttcaccatggtagccaggatggtctcgatctcctgacctcgtgatccactcacctcaacctcccaaagtgctgggattacaggtgtgagccactgtgcctggcctatttttaaattttttgtagggatggaatcaagctatgttgcctaggctggtctcaaacttctggactcaagcaatccccccaccttggcctcccagagtgctgggattataggtgtgaaccactgtgcccagcctagaaggagtcgctttaagtcaggtatggtcacgtcctccctgcttgaccctctcccatggctgggcttcagctactctctcccctcactccccgacaatcttcgcctgtcctggtcggctgcctgggtctgctcatttacccttcaaaattcaactcagcatcacttcccacagggaagccctccagaaccccttaggtgccccacacgtggttacctacctcctctcactcatttttcttttttctttttttttttttttttgagaagaagtcatgctctgtcacctggccaggctggagtgcagtggcacaatctcagttcactgcaacctctgcctcccgggttcaagtgactctcttgcctcagcctcccgagtagctaggactacatgcgtgcactaccacacctggcaaatttttgtattttcagtagagacagggttttgccatgttggcctggctggtctcaaactcctgacctcaggtgatctgccctcctcggcctcccaaagtgctgggattacaggcatgggccactgtgcccggcctctttttaggacggagcctcgctctgccccccaggctggagtgcagtggtgcgatctcagctcactgcaacctccgcctcccaggttcaagtgattctcctgcctcagcctcccgagtagctgggattacaggcgtgtgccaccctgaccggctaatttttgtatttttggtagagacagcgtttcaccagccaggcggtctcaaactcccgactttctgtgatccgcccgtcttggcctccccaagtgctgggattacaggtgtgagcttccacacccggcctcctctcattttgagcttatgtaaatgcctaccggcccccagtagggctggggcagggttgactttccagtgctgtctgggatggctgggagcaaagaggctgaggactgggcagcatccccctagatggccccatcctgttctggccctgttctggcttccctaactcagcttgggttgggggcagccccaagccccatcccagaccctctgcagctctggcaacagctaggtccagagatgacctcagcctggggagccagtgttcctggggagacagaatctcattgcctcccaccccaacctgagaaagcctctcgtttgggggtggggtgaggttcagggagggatcctggatctactccaagccctgtttgctccactgaccaggagaaaaatgcggaaaaggggtgaaagggtgacatcacccaggattgctccacctctggggcaattatcgggagcagggcggccccagtcagacgcaggcagccccaaagcctgaacaggcagggccagacccaggtaagaagccaaggtccggaagggtcgcgggcgcggggcagggctgaggccccacgtcaggtcgcgtgggtctgcggagctggggtcccccacgaagggtttgcgggactcgcatccggccttggccttggatgtttatgggt

SEQ ID NO: 6390 - DNA, 2300 bp, Homo sapien
cgttcgcgggctgcggcttcctcggcgtctactacgtcggcgtggcctcctgcctccgcgagcacgcgcccttcctggtggccaacgccacgcacatctacggcgcctcggccggggcgctcacggccacggcgctggtcaccggggtctgcctgggtgagcggggccgggggcggcaggcggggggctggcgggaaggccgtgcggggccgggggatggtctccgtgagcggaggggccccgcggcgagtcggtgggtaccgtggggagggttccggtccgcgcctggggaacccggcgaggatccaatccgggtcgctggcctgggggcggggcctggtttgttttgctccgagggtgcccggggcccgcctgtctggcgcaaaggtttgggggcgggcaggtgcagcaaaagctgcttaattggacagaaaaagtaactcgtgggcgggaccgtgagaatccgaggagggacctaagtcaccccgtggccctggatattacaaccggtgccagcgatcggtcacagtgtcctgggcttccgcagttgcaggctgctatcagggggcctggcatgggggtagcctcttgagaggcgtctgggaaccgtgacctggtccttcccaagggcccggaggaggagccccgctgaggtcagggctgggcgcgaaggggctctcctgccctctccttgcacacggtgccctgtggcctggctccccgctgcggcccaccgcgtttgcacacttcatgggtgagggtgcttctgggctctggtgcctgggtcaggagtggatgggtctctgtgtgctgggctggcctcggctcgcaccatcggctgccatgagggagtgatgtttacagcacacgacttcaggagcctgtgaggacacccaagatgacaggggcactctgctcagcaggagcctgtccggggctcacccctgccctcttcctctgaactttgtcctgggagggagggggctggaccacagaagtgaacctctcaggtcccaataactagagctattattgggaacagccccctccagccccctccctctcatggaggccttcagacaagcgcctcagtcggccccctggcttcaagatacatcaaggtccctgctacccgagccaaggacacctctcccacagtgcttccccaccctgctcccaacaagactccttctcacgggtggtcttgcacagctggagcccatagtgcagcaggtgctggctgaagagcccctggctccacactgccccactcctgaccagggtgatgcactggaggagggcttggacctcagctcctccctcagtgctcccgaccacttccagggactatccccaagctggccagcactcctgcgccccaagaggagtgtttggggtgcttcctcttggctgcagtgggacacaggtgtgccttcctaggaactgggccctgactacttccagcccaacactcccgggcctgtgaactgtgacctgtgtgccgggatgggttttgtgggtctgccccatccccgcactgctggatctggccaagtgggtgaaggctaaggccggtcagagttgagtttctgccttgtcccctctcctgggctagatgccacaccaggcccagtgactcatagggcaggcagttgggaaataccaggcagagggcaggtcctggtctcagctggccagcctctgctgtctgccatcccaggggaggtggccaaagtcccaactgtgagccaggccccacattcactgggcctcctccagggtctgtatgccatggaaccctggacatggggctatgaaggaaggtgggtgttgctaagcccaggagcatgggcccctaaccttggccctgtgccccaggtgaggctggtgccaagttcattgaggtatctaaagaggcccggaagcggttcctgggccccctgcacccctccttcaacctggtaaagatcatccgcagtttcctgctgaaggtcctgcctgctgatagccatgagcatgccagtgggcgcctgggcatctccctgacccgcgtgtcagacggcgagaatgtcattatatcccacttcaactccaaggacgagctcatccaggtggggcctggtggagccatgctgggtggcggtggggggggcagtgggaacctcaaggcctctgctcattctctcccactctgtccctgccctgaaggccaatgtctgcagcggtttcatccccgtgtactgtgggctcatccctccctccctccagggggtggtgagtattcctagccctggacacct

SEQ ID NO: 6391 - DNA, 2300 bp, Homo sapien
tgggccggccccgggaggagccactctgcgccgctgtcgcctgtccccgcctctctgcgctgccccggcggcccgatccctggaggctcgagcgagcagtgaagcaacgatatgccccagagacccagggaccccccggagcagggacaaggctgcggggggcgggcgcagacaccagcgcctgggaggggcccctcctgtccggggggagcccgacttaaggcgccaaaaagtgtgtgtaggaaaaagccgggcaggaaacagaccaaatactttcagcggttatctctaggggtggggagcctttactttcttctctatactttcccggtttttaaacaataaacatgtaggccgggcgcctgtaatcccagcactttggggggctgagacaggggcagatcacctgaggtcaggagttcgagaccagcctgcccaacatggcgaaaccccgtctctactaaaaatacaaaaaattagccaggtgtggtggtgggcgcctgtaatcccagcactttgggaggctgagccaggagaatcacttgaactcgggaggcagagtttgcagtgagccgagattgtgccattgcactgggcaacaagaacgaaactccatctcaaaacaaaacaatgaacgtgtaatgctagaaaatgtttaacttagcagtattcagtgtatatgtatgggtgaacgagctggggactcaggcaggtcccacctcagtagcccctcctggctctccttctggggcccagccctgactggggctccccttgggggaggattggaaggaggagctgcttgaggcccgagtgaaaccctcctgtggggggagaaaattccaccccagaccgaggagccctccccagccccagccccagcctggcccctgcacccacctgaagggctggaatcactgtcccgcccggcaaccctggggggtacaaggcctctgcttttcaaggaaggggcctgggatccagcgtgcgacccagctgaaccacaaaaggctgggcttataggacaggaccttgagaccaaggggggtggcctctggcacaggcacatcagggacctgcctggccggctcgcccagtcccagatcccagaaccaaccgttattgttggcagggggctgccaccacagccaccccacgccttctgggaggagcaggtgggggctggctccagcaccctcaggccatggggcctttttggttgccaaggagggctggccttctcccctcatggcctccctgccatgaagaggatgccctcaggaaaccacttccccagcacagggctgagtccccttcagctaggacctcacctgcctccatatcccagccctgccctgtgtactggcaggaggctgggcaggggaacaagaaggtatgtgcaccaggccagagaggcttgtgagggtggggggacagagaactttgggccaaacgcccaagtggagcaggggcccagctttcccaggtcccctgtgcttggtttcaggaacctcagcccccacagctggccaagccccaaaacagtcacacaccccactgtgtcaccgtgtgaggggaggggcaggcgacaccttttgcaaacattttcgtttttatttaccaagaatcttggtcccaaatatttccattggccctcagaaggctgtggccaagggtcagccaggaggctgctgggcaaaattggggggggtgtggatgcatcctagacaggggggtcggcaggaatgcagtacgttcatatgtgcctgtaggggggtgttcccaggccagcctggcaggttccaaatgccaggcccaggagtgcgacgctgggagacctggcctgcagctgtggagaggctggtcagccaaggtagggccagaccctggccaccaggctctcactgcaagtaagcaggcggtcacatacacacaaagtgggcagaggctgggctgcagcatttattacatgtgctttggcgaaaataaataattcttcacacacatatttcagcaggccatgaaaaacggggagggaagggcagctgcaaagttctcaggagtaaaggggcgggggaggtgctcgggcagcacaggggagggaagattaaggcacaggtgcgcggggcctcagcggcccaggggaggggtgtggaaacctcccctctcagtgcatgcagctggtgagtggctggcgagggggcccacggcaaagacccctcttggcaactgtgagtcccctcatctcactgcgcagtggtaatggaggcgtctcaggcagggttcctcgagagggtcgg

SEQ ID NO: 6392 - DNA, 2300 bp, Homo sapien
atggaaatatttgggaccaagattcttggtaaataaaaacgaaaatgtttgcaaaaggtgtcgcctgcccctcccctcacacggtgacacagtggggtgtgtgactgttttggggcttggccagctgtgggggctgaggttcctgaaaccaagcacaggggacctgggaaagctgggcccctgctccacttgggcgtttggcccaaagttctctgtccccccaccctcacaagcctctctggcctggtgcacataccttcttgttcccctgcccagcctcctgccagtacacagggcagggctgggatatggaggcaggtgaggtcctagctgaaggggactcagccctgtgctggggaagtggtttcctgagggcatcctcttcatggcagggaggccatgaggggagaaggccagccctccttggcaaccaaaaaggccccatggcctgagggtgctggagccagcccccacctgctcctcccagaaggcgtggggtggctgtggtggcagccccctgccaacaataacggttggttctgggatctgggactgggcgagccggccaggcaggtccctgatgtgcctgtgccagaggccaccccccttggtctcaaggtcctgtcctataagcccagccttttgtggttcagctgggtcgcacgctggatcccaggccccttccttgaaaagcagaggccttgtaccccccagggttgccgggcgggacagtgattccagcccttcaggtgggtgcaggggccaggctggggctggggctggggagggctcctcggtctggggtggaattttctccccccacaggagggtttcactcgggcctcaagcagctcctccttccaatcctcccccaaggggagccccagtcagggctgggccccagaaggagagccaggaggggctactgaggtgggacctgcctgagtccccagctcgttcacccatacatatacactgaatactgctaagttaaacattttctagcattacacgttcattgttttgttttgagatggagtttcgttcttgttgcccagtgcaatggcacaatctcggctcactgcaaactctgcctcccgagttcaagtgattctcctggctcagcctcccaaagtgctgggattacaggcgcccaccaccacacctggctaattttttgtatttttagtagagacggggtttcgccatgttgggcaggctggtctcgaactcctgacctcaggtgatctgcccctgtctcagccccccaaagtgctgggattacaggcgcccggcctacatgtttattgtttaaaaaccgggaaagtatagagaagaaagtaaaggctccccacccctagagataaccgctgaaagtatttggtctgtttcctgcccggctttttcctacacacactttttggcgccttaagtcgggctccccccggacaggaggggcccctcccaggcgctggtgtctgcgcccgccccccgcagccttgtccctgctccggggggtccctgggtctctggggcatatcgttgcttcactgctcgctcgagcctccagggatcgggccgccggggcagcgcagagaggcggggacaggcgacagcggcgcagagtggctcctcccggggccggcccaagcgggggtctcggtgcctgcgaagcggcaggggtcgctcggggcccagtgccctctacgtcccgtccgggtcccagctggggcggggcgcgcccagtgtttccgggaggagcggcccgggcgcgcggcaggtgcggcggcgcaactcgcgggtaggcgaccgctggtcccgccgctgaggcccctccactgccgcccgcccggcaccccctccgggccgccgtggcccgcgccaaacctgagcgtctcggtcgggaactccggttaccccctcggggcgcaaggcggcaggggtaagggcggggttgtcccccagagtttcggggagcacaggaggctggccgccccaccccaccagcccatcctcccacctccctggggccctgctgccgcgcggcttccggctggggtggacctcaggtctagccggcaagccggagggcgggcgagacaacaacgtggcctggaggcaatggccctggcctctcgtgtccccttctctcacccgcccagacttgccctctttggaggtcgcccgggctaaggaacatggaaggacgctgggtggagagtgaggggagaggatcccagctccccggtgggggaaggcgggtgttggtggggagcagctttgggaaatccgggatcagg

SEQ ID NO: 6393 - DNA, 2300 bp, Homo sapien
caatcctcccccaaggggagccccagtcagggctgggccccagaaggagagccaggaggggctactgaggtgggacctgcctgagtccccagctcgttcacccatacatatacactgaatactgctaagttaaacattttctagcattacacgttcattgttttgttttgagatggagtttcgttcttgttgcccagtgcaatggcacaatctcggctcactgcaaactctgcctcccgagttcaagtgattctcctggctcagcctcccaaagtgctgggattacaggcgcccaccaccacacctggctaattttttgtatttttagtagagacggggtttcgccatgttgggcaggctggtctcgaactcctgacctcaggtgatctgcccctgtctcagccccccaaagtgctgggattacaggcgcccggcctacatgtttattgtttaaaaaccgggaaagtatagagaagaaagtaaaggctccccacccctagagataaccgctgaaagtatttggtctgtttcctgcccggctttttcctacacacactttttggcgccttaagtcgggctccccccggacaggaggggcccctcccaggcgctggtgtctgcgcccgccccccgcagccttgtccctgctccggggggtccctgggtctctggggcatatcgttgcttcactgctcgctcgagcctccagggatcgggccgccggggcagcgcagagaggcggggacaggcgacagcggcgcagagtggctcctcccggggccggcccaagcgggggtctcggtgcctgcgaagcggcaggggtcgctcggggcccagtgccctctacgtcccgtccgggtcccagctggggcggggcgcgcccagtgtttccgggaggagcggcccgggcgcgcggcaggtgcggcggcgcaactcgcgggtaggcgaccgctggtcccgccgctgaggcccctccactgccgcccgcccggcaccccctccgggccgccgtggcccgcgccaaacctgagcgtctcggtcgggaactccggttaccccctcggggcgcaaggcggcaggggtaagggcggggttgtcccccagagtttcggggagcacaggaggctggccgccccaccccaccagcccatcctcccacctccctggggccctgctgccgcgcggcttccggctggggtggacctcaggtctagccggcaagccggagggcgggcgagacaacaacgtggcctggaggcaatggccctggcctctcgtgtccccttctctcacccgcccagacttgccctctttggaggtcgcccgggctaaggaacatggaaggacgctgggtggagagtgaggggagaggatcccagctccccggtgggggaaggcgggtgttggtggggagcagctttgggaaatccgggatcaggacattgtgtgaaggacaggtggctctggttagggggcggggcgtccctgcaaggaggtgggaagggaggccccagggagttctgaaacggggaagggcctcagtgttgtggggcaagggtgttaggtctcgaatctggaagtgttcctgagtggggcgtcagaggcgaagggctctgcaggctgggaccttgcccctgcactctgtgggctcagttgtggggagggaggggccggtgggcaggagggagaagtctgccctgcctgccagctgtcatgaggctgggccacacaggcccaggccaggggctaaggacttggtcaggactggctgagccctcacttgggatcagatctccagttgcagagtgtgaggggctcctccctcactgaccccaagcctgctcctctcagctttcaggaccccaccttccttatcaccaggtcttctccactggcccctgagattgccatcacctccagctcctcctctcctgaagttggcagcccctcctgggttccagcctcctgagatgccagacccactggggcagtacccacaggccctgagcctacatcaaccaccccagtgacaccccaagcctgcagcattttccacccccagccccctggtcccaccttgccttccgcccaccttcccacctgctgcagggagggccctcggctgagccttcagacacacttgcaccccatccgctcccctcctgaatttcttctgaccctcccttggcttcacagcacctgaaggccaggctgaggccccctgctctcatggccagccctggaaagcctggggctgatgaggcccaggaggaggagggggaactcgaggggggctctgc

SEQ ID NO: 6394 - DNA, 2300 bp, Homo sapien
ggggtcgctcggggcccagtgccctctacgtcccgtccgggtcccagctggggcggggcgcgcccagtgtttccgggaggagcggcccgggcgcgcggcaggtgcggcggcgcaactcgcgggtaggcgaccgctggtcccgccgctgaggcccctccactgccgcccgcccggcaccccctccgggccgccgtggcccgcgccaaacctgagcgtctcggtcgggaactccggttaccccctcggggcgcaaggcggcaggggtaagggcggggttgtcccccagagtttcggggagcacaggaggctggccgccccaccccaccagcccatcctcccacctccctggggccctgctgccgcgcggcttccggctggggtggacctcaggtctagccggcaagccggagggcgggcgagacaacaacgtggcctggaggcaatggccctggcctctcgtgtccccttctctcacccgcccagacttgccctctttggaggtcgcccgggctaaggaacatggaaggacgctgggtggagagtgaggggagaggatcccagctccccggtgggggaaggcgggtgttggtggggagcagctttgggaaatccgggatcaggacattgtgtgaaggacaggtggctctggttagggggcggggcgtccctgcaaggaggtgggaagggaggccccagggagttctgaaacggggaagggcctcagtgttgtggggcaagggtgttaggtctcgaatctggaagtgttcctgagtggggcgtcagaggcgaagggctctgcaggctgggaccttgcccctgcactctgtgggctcagttgtggggagggaggggccggtgggcaggagggagaagtctgccctgcctgccagctgtcatgaggctgggccacacaggcccaggccaggggctaaggacttggtcaggactggctgagccctcacttgggatcagatctccagttgcagagtgtgaggggctcctccctcactgaccccaagcctgctcctctcagctttcaggaccccaccttccttatcaccaggtcttctccactggcccctgagattgccatcacctccagctcctcctctcctgaagttggcagcccctcctgggttccagcctcctgagatgccagacccactggggcagtacccacaggccctgagcctacatcaaccaccccagtgacaccccaagcctgcagcattttccacccccagccccctggtcccaccttgccttccgcccaccttcccacctgctgcagggagggccctcggctgagccttcagacacacttgcaccccatccgctcccctcctgaatttcttctgaccctcccttggcttcacagcacctgaaggccaggctgaggccccctgctctcatggccagccctggaaagcctggggctgatgaggcccaggaggaggagggggaactcgaggggggctctgcagggccgcgggctgcaatactggagcaggctgaggagctgtttctgctgtgtgacaaggaggctaagggcttcatcaccaagcacgacctgcaggtgagtcccccaccccaagagactgcttcggccctgggttgaccgcagcggctcatctctgctctccttccccgaccagggtctccagagcgacctgcccctcacgccagagcagctggaggctgtgtttgaaagtctggaccgggctcacactggcttcctcaccgccagggagttctgcctgggcctgggtgagcctgtggcctgcctatcccccactgcccagagctggaggcctgatcaggaggcctggcacttgtggcgccctgagggctgccggtgcctctcgtcctcctccctccagggcccgtgctttgtctgcacgcactcgcgcctgggggctcctagctgcggtggagtgtgtggagctgaccttcctggcccccagctcctctcctgtgctaagctccggtagggctgggagctggcctgtcacctcttgtttccaggccaataggaccagaataaggaaggaaaacaggaaactgggccctgagagagggcaggatactcgttgggagggtgaacggggacacagccacggtggcgacccacagccctggtaatcgctcgctccatgcccgcagggatgtttgtgggggtggcgtcagcccagggagcgaacccctgcaggactcccgaggagacctttgagtcgggcgggctcgacgtgcagggcacggcgggctctctggatgaggaggaggaagaggaggagcgattc

SEQ ID NO: 6395 - DNA, 2300 bp, Homo sapien
tccagttagagcagcagctgcacgcccaggctgcggagcacctggaggcacaggcccagaactcccagctgtggcgggcgcacgaggcgctgcgaacgcagctggagggggcgcaggagcagatccgcaggctggagagcgaagcacgaggccgccaggagcaaacccaacggtgccgtgggacggggctgggcgggccccggtgcgtgtcccgggggcggggccgacgggcgctcaggtctgggccactttcatccccatctcaagtcccaggcccgccccgtgggaaggaggatcttctagggggtccgggggctccccaaggagccttcctgcagccgggtcaccacctcccatccacagagacgtggtcgccgtctccaggaacatgcagaaagagaaagtcagcctgctacggcaactggagctgctcaggtacggtcaggctcaggcccgagagggaatgggctcagcggagcttgggggctcccagctccccaacattcttggctgccgctctactccattggaagtccttccttatgcctgcctttcacccctcacgctgcagcctcagccagacacctctcttcgctctgaggggagtcggagctcacctccccccaccttgagctccctcagaccctctcagtgtcggactcctccttccctagggagctgaatacacggctgcgggatgacagggacgcctgcgaggccaggcgggcgggcagcagctgcaggaaggctctgacaacagcccgcctgcctgggcccacctgctgctgctgctgttgctgggctcggccccccagacgcggctctggccaccttcccagtgcccggtgaccagccccgagtgactcacggaccatgagctagaagctgcccttgcaggaggcttgtcatgggtcgggggtgcccactcaggatgcaggctctccccagtgggccccaggctcgcctgactgaagacatgaaggacctagcctaggagtggtcagggtcccgggagtggccagggtcccgtgtgtgccctctgccagtcttcgctctgtccccgttcaatcaaccccatctcagttcagcagaaaaccccctcgtcaaataaaacccactgactgcactgcgtcctcctgggccttccgtgtgtctgggagccacagcctgtgtgtgccacatggatgaggtgggcacctgtgcacgcgtgctgtgtgggtgaatacagggagcgcgggcctgtggcgatggggctgaggtcctgcgtgtcctcttgtgtccctggtcatgccccaaactcacactacccatcaaggctggagcccctcggggccctcgccagtgtgtggatcagggctccccactgtctcgccagggaggccgggcaggttcccggcctcagtcggccaccccctcccatgctggtcctcccctgtggctgtgatgaatgagcttggtgggtgggcagccccctccttcctcactcccactcttggcgtcttggtgcagccctaggccggccctgcccttcgtccctcacctcctcgcaccgctcccagtggtcccttccagtctggagggcatgggccccccaggaccccatgggtatgtctcgctgggaccccaggcctgcccgggtctccaggctgtccacactgcacgtacagtagcccttctcccgcatttgcccacagcgctaggccctcccacgccccaggccggcatcggttctgccgacccctgcagcctctgggcggttcctgggtgaggagaaagagatgggggttgggcatggaggagggccgggtcgccacagcccagggcctctggctaggctggtcgccgtcttacctccgggcccgcctcccgcccagctcctccgtccttggacgggatgggcccttgctgggctattggcgcccccagggctgcagctcgcccggcctccgcagtgccaggtcgacccccagcgcctacacccacgcgggttcagacctgccgagcgcccgccgccgcgggaggggcttgaggccggggcggggccggggcggggcggggcggggcgtccccctcgtaggctccgggccgcgcattctcagcgctgggagccgccgcccccgcagctgctgccgccgccgccagggcccggactcggacgcgtggtaggtgagtgcgcggccacgacagctcggccgagcggggcgagcggggcgaggggggcgaggggcgcgaggggggcgaggggcgcgagggggccgaaggccctgcgcgccccagccccggaggcccagccgcaggcg

SEQ ID NO: 6396 - DNA, 2300 bp, Homo sapien
aagaccaccaaggtgctgatgtgcagccacctcatccagcactggccacggcagggtagctctccaggggcctgcccttagctggttcacccccaccccagccagagcaagccctgctctgccgctgtggggtctttcctcacctctgcttccttccatcagagagagactgcttctccacggagccacctctcccacttcccaagccaattagaagctttcatttccctgggacctagctccagtcaccctcaagacctccagaaaactcccacaccgatggctccaatgtgcagagacacagaagcttgggaaaggggaggccacatgggaggcccctgccgttcctatccggggaaagggtctggacaggccgccagccactcagtctagcagcccactcgctttcctcgtttgtccagcaagctgcaccaagtgccgatggcaggctggcgcacacaagcccagggcttcacatgtgacgaagactcagtgggcgagggtcagactccagcgggggcaccaagactcaggcaccgtggtgacagcagcaccaagggacaagcacaggagaaagacgcctcccctacaaagcctgatgagggtggtcagcaagtctaccctgcatttctttttctgtgtgtgtgtgtgcgtgagacggagtttcactctctcttccaggctggagtgcagtggcgtgatcttggctcactgcaacctccacctgcctcccagactcaagcgattttctcgtctcagcctcccaagtagctgggaccacaggtgtgcaccgccatgtccggcgaattaaaaagatagagccaggcgcggtggctcacgcctgtaacctcagcactttgggaggtcgaggcgggtggatcacctgaggtcaggagttccagaccagcctggccaacatggcgaaatcccatctctactgaaaatacaaaaattagccgggcgtggtggcacacgcctgtagtcccagctactcgggaggctgagacaggagaattgctggagcccaggaggcgggggttgcagtgagccgagatcgcgccactgcactccaacctgggcgacggagcgagactccgtctcaaaaaagaaaaataaaataaaataaatttctggagatcagggtctccccaggttgtccaggctggtctcgacctcctgggctcaagcaagcctctcgcctcggcctcccaaactgctgggattacagatgtcagccgccgcgcccgcccgtcctgcagcgaggtttgcaggacatggggtgggcctgggggcagagatgggaatagggcggaggccaagggctttactgcgggtgacaagacgcctgcgacccgccaggccacctagaatccccaggacaccactggtttgaagcccaactccgttctcttccccagacttcaggggataaggttctcccgaaagcagatcacagagcggggctggagaagccgggcctgaagctgctcatggggcgctggcctcaggcagcgctgcgcctcccgccccggcgcgcaccccagggcggactcagcccccagccccggcccgcgccccacggcggactcagcccctagccccggcccgcgcctcacccctcggtgtactcggcctgcagcagccccaggtaagcctcccacttgttgccgacgatcttgccacaagtgaagcagcgtacagggatgatcatggcggcggcgcgtcccagactgcccggcccggcccggccgcacgcgaagaacccccccaggccccgccccgggcgcgtccactgttgcgggagaatcggctccgctcgttctccgctgttccggccgtccctccaccggccccgccaccgctggccgcagtttccgccgcgataggggcttcccgtgcgtcccggggctcctgggcctgtgcgtcccggggctcccgggcccgcgcggccgcggcagcagcagaccgcacacccccgcccaccgtcttggtgcatcccggcgctacggcgtctgagcagggccgtaaagctgcggcggcggttcgcgtttctcgtgtccgcttgactgacagctgcgcggcgggagcgggcggcgcgagcgggaggcggcggcgcaggtactgcgcctgggggttgtgggggcgtgcggccagggtcccgtggccggaggtgtccgaccgggagcggctggagccggacgcgagcggggcgcgcgagttcgagcccagagccgacacgcagcaacaagtggggtccggcgcgggggctcggggagagggcgggcgggggccggggcggg

SEQ ID NO: 6397 - DNA, 2300 bp, Homo sapien
atgtcagccgccgcgcccgcccgtcctgcagcgaggtttgcaggacatggggtgggcctgggggcagagatgggaatagggcggaggccaagggctttactgcgggtgacaagacgcctgcgacccgccaggccacctagaatccccaggacaccactggtttgaagcccaactccgttctcttccccagacttcaggggataaggttctcccgaaagcagatcacagagcggggctggagaagccgggcctgaagctgctcatggggcgctggcctcaggcagcgctgcgcctcccgccccggcgcgcaccccagggcggactcagcccccagccccggcccgcgccccacggcggactcagcccctagccccggcccgcgcctcacccctcggtgtactcggcctgcagcagccccaggtaagcctcccacttgttgccgacgatcttgccacaagtgaagcagcgtacagggatgatcatggcggcggcgcgtcccagactgcccggcccggcccggccgcacgcgaagaacccccccaggccccgccccgggcgcgtccactgttgcgggagaatcggctccgctcgttctccgctgttccggccgtccctccaccggccccgccaccgctggccgcagtttccgccgcgataggggcttcccgtgcgtcccggggctcctgggcctgtgcgtcccggggctcccgggcccgcgcggccgcggcagcagcagaccgcacacccccgcccaccgtcttggtgcatcccggcgctacggcgtctgagcagggccgtaaagctgcggcggcggttcgcgtttctcgtgtccgcttgactgacagctgcgcggcgggagcgggcggcgcgagcgggaggcggcggcgcaggtactgcgcctgggggttgtgggggcgtgcggccagggtcccgtggccggaggtgtccgaccgggagcggctggagccggacgcgagcggggcgcgcgagttcgagcccagagccgacacgcagcaacaagtggggtccggcgcgggggctcggggagagggcgggcgggggccggggcgggtcttcctgccgcccctcctggccgcgccgagtagtgggttcctccgcctcggcctctgcccgcggggtgtccggggctctcggcgctgagttcgggggtcccattctggacgcggcccagcccctaggggcgccgccctggcctcagctgcgcaattacagcccccgccggcagctccccgccccgggctcctgtccgcgttctttccgctctttcccgggaatggggtcggggtgcgccctcccgggtcccggctctgctggctgctcgccgtcccgagctcccgacgctcagacgcgcctctgagcacggggagaggggacccgggagggaggtcggggagggagtcgtggaagaggtgctttttgagctgaacctggaagaccccggcacaggggatccctgggcagactcccggaggctgcactggcaggaccccctgaaggcctcagctctggcttgccctggagctcagggcctacggacgacgagggacgaggagcccgtgtctctcggatggagtgcgggggggctggcaccagcacccttcttgctgtgcccctggggtgggggtgaggaaatggggggtcggtgtgcagtgagaggcaaagaaggctccttggaggtgcgaggtgggctgtgggggtgggtgggccgcaaagcggcacccatggggggctctgggctggtttgccggcctggggcttctggctggggtgggacctgtgttgggttccaggcatcagctgccgctttctcagggcaatgctgcgtctgccttagttgcagaggaggaggacgaagggttttctgggtccggagtggtgctagccagatccactgcacgcttggggtttccgctcccaccctggccagggccctgggcagcttccccagtggcatttgccataccccacccagccacgtgcggagccacgagccgaggccacttcccttccctgaccccctccccccaggatgagtggacgcacatcctgctctgggcagaagggcaggacaggggccctgagtaacggtggcctggggtcagagccaggttcagctgcgaggctgctggtggctgtggaggtgaggggggcaggggggtcccggatgttagcagggtgggccctggggagtgggtgggggcctggaggcttcttggaggagggtccagggcctgtcccgcccctgttcctgcctgcaggagttgtttactcagagcaag

SEQ ID NO: 6398 - DNA, 2300 bp, Homo sapien
gtgccctgccccgccaccaggctccctcccacccccgcttgcctgaggagggccaggcccaggctccccagggtcctcaggtagagcccagtcgggactgaggacaggcctgggcccccaggggcctccgcacatatgtggtgggggctcgggggagatgcacagagcctgaggctggggcagtctccagatctcaggggctctgctgggaaatggagggataggaagcgcacacactcggaattccaagaatgtcagcttggcccaagccaggatttggagagcagctcactccccaccaccccttgctctgagtaaacaactcctgcaggcaggaacaggggcgggacaggccctggaccctcctccaagaagcctccaggcccccacccactccccagggcccaccctgctaacatccgggacccccctgcccccctcacctccacagccaccagcagcctcgcagctgaacctggctctgaccccaggccaccgttactcagggcccctgtcctgcccttctgcccagagcaggatgtgcgtccactcatcctggggggagggggtcagggaagggaagtggcctcggctcgtggctccgcacgtggctgggtggggtatggcaaatgccactggggaagctgcccagggccctggccagggtgggagcggaaaccccaagcgtgcagtggatctggctagcaccactccggacccagaaaacccttcgtcctcctcctctgcaactaaggcagacgcagcattgccctgagaaagcggcagctgatgcctggaacccaacacaggtcccaccccagccagaagccccaggccggcaaaccagcccagagccccccatgggtgccgctttgcggcccacccacccccacagcccacctcgcacctccaaggagccttctttgcctctcactgcacaccgaccccccatttcctcacccccaccccaggggcacagcaagaagggtgctggtgccagcccccccgcactccatccgagagacacgggctcctcgtccctcgtcgtccgtaggccctgagctccagggcaagccagagctgaggccttcagggggtcctgccagtgcagcctccgggagtctgcccagggatcccctgtgccggggtcttccaggttcagctcaaaaagcacctcttccacgactccctccccgacctccctcccgggtcccctctccccgtgctcagaggcgcgtctgagcgtcgggagctcgggacggcgagcagccagcagagccgggacccgggagggcgcaccccgaccccattcccgggaaagagcggaaagaacgcggacaggagcccggggcggggagctgccggcgggggctgtaattgcgcagctgaggccagggcggcgcccctaggggctgggccgcgtccagaatgggacccccgaactcagcgccgagagccccggacaccccgcgggcagaggccgaggcggaggaacccactactcggcgcggccaggaggggcggcaggaagacccgccccggcccccgcccgccctctccccgagcccccgcgccggaccccacttgttgctgcgtgtcggctctgggctcgaactcgcgcgccccgctcgcgtccggctccagccgctcccggtcggacacctccggccacgggaccctggccgcacgcccccacaacccccaggcgcagtacctgcgccgccgcctcccgctcgcgccgcccgctcccgccgcgcagctgtcagtcaagcggacacgagaaacgcgaaccgccgccgcagctttacggccctgctcagacgccgtagcgccgggatgcaccaagacggtgggcgggggtgtgcggtctgctgctgccgcggccgcgcgggcccgggagccccgggacgcacaggcccaggagccccgggacgcacgggaagcccctatcgcggcggaaactgcggccagcggtggcggggccggtggagggacggccggaacagcggagaacgagcggagccgattctcccgcaacagtggacgcgcccggggcggggcctgggggggttcttcgcgtgcggccgggccgggccgggcagtctgggacgcgccgccgccatgatcatccctgtacgctgcttcacttgtggcaagatcgtcggcaacaagtgggaggcttacctggggctgctgcaggccgagtacaccgaggggtgaggcgcgggccggggctaggggctgagtccgccgtggggcgcgggccggggctgggggctgagtccgccctggggtgcgcg

SEQ ID NO: 6399 - DNA, 2300 bp, Homo sapien
ccgctgaggctgggcatgaccttgactgggagagggtgttgaaggtgtctgtccccagcctcgcccccacacctgtgctctctggccctgtccatgcctgggacagatgtgtgctcacccccagggtgctgtgggatggggtgggtgcacacggcgccacgagcacacgtgcccgacacctcagcggtgcacacagccaaggccactgcccaccgtacccacgccgtccgtgtcctctctacggtcctgggagactggcgttgtgagcagtggggcctgtagatggggccgggtcctctctacggtcctgggagaccggcgctgtgagcggtggggcctgtagatggggccgagactgaactgaccctagcctcaccactcatatgtcggggctggtgatatttgggaatgtcactgcctgccatgcagctgcccaggcctgatgtgcccccccagactgttctataggggtctaggttgcaggggccagggccagggctgtggtgggatggcacctgaggtgcggctgctcctggagcctggggggtgtgggaaggtgccccccacccagggtcctaagtctgttgccttcacccccgactcccagcagataaatacccaacagtgcaggaaaggattacagggaaggcctggagtgtggggttagcctcggtggtcccaggaggaaagactgggggacctctggactatctgtccctcccctggggctgctgggggtatcagagtggtgtctccagcctccagggctcaggtttgggtgggaggggcctggtcccacccagactctgtatgtagcccccagtccctgctcctctgtgtgcatgagggagtgccagcttgcttgggaccccccagggtgagggcttgggacgggcactggggccccgcaggggctgaggcagccaggaagcccacagcataggctgtttgtgttggcgggcctccctacctcctcaaagctgcctcagagcccgtgggcctggggggccagggtgtgtgggcttggctctgctgtctgtcctgagctgcccctgctgagctgtgtggagaccccgaggtctgggctgggccaggactgagctgctgccctgctgctggggctcagagaggctgctccacgggcatggcacccaggctgctgcagacaggctgctttatcatgtgggcaggcccctctttgggttggacctccgtctggccttgtgggtgtctgagatctccttgcagctcagtccccagggcttttccaacctgcagagctctggatgtctcttttggggctctcgctcagccagggttggggtggaggctctatggttccctcctgcccttgggctactggaaggacagttacctcactccagagagctagttctgaggggcgaggtgttgcggggttgagccagcagggcagggagtagtgggcactgcgtttggctgcccaggtgggtttggggcctctccctggccagaaatccctgagtgccaggaggaggacagactccccagcctggcacccatggtggaggagggccttgcgggtcattgctggcagctccatagggagggcgtgaggccccttcctgagcctgggtgtctgctcagagcccaaggcagggtggggtaggggtgcttgtgcctggtaggaagcagacagcaggctggtccaggggtccaggaccccagggaggaggcactgctgcgtgtctgtgtgggtgcaagcatgtgtcttggcctgtgtctctgcatgtccgtgctgtgagtacgtctttgaacatgtgttctctgcacaccgtgtctctgtgagtgtgagtctgtgtccctgcctggctgtctcagagccctgaaggagcagaatttggtgactcagtcattgattcagagctttcctggttggggctactcctcagtggtcttcttctccgagtctggtggtgtatcccctgcccaccccgactgcccctctgccctgtagggacctggccccaggtgggggttccctgcccttctctgggagcatctctggctgtacagctgagggtggaagccagggctccactctgcccatctttccttttgcagagcttggggcttccttggtcgcacccaccacctgcctgcccactggtcagccttcagggaccctgagcaccgcctggtctctttcctgtggccagcccaggtatgtcagggcccggctgggctggatggttgtggtgggcagcagtgggcttgcctctgggtctcactttgccagcccaggggccttgccagcggac

SEQ ID NO: 6400 - DNA, 2300 bp, Homo sapien
atcagttcccaccagggctggggcagttgtgggaggggcccagggctggaggtgtagggttccttcctgcccagcccccatggaacggggtttcccacacctggcatggcaccagtcactctgcacatgtcctccctgtgtccttcgacacatccccatggggcgaggggagcttggaacagctcattttcctgatgacaggagaggtctgcgtccttggaaggcagaggcagatggagcaggcagtttgggttttttttttttttttttttgagacggagtctcactctgtcgcccaggctggagtgcagtggcatgatgtctgctcactgcaagctccgcctcctgggttcacgccattctcctgcctcagcctcctgagtagctgcgactacaggtgcctgccaccacgcccagctaattttttgtattttttagtagagacggggtttccccgtgttagccaggatggtctccatctcctgacctcgtgatctgcccgcctcggccttccaaagtgctgggattacaggtgtgagccaccacgcccggccccagtttgggttttaaatgacagttttctctgttgtgctagcacctcccctcagttcagggaccttcacccccagcctgggcatttcgtctggaatgagacttgtggggttgcttggcgcttgaggccaggatgtactctgagctgctgatggccatctcctctcctggggcctcgtttccctctgacctcctgccctcatcacctggtgatctggacccagggccatatcccttctctgcccagttcttggggcagtgatggtgtcaggccgtttgtgggtccccctggtgccctgtctgcccctccacaagacctgggaactgcgggaggatatggggacagcccaggggcaggctggggttcctgtgtgctcgggaatgcccctcagttccgcatggccttgtctgtacatggtgtgtgtgaccttgtgcccgacggtctggagggaccattgagtgggccattgcctgtccaggcctctcctgtgctccagaatgttacgagggacacctctccaaaggggtgggtgggggcgccgcgttcacagtcagcaccctggacagcccatcccccagctgctggtgcatcccatagcagggccaggtcccccgggaagtgggggcatctttgtagagctggcagacccctgcccaccctggggctgtgccccaagcccagtgctcccagtgaggacagattctcttaattagggatgtcccctggcacttctgccacggagctggcctctggtcctgcacactccagacacatccaccctggctcacacacaccctggctcacatgcaccccggatcccacccccgctgacactcaccccggttcccatgcaccccaggctcacatgcactcccggctcacacgcacccctgctcacacgcacttcggctcacacgcactccggcccacacgcaccccgctcacacaccctgctcacccagttcccacgcaccccaggctcccacggacctccgctcacatgcaccccggttcccacacaccccaggctcccatgcacctggctcacattcacgcccgctcacacgcaccccggctcacatgcacccccgcttgcatgcacctcgcctcccacccccgctcacacgcacccccggctcgcatcctgggctcccatgcacccccggctcccatgcacccctgggtcacacgcatccccgctcacacgcaccccagctctcacgcacccccgggctcacacccccaacagcttgcacccccggcacacatgcaccccggctcacacgcacccctgggtcacacgcatccccgctcacatgcaccccagctctcacgcacccccgggctcacaccaacagcttgcacccccggcacacatgcaccccggctcacacgcacccccgggctcacacgtgccctggctcacacgcacccctgggctcacatgcaccccggctcacacgcaccccaggtcacacgcatcccctcacatgcacccaggctcacacacccacccccagcccacactcatccccgctcacacacacccccactcacacacaccctggcccacacgcaccttggctcacgtgcaccccggctcacacgcaccccccctttcacacgcaccccgggctcacacgcaccccgggctcacacgcaccccccctttcacacgcaccccgggctcacatgcaccccggctcacacgcaccccctctcacacgcaccccggctcacacgcacc

SEQ ID NO: 6401 - DNA, 2300 bp, Homo sapien
gctggagtgcagtggcaccatctgggctcactgcaacctcctccgcctcccaggttcaagtgattctcctgcctcagcctcccaagtagctgggattacaggcatgcccccaccacacccggttaattttttgtatttttagtagagatggtttagccacaatagtcttttttgttttttttttgataccgagtctcgcactgtcacccaggctggagtgcagtggcgcgatctcggctcactgcaacctccgcctcccgggttcacgccattctcctgcctcagcctcccgagtagctgggactacaggcgcccgccaccacgcccagctaattttttgtacttttagtagagacagggtttcaccgtgttagccaggatggtcttgatctcccaacctcgtgatccacccacctcgacctcccaaagtgctgggattccaggcgtgagccaccacgcccagccgccaggatggtcttgatctcaatctcctgacctcatgatcagcccgtctcggcctcccaaagtgctgagattacaggcatgagccaccgcgcccggccaagttatgatttcttacagccacatgggcactggtgggaacaaagcaggcgggtcccacaggagcacctgccacccggagggccacctcctgcagtgtctgtaaccgccagagctcttactgtgtttcctaagtgcttgttcttataaaaatcaattaaaacaggaagaggcagggggagacgagggggtgctgcgcccagagagagggtgctaggctgctggcccagcaaggcctcaagggaagcaggggtccgccaggaccccaccttcagacagaggcctcgggcttgggccgtttcaggatgagacgggagatatgttccaggcctgggcacgggacaagcagtcccccgaaaatgctgaccagctcccggtctgcagcgtgggtgcccaggtgggtggtgggtagacgtcctggggtgccgacggttgactggttctggggaagggccgcgcagccctgggggatccctgccccaccctggactggacaggacttgggaatgggctggcaaagccacccctcaacctgatgaaaccccttggagcacccagaccacatgcctgaggacaggctcagaccccaggctctgggggttcccgggggactaccagaagccccaagtcaccccataaaagcctcccaagccccagtggccagactcacaccccactttccagacagaaaccaaggctgggatagctgctggccaccagcagccgccccacccccacctgcaacaccagcccagctcaagacaggcctggggcctccaccctggcagggcccacggagggcccatgagccccaacactcttgcctcagggggcctgggggtgggagatgccccctcctcgtgtgcacgctcacctgcccctccctgagcagtgcatcagccagcgccaggctggaggttggaggccgccacccttttactggctggctggcaggcaggaggctgtgctggggagatgggacacagctccctgcccaagggccagcatggctgctggtgccccaagattcaggccaggcctgtcactggtgtcttcggtccctctgggctccacagggtaaaatcccctcagagcagattccccccactgctggggccccacaagtcccacacacgctcaggccatcctggggagaaggcaggctctgtccttccccggccttccagaggtagcatctccgcttaaagttcaaaacagaacgctgtccggaggctgccagcgcaggacctatcttgggaagctctgctgagccattggctcctggtgcctgctgagctctgacacccacgcccagagcccctccccagcaggccaggcacagcgcacaggggagctggacagactgggtgcaggaagaggggtcacccctgtgctctgggccccaggattgggagtaccgaggcaggggctgacttgctggctctgaccacacagcccctcgtggctgcagggagccaataggagacctgggcacagtgcccagcctgggtgtggcttctgagcaaagccagccccagaagcagcttagggtgataggggaggcttcccaggagaccaggaagaggcttgggggtggcagccagcacagcccggtggagggcggcccggagacgcaccaggggacggatgcatgaacctgagacgtgtgagtcaagttgtgtgtgagcccgggatgcatgggagctggggtgcatgtgagcaggggtacatgggagctg

SEQ ID NO: 6402 - DNA, 2300 bp, Homo sapien
agcgtgtgtgggacttgtggggccccagcagtggggggaatctgctctgaggggattttaccctgtggagcccagagggaccgaagacaccagtgacaggcctggcctgaatcttggggcaccagcagccatgctggcccttgggcagggagctgtgtcccatctccccagcacagcctcctgcctgccagccagccagtaaaagggtggcggcctccaacctccagcctggcgctggctgatgcactgctcagggaggggcaggtgagcgtgcacacgaggagggggcatctcccacccccaggccccctgaggcaagagtgttggggctcatgggccctccgtgggccctgccagggtggaggccccaggcctgtcttgagctgggctggtgttgcaggtgggggtggggcggctgctggtggccagcagctatcccagccttggtttctgtctggaaagtggggtgtgagtctggccactggggcttgggaggcttttatggggtgacttggggcttctggtagtcccccgggaacccccagagcctggggtctgagcctgtcctcaggcatgtggtctgggtgctccaaggggtttcatcaggttgaggggtggctttgccagcccattcccaagtcctgtccagtccagggtggggcagggatcccccagggctgcgcggcccttccccagaaccagtcaaccgtcggcaccccaggacgtctacccaccacccacctgggcacccacgctgcagaccgggagctggtcagcattttcgggggactgcttgtcccgtgcccaggcctggaacatatctcccgtctcatcctgaaacggcccaagcccgaggcctctgtctgaaggtggggtcctggcggacccctgcttcccttgaggccttgctgggccagcagcctagcaccctctctctgggcgcagcaccccctcgtctccccctgcctcttcctgttttaattgatttttataagaacaagcacttaggaaacacagtaagagctctggcggttacagacactgcaggaggtggccctccgggtggcaggtgctcctgtgggacccgcctgctttgttcccaccagtgcccatgtggctgtaagaaatcataacttggccgggcgcggtggctcatgcctgtaatctcagcactttgggaggccgagacgggctgatcatgaggtcaggagattgagatcaagaccatcctggcggctgggcgtggtggctcacgcctggaatcccagcactttgggaggtcgaggtgggtggatcacgaggttgggagatcaagaccatcctggctaacacggtgaaaccctgtctctactaaaagtacaaaaaattagctgggcgtggtggcgggcgcctgtagtcccagctactcgggaggctgaggcaggagaatggcgtgaacccgggaggcggaggttgcagtgagccgagatcgcgccactgcactccagcctgggtgacagtgcgagactcggtatcaaaaaaaaaacaaaaaagactattgtggctaaaccatctctactaaaaatacaaaaaattaaccgggtgtggtgggggcatgcctgtaatcccagctacttgggaggctgaggcaggagaatcacttgaacctgggaggcggaggaggttgcagtgagcccagatggtgccactgcactccagcctgagcaacagggtgagactccatctccaaaaaaagaaaaaaagaaagaaatcataaccaggagcagagtgtgagggaatcagcgtttctcctgccacgagtgacaggggacagctggggacatcacagagatcttgtcgggagctgggaatcggaatcctgggaccacctgccaggaagccccatcccggagtgagggcagggctgggtctccctgacagcacagtctggaaaggctggagtggcctgtcaggtggggagtgagccttctgccctgcgcagaccagacggtgaagcggggttaggggtgtgcagactgcgtcctggggcctaagatcccgtccctttggctccaggccaggggttgggcggatccctcctagagggagtggttcagaggcacaagggagcctccccgactgtggccatggagtgtgggtttggggatggggtgccagcccagggtgtcgggaaagactggcctgccctggacacccccccgggctgccgtgggatctagcaggactctgggtggttctggctcaggctggcaggcggcatggctttgggcttgtgggccgggctctgccctggggtccag

SEQ ID NO: 6403 - DNA, 2300 bp, Homo sapien
ttttaattgatttttataagaacaagcacttaggaaacacagtaagagctctggcggttacagacactgcaggaggtggccctccgggtggcaggtgctcctgtgggacccgcctgctttgttcccaccagtgcccatgtggctgtaagaaatcataacttggccgggcgcggtggctcatgcctgtaatctcagcactttgggaggccgagacgggctgatcatgaggtcaggagattgagatcaagaccatcctggcggctgggcgtggtggctcacgcctggaatcccagcactttgggaggtcgaggtgggtggatcacgaggttgggagatcaagaccatcctggctaacacggtgaaaccctgtctctactaaaagtacaaaaaattagctgggcgtggtggcgggcgcctgtagtcccagctactcgggaggctgaggcaggagaatggcgtgaacccgggaggcggaggttgcagtgagccgagatcgcgccactgcactccagcctgggtgacagtgcgagactcggtatcaaaaaaaaaacaaaaaagactattgtggctaaaccatctctactaaaaatacaaaaaattaaccgggtgtggtgggggcatgcctgtaatcccagctacttgggaggctgaggcaggagaatcacttgaacctgggaggcggaggaggttgcagtgagcccagatggtgccactgcactccagcctgagcaacagggtgagactccatctccaaaaaaagaaaaaaagaaagaaatcataaccaggagcagagtgtgagggaatcagcgtttctcctgccacgagtgacaggggacagctggggacatcacagagatcttgtcgggagctgggaatcggaatcctgggaccacctgccaggaagccccatcccggagtgagggcagggctgggtctccctgacagcacagtctggaaaggctggagtggcctgtcaggtggggagtgagccttctgccctgcgcagaccagacggtgaagcggggttaggggtgtgcagactgcgtcctggggcctaagatcccgtccctttggctccaggccaggggttgggcggatccctcctagagggagtggttcagaggcacaagggagcctccccgactgtggccatggagtgtgggtttggggatggggtgccagcccagggtgtcgggaaagactggcctgccctggacacccccccgggctgccgtgggatctagcaggactctgggtggttctggctcaggctggcaggcggcatggctttgggcttgtgggccgggctctgccctggggtccagagcttgcattggggcctcaccctgtctgtgtctctcctgttgctgtgccccagctgggaggctgtggcgtgctgggtgtcggcatctggctggccgccacacaggggagcttcgccacgctgtcctcttccttcccgtccctgtcggctgccaacttgctcatcatcaccggcgcctttgtcatggccatcggcttcgtgggctgcctgggtgccatcaaggagaacaagtgcctcctgctcactgtgagtgccggggcccaagcgatgctccgggtgggaccacgcagggtggggctccggtggcccccaggccttggctgccgcagtgaccccccagacgtgggcaccacctctggggccggacctccaggctggcagtgtggcccggggccctggccactgttgggtcttccaggccacactggggctggggggtgatttgcagagcggtgtgggggtcactcaagagaacgtgctgtaccttgtcaggggcctcccctgacgggacactggccctggtgagtgcaggcacagccccgcacacacgtacacacgcatgcgcagcctttcacgggcttgcggtctccgtgactcattcctgaccaccccacccccactgtggccccttccccagcttcttgttgggggcctggtctctcagctccctgggaccggctgctgggacgatcccagcccccacctcgcctcggggatggacttacaggcagggatatgtttatcctccttagaaatgttaatcacagataattaaaaaggaaaagggctcctagatggaaacacaggcttgctactgattaacatgcctggccgaggccgtgggccctgcggagggtgtgcagcctgctgaggtcctaaatcacgaggcttccgatcactcctttgtctgggaagccctggatgggttggggcctcccttaggtcgcctcagccagtccactcccctccgtacccc

SEQ ID NO: 6404 - DNA, 2300 bp, Homo sapien
ggcctgcgagctgccacagtgcaggtgcagccgttcccaccgccctgctgctgcttgacacgggcataggagatacaagtggtgtgtgcggcggttcatgcctgtaatcccagtactttggaaagccgtggcgggaggaacgctgggcaacatggtgaaaccccgtctctaccccctaaaaatagaaaaattagcaagacatggtggcatgtgcctgtactcctggctactcaggaggctgagatgggaggatcgcttgatgaggttgaggctgcagtgagctgtgaccgactgcactccaaaaaccttgtctaaaaaaacacaagctgccactggctttggggcactgaccttgtctccccagaggtgctgacgctaacattcaagttgttctcgggggtcctgtggcttctgttggagtgagggtgggggacacgcaggtctgggagggtggtgtgggcctggagctaggcattgccagatcagcattgggtggaggcaggggtggggatgccacacaggatgggatgtctagagcgggctgtgtctcccggggggatgggcagagggtggggcaggaattagctggaaatgagattgtggggtgcagtttggggatcagatgccccaacctgaactgaccgtcatccctgtggccagggtccccacacaaccctcacccctggctgtgagaatcctgaggcaccttgatgcattttttttcatgccctgtgacaggtgctttgtgctgccagctcacttaaaggggcagagttctaggaacaaaataggggaaaagcacagccccgcctcgacagcaggccccagggtagggggcgatgtggagggaggcccgcctcaggaggagcccccggggtgggggggtgaagcagagggaggccacccctagcaaaggctggcagttcagggacggccccccaggggccttggcactttattttttattactttttttttttttttttttgagatggactcttcctgtgtcatccaggctagagtgcagtggtgcgatctcggctcgttgcaacctccatctcctggaatcaagcgattctcctgcctcagcctcccaagtagctggaattacaggcgcccgccaccacgcccggctaattttttatttttagtagagacagggtttcaccatgttggccaggctggtctcaaactcctgacctcaggttatccacccactttggcctcccaaagccgaagggattacaggtgtgagtcactgcacccggcctcatcacttcttagagctaatgtcatgatttccttaaaaccagaggtctggagactgctctgcaggcagctcccccaagcctgtgcaccaggtgaccccacagccccagggctctgcctaagcaccgttcatgccagaggctgccctgccccaggcctgggtgccagaagggaagatagggtagggaaggcagacgagcaatagacgcaaggttgctgctcacactttattaagatgcaccaggagccccacgggcccactatggaatgtaggtgaggggtccacggccccgcctggagcaccaggaccagtggggccacctccaggatgccaagacccggctcctccagcgccaacctgttttccaggaggctgggggccacaggctggctcccgtgtgaacactgctttggagaatacgtaaatataaaaagtgctggaggcccctcccacccctgccctgggttccgcagccagcacgtggccacccctcccagggggggtccggaggccctgaagccacctgagctagggccttccagaaacagggttccgggggctccaggcacctgtccctccctccctcctcccagcatggggcagagcaccgaggctggtggtgggaaaggcagctgtgggtgcggccatctccccgtgggcgtccttttggcagagaagcgggcggtgggcggcctacgcgcagtaggtgtctgccttgaccacttggcagtacatggtcatggcgaaggtcaggcccaggatctgtaggtaggggaggaggactgggcatggcagctccacaggctcaggcctcaagcccagagcagtccctgtcctcagcaggtgccctggccctgaccccgaccccagggtgggcgacacagtggcagagcccttcagcttcctggtggcttgcacgccccacccaacccctgtggctcgagccacagcaccctcccctgagccttgcaggcatgaggacacccagaacttcctgagggctgtggagtttggaaaccaggggccactg

SEQ ID NO: 6405 - DNA, 2300 bp, Homo sapien
aagcttctttctgggtatctaggaggaaccagtggctcagtcaggaggcccaggagtactggagaatagactgtggccgccagggctggtccaggtcagggctctgtcccagtggccaagggtccatccagtgccatgaggacccaggccctattaggagaaagtggccccatcagcagaggggttgcccatgtgctgcatttctctgccggttgtttgaatgtgctctgctttccctgcagccctctggaccccgaggttggaccctactgtgacacacctaccatgcggacactcttcaacctcctctggcttgccctggcctgcagccctgttcacactaccctgtcaaagtcagatgccaaaaaagccgcctcaaagacgctgctggagaaggtaagggtggcctggggacttgaggtgactgtactggctgagggctgatccatcatcctcttctttctgtccactggggcctgtgagccaggaggctcgaggggcttggctcctcacaaaggcacctgatgagcccgcagccggtgggtggcctgtgtggctctggggctctggccagtcagcacctctgagtgagcagcctctggagccaggttttgagggcaagcagggtgcctccccactcaccccacgtggggcttgttttatgtgccagttgccagtttccatgctctacctctcgtttatatcacctgcatcttcatcttgctgtctttatcatggccttgagctgtgtttgcctcatgctttttgggacgttcccctgggatggccctggggattgcaccttcaagggtgtaaactcatagaaccacctctcagccccagcagtccccatgccgctggccagaccctgccacaggactgtaactgtgacctagtcctggactggcagatgctttctctgtgctgtatgggggcaaataaaccatgcagtggacatctctctctcacggggccgcttggggcgaggtcaaggggaggctgagccgggccacagagtgtggacagaagagacaagttgataactggatggaaggtttccaggagcagaggtggagtaggggcaggtgtgacatggcaggaaaagactcgcattggccaggggggtggcaggcagtggttgaccagcagggttgcattggtgggggtggtggcaggcagtggttggccagtagggtcgtattggcgggggcggtggcaggcagtggttggccagcagggtcacgttggcgggggcggtggcaggcagtggttggccagcatggtggcgtgtgcctggcatgttcttttctttttttttttgaggtgaagttttgctcttgttgcccaggctggagcgcaatggcgcgatcttggctcaccgcaacctctgccacccaggttcaagcgattctcctgcttcagcctcccgagtagctgggactacaggtgcccgccaccatgcctggctaatttttgcatatttagtagagatggggtttcaccatgttgaccaggctggtctccaactcctgatctcaggtgatccacctgcctcggcctcccaaagttctgggattacaggcgtgagccaatgcacccagcgcacctggcatgttcttgtccagcaaagcgtatggccctggagtgcccggatgggtatcgagtggccagagctggtgcagaccgtccaccctcacatgcaaggagggagccaccataactgtctgtctgcctgcctgccttccagcccggagcaagggtgggaaaggccctgtaccgtcggccagtgtctgttgacggccagagtgcttctgaattgaattgcctgctgtggcctcgatcctcaacatacagggtctccgggtcagcagcactgtgtggatccagagactcggctgctggctgaatggaagggacttgctgggtggggctctgtgctctacactgtggacagatgactgaggcttttctctcactccttttatttcagagtcagttttcagataagccggtgcaagaccggggtttggtcgtgacggacctcaaagctgagagtgtggttcttgagcatcgcagctactgctcggcaaaggcccgggacagacactttgctggggatgtactgggctatgtcactccagtaagttggggccctcacagtgcagagggaggtcctgaggctcaggtgggctgccctggccccgtgatggcctcttctggccagtcagtgatgggggtctatgttctgatctcccggagctgctgctgctgtgaggctacggtgggagagatgccattct

SEQ ID NO: 6406 - DNA, 2300 bp, Homo sapien
gccggcccctgctcctcctccttgcacggcctcagtttccctcccgcaaagtgggcgcgccgggcagcgaggctcggccccgggaggacgggcgtggggtcgcgggcgacgccgggcgggtgcgtgagagagagcaagtgtgtgagggggcgtgtgagagggtgtgaggacgagggtgagagagggttgctatgagagcgagggtgagcgagagcgggggtggagggcgagtgtggacgggggcgcgtgtcggggggaccgcgagtgggaggtggagcgcgtgcgctggggcgagcaagcctgagagctaggcgcgctgggtggaaggggcctgagtgcgcagacaagggatgtggccggcgggtgaggagtgtgtgagcgcgcggctcgtgtggcagagtggtggccatcgggtccccaggacccccagagggagcagaggcagtagggctccaggcgggctgccctcccagtgaggggcacgcggtccccgtgaagggtgggcgcatcagacgcgatcccacccacccttggttcagccccaacccttgaagcttccattgctgactgtccaaactggagggtgacccgcccgcccgtccgcctcgacttcctgggctctagtaatctcttagcctcctagctacttgggactacaggtgtgcgccagcgcactcagctaagaatttttttttttttttgagacagagtctcacgctgtcacccaggctggagtgcagtggcgcgatctcggttcactgcaacctccgcttctgggcttaagggattttcctgcctcagtctcccgagttgctgggagtacaggcgcacaccactgcacccagctaatttttgtatcttttttagagactgggtttcatcacgttggccaggctggtcttgaactcctgatggggtgatctgcccggcagaaaaatattttttgtagagaccaggtctggctgtgttgccaaaaccagtcaaaaactcctggcctcccaaagtgctaggatcacaggccagagccgccatgcaccagttagttcttcaaaacacaacagaacaggagttgtcagtgcgtccatcgcagaatagagttagctctgattggctgctgtcgctctacacatgtacacacatgcacaacacatgtgcacacatgacatacacgtgtgctgggctgtgacgtaaagtgcatttcttactgctggtctccatgaaaagcattggaaagcccctgctgtgactcccatcatttccatcaacaccaccgaggaggtcctggacctacggactgggagcgcaggaaagtgggagcagtagcgctccaccttatcttgttacagagcggtttctgggacccctttgggtgaccagggtcggggcctgtgcctcttcataacacaacacattccctttgtgtgcggggccgttctgcccaagggaaggtcattggcatttggggaagaaacggtttgatgcaggaacacagtgtgtgtgaacctgggagtctgtgttatgtgaagagcatgatggagagtgtcctcacgggcctcagagccgagcggccggtgagcagtggggagcgggagaggtaccaaagcccagacaagggcctggttgcagtgtgagcacccctcacacatcacacacaccatctccctggggcagttgtctggaaagttccatggcaagtcaaagaagcagcccagcatttgtgagcagcctgtatccaagcactccatcacagagcgggcaagttaagcgcgagtggacagaggcagtaccctggccttgtgttcagttaggttctcctagtgtcccctctgctggacacatgctggcaggactgtcttcctcttccaccctttcctcttccttccctgaagtgtgaaatcacaggttggggggcagggaggtcataggcagaggggccactaggtgggtggacagtggccctgtttcaaatctgcaggacggcaggtaggggcagagacccagccctatagtggttggtcactgggtacctgagtgtgccctccagttactcctgggccagtcccctggagaaccaccgtttggtttttcattcctttccttcctccctgacccagatttccacccagaagacagagaaggagccagtggtcatggaatgggctggggtcaaagactgggtgcctgggagctgaggcagccaccgtttcagcctggccaggcaagtgattctgggccgtcttccctgtgccatggccagaaccctccccaccttccctggggctgttgctgactcagaccaa

SEQ ID NO: 6407 - DNA, 2300 bp, Homo sapien
tatcattcagcatcttcctaaggctaaaaggtgggtgcccacctaaagaagtcagttttctttttctttttcttttttttttttttgaggcagagtctcactctgtcgcccaggctggagtgcaatggcttggctcactgcaagctccgcctcctgggttcacgccattctcctgtctcagcctcccaagtagctgggactacgggcgcccgccactacgcccggctaatttttcgtatttttagtagagacggggtttcaccgtgttaatcaggatggtctcgatctcctgaccttgtgatccgcccgcctcagcctcccaaagtgctgggattacaagcgtgagccaccgcgcccagccaagaagtcagttttcaatgcaggtacacggggcccattggcacaaactatgcagattgggaagcggaccgctttgtgctggcaactgacaagactcccccaggaacccggccgttgggagctctgcagaggggcctggctctgggcttcctatcctcccatctgcgggccccatctgctcttgaggtctgtagttctggcccagagtgaaccctaagtagattctgcaattcttttttttgtttttttgagaccgagtcttactttatcacccaggctggagtgcagtgtgatctctgctcactgcaacttcagcctcccaggttcaagtaattctcctgccccagcctccccaggagctgggattacaggcatgcgccaccacgcctaatttctgtatttttagtagagacagggttccaccatgttggccaggctggtgtcgaacgcctgacctcaagtgatctacccgccttggcctcccaaagtgctaggattaaaggcggcggctgcccgatcgattctgcaattctttagcgccaaagacctctgacctcaatgagatcctaaaatggctaagtgcctttcctaagagaagttggatgttgccatggcctccttagcattgggaggactgcgcatatgtccctgaggacacctgccatagcttactgggaccctctccagagctctgccgacttgaggtcttcacccccaaaggtcaggcttcaggccaccatccaggccgtttgctgagagcgagtgctaagctgagtaagagcccacagctggtgggggacgtgcctcgcaccgcatgcagcccccagccccttctaggaaaggcgtgggcgtcagctggcagaaaataccgggaagggaaagaaggaaacgtgactagaaagaaagacaaagcttagtttaaggagaaagctcccaagcagcagaaatggagaagcagctgtgcagggtgtcttggagcccacgcgcgccccgggaacggctgagcggggcagggtggggcccggccgtgcggttttctgtaggaaactgcgctgggaacggctagggctgggggtgggggtcggacagcctgtgccgcgtagaatgcgcggtgactcaaaagtgctggccacgcgctcgttcatccaagcgcgaggggctgagttgggaacttggtttgcctcctggggctccggctcgtgcaatgtgcaaggcgggggtgcggaccgagagagcgcgcgtttcgggcagtccccgctggagacagcgcagtgggcgccatcggcctggggatggagatggtccactcaggcgggggtcggggggacgccaggagtggtgactccgggtccccgggggagcgtgccggggcggagcccaccgcgcggttctcccggcaccgccgagccgggcagaggccctggagcccaaggccccgcgcggccccacgccaagggcgccaggcctgcctaagagccgtggcgctgggaacccggctacccctgggccgggaacctgataaccagctccagcgcgagcaccaggggcgctcaaggtgaacgcgccgggcccggggtccgcccccggcgcggccccgccccggccccggccccggccccggccccgactttcgggcagccctgcccagtcccctgtcctggcccagcccctctccatcccagcgtgccgtgcgcggcggcggcgcgcgggcgcctggggcgggacttccggcgcgctggagcgttttccggccgtgcgtttgtggccgtccggcctccctgacatgcaggtgagccccgcggcggccggcccctgctcctcctccttgcacggcctcagtttccctcccgcaaagtgggcgcgccgggcagcgaggctcggccccgggaggacgggcgtggggtcgcgggcgacgccgggcgggtgcgtgagagagagca

SEQ ID NO: 6408 - DNA, 2300 bp, Homo sapien
agctcaggcaatccgtccacctcggcctcccaaagtgctgggattacaggtgtgagccactgcgcctggcctgcagtcactttaaaggggcttctgcataatatttggtcccatctataaactcaattaagcaattttcaacatttcaaacaatttataaatgaagcctcttttcactcctttttgcgtgctttaggttgtctgaattgataacagaatctcgggtgcttcagtaactcatgcattggcctggtgaggtggcttatgtctataatcccagcatttggggaggctgacgcaggaggtttgcttaagcccaggaagtggaggctgcagtgaaccataatccactgcactccagcctgggtgacagagtgaaaccttatttcattgtgatacttttttttttgcgggggggggcaattttcctgccttggcctcccaaagcattgggattacaggggtcagccactgcacctggctaaaaactcatacaacttaacagattcaaattttaaatgtggtgaactgcaagttatcttagatgttccaaaaacataaaatacgaaatgtgttcaagtttcacttaatacaggaatgctaacacttcggttctgattctcctaaatcttggtatgtatcattcagcatcttcctaaggctaaaaggtgggtgcccacctaaagaagtcagttttctttttctttttcttttttttttttttgaggcagagtctcactctgtcgcccaggctggagtgcaatggcttggctcactgcaagctccgcctcctgggttcacgccattctcctgtctcagcctcccaagtagctgggactacgggcgcccgccactacgcccggctaatttttcgtatttttagtagagacggggtttcaccgtgttaatcaggatggtctcgatctcctgaccttgtgatccgcccgcctcagcctcccaaagtgctgggattacaagcgtgagccaccgcgcccagccaagaagtcagttttcaatgcaggtacacggggcccattggcacaaactatgcagattgggaagcggaccgctttgtgctggcaactgacaagactcccccaggaacccggccgttgggagctctgcagaggggcctggctctgggcttcctatcctcccatctgcgggccccatctgctcttgaggtctgtagttctggcccagagtgaaccctaagtagattctgcaattcttttttttgtttttttgagaccgagtcttactttatcacccaggctggagtgcagtgtgatctctgctcactgcaacttcagcctcccaggttcaagtaattctcctgccccagcctccccaggagctgggattacaggcatgcgccaccacgcctaatttctgtatttttagtagagacagggttccaccatgttggccaggctggtgtcgaacgcctgacctcaagtgatctacccgccttggcctcccaaagtgctaggattaaaggcggcggctgcccgatcgattctgcaattctttagcgccaaagacctctgacctcaatgagatcctaaaatggctaagtgcctttcctaagagaagttggatgttgccatggcctccttagcattgggaggactgcgcatatgtccctgaggacacctgccatagcttactgggaccctctccagagctctgccgacttgaggtcttcacccccaaaggtcaggcttcaggccaccatccaggccgtttgctgagagcgagtgctaagctgagtaagagcccacagctggtgggggacgtgcctcgcaccgcatgcagcccccagccccttctaggaaaggcgtgggcgtcagctggcagaaaataccgggaagggaaagaaggaaacgtgactagaaagaaagacaaagcttagtttaaggagaaagctcccaagcagcagaaatggagaagcagctgtgcagggtgtcttggagcccacgcgcgccccgggaacggctgagcggggcagggtggggcccggccgtgcggttttctgtaggaaactgcgctgggaacggctagggctgggggtgggggtcggacagcctgtgccgcgtagaatgcgcggtgactcaaaagtgctggccacgcgctcgttcatccaagcgcgaggggctgagttgggaacttggtttgcctcctggggctccggctcgtgcaatgtgcaaggcgggggtgcggaccgagagagcgcgcgtttcgggcagtccccgctggagacagcgcagtgggcgccatcggcctggggatggagatgg

SEQ ID NO: 6409 - DNA, 2300 bp, Homo sapien
taaagaaaaagaaactgtttcctaggactgcgcactcccgaagctggcctctcccgagccgaggagtggcagtggtcagagaggcccacatggactcagacccaaggctgggactggagtgaatcatctggagggcttgcgtgtctgcaagggcaacgacgctggaaggaggtgggaagtcttttgcatggctgcatgtcgggccttctgggacccctaaacactcttgtgtggacgggaggatgtctgtgggaatcccagagctggcactgaggaggagtcttccgagtgggcggagggggatgcctgccaggcccaagccctcctgtgggcagcccctgcagcacccccattgccctgctctgtgagtggctgctggtgggggggcacagtggtctgcttgtctcggtcttctgcactgccactgccaatgggagcttggattaggcatgccagcctcctgacgcccagagcccatgctctgcccacgtgtgttagtggacggtcctcgtgactgctgggactgtcctggagagcagcccaggacccctcacatggcacaagatgctcttgtgtccagaatggcctttatttgttgtcagggacaggggagggaagcttcttggtggaagggagaggctgaagaatgaacagccccgggaccactttctctgccaggaggtggcactgggagaggatagggactccggaggggtgtaccgtcctccaggaagccctctgctgggtcggctccgtgcctctgtcttgggaagtgatggacttggttgccttatgctgactggggtctgtcacagatcttggttttccccaggagttctggaggcccagagcctgggtgcggcacccggttcattggggaggggcatgggtcctgtgccctcctcctggccgggctccaccagggctaagctctcatctggggctgcggaagtgagccagggtggggacaaagccctggctggtgggtctgggccagttccaggtacagggtccagatccccccactgcagcaggagggagcttcctgttcaaagccatctggctctgggaaggacagtgaggcagggccatctgcttccccactccctggggtctcttcctggccgggacctggagctgtgcagcctggcccagcaggtcctcccttgcgatgtgtccacaggggtgggcctaggcctccagcttgcagtggtgcagagggctggggagcagagggggccctggcaacagtggccaaaagtcctggcgccgccgagggactagattccgcaggggctgccgcccccggccgctgtcactggggtggggtgggtggttgtttctctgcaggcccaggtgatgtggagggggcacctgggctgccacacagaccctgggctgggtcgggcacggggcctgcctcgcccccagctcagggaccgcaagagatgtggccctggcggctcagggcggcaggaggggcgggccagccccaccgtctcaggataccgtgctaggggagggtttcctcgccaaaggccgtccagcggctgtgaccccttcgcctggagccccagcttcctcccggcgccgccctcccgccccggcccccgcggaacaaacaaggccctggcctcggagctgccccgccgcccagcgctcacaggtcgtttattccaagtaagaaaacggagactgctcggggcaagctagcggggccgaggcccaggacgaggccgtacgcgtgtgcctgcgtggccgcctcttttgcagtgaccaccaacaacgacagaggcggcccgctgcacacgcgggttcccgcccggacccacgcccttcccgtgggggacgcgggcggcatcgccagcttggcgcggccccgggacgcgaacgcgtggcttcagcggctccgtccatggtgtccgcctgcagggggcgcccccgcgcctgcctcgaccggctcgcccccgtgccgcggacgcgcgcgcgctgcctcacgcgacacccgccccggccgccgtccgtcgtcgctcgcgtgcgtgcgcgtgcgtgctggtgcgggcgccgtacgtgcgcgcgcgcggcggcccagaaagcggcgctgggaccctgaggcggccgtggttaggcggctccccggcggctcctccgcggcggtgacggcgaccgcactccccgcttcccgctccccgcgctcctccgcccgggtccgccagccgaggccgctcccgagcgtcggaagatgccggccgtgtccaagggggacgggatgcggggcctggcggtcttcatctcggata

SEQ ID NO: 6410 - DNA, 2300 bp, Homo sapien
agtttagaaaggttattcatgctcagcagcgtctgcactgcacctgcctgggcccggccacccctctcctggaggcttgtccgtgctgcctgctgtactgctgcactgccctctgctctcccctctcccctgcctctgcccgcctggaataaaacctcttccccaccttttctgtaggtgacaaggctcttgatggctatagtaaaaaaaagtacgtctgcaagttgctcttcatctttctccttggtcatgacattgactttggacacatggaggctgtgaacctgctgagttcaaacagatacacggaaaagcagatcgtgagtatcgctgcaggtggagacggcagaggatggcgtgggcctggcaggactgaggcccggtgcccgtgtagggccgctgcttccttctctgcccacagctgacgtgagccacgtgggtctgctgcagatggagacgcgtgcccagtccttgttagcacctgctgccaacaccctgcgggcccccttcccgcccaagctgggtgttcttcaggaagccctgatgccctcacagggttcctcctcctgcatgcggttttcctgatgaggtggccatgccttttcctcctttctttgcaacctcccttacggcgagtttcaggactgcccggttggtctggagagtgccgcacgcggcccagcgtttgatgtggttggtgctctgtgcccatgaggtcggcctccagaggaggggaggatgtctccctgacacagtgccttgttgacgcactgtcccaagtagacccgtcccgtggtcccttggacagctttgtttctgcagtaggcgctggaggcacatggctgggtcttggtgcggagggtgctcaccccaccatctccccagcccttgccgggctggtgcacagtgtcctgtcactctacttttgaagtcttcttgggctctgcacgttgagctgtgtagtctcttgcagtcacattatttctatgttttccctggtggtataaagtaatattttcttccatttgtcaaaaaatttaacttagagaaattaagagagactgtagatgtcttggggttttgataagtattggtgtttattcaagcatttgtggagtgcctgtggtgtgttggggggatgggggattagccttgaggacggaggcacagggactggaacttgggcctgcccttgtcctgggggagatgggtgtcacatggctccacagacatagaagttgaaaggatttgagagagggagtggaggtgggtgtgttgagctgaggctggagggaggggaagttaactgggggctgagggtgggaggagcagggagagcagagcaggtggtgcctggcagtggcctgggcgtgcgagcgcagggctgaaagggcagtggtgtttggcagggcgggagctccctcgtggcgtcttcctgggagccgtgggaggctgggtacatctttaaccggggtgctcagtgatgggcctggagaaaaccactgtttccctccaggtggggagggtgtcaccttcgaggatggctgggaagaagtggcagtgacacaggactggggtttgccctgggtcagtgggggtggaggggggcggcatgaggctgtgacacaggcagattaaagagtgggagggaacaggcagccgggtttctggaaattgttgtagctaaaatcagcctctcagtgaaggttcctgcccatcttaacttgaggatagtgtgatgtccggaacactcagacgcgtggcccacagtgaagtgagtgggaccggggggtccagttcctgttggcatctggctcgtggcacgctagtcaggtgtgccccacaggaacgctgcgccatgagagcatcgtagcagaggcatcctcggttccactggaacagacgtttgccgaatcctgagaggcgccgctcccacagcagtgccctgggtgcgtgggtggtgcctgggctgcttccgcatctgtgtgtcactgattgttgggtgactcagggccacaggtggacttggattgtcatgagctttctcttctcctgtcttttggaacgcagggctaccttttcatctctgtgttggtgaactcaaacagtgagctgatccgcctgatcaacaacgccatcaagaatgacctggccagccgcaaccccaccttcatgggcctggccctgcactgcatcgccagcgtgggcagccgggagatggccgaggccttcgccggggagatccctaaggtcctcgtagccgggtatgtgccgggctcgtgccgggctcctgctgaaga

SEQ ID NO: 6411 - DNA, 2300 bp, Homo sapien
ctcctgaagctgcaccagtgccagtctgattccctgtctcagatttaagtggtttgtttgttattttaagaagtgtgttactagccctgtctcttgattcatggacctttctgccagtgctgctgtatgcgctggctttcgtggagcagttattgcagagcctacagttttgttagtgtttgggtctatttgtgcttttatagtatcagatttgtgcaggttttctttttgagatggagtctccctttgttgcccaggctggagtgcagtgacgcgacctcagctcactgcaacctctgcctcccgggttcaagcgattctcccacctcatcttcctgagtagctgggattacaggcacctgccatcatacccggctaacttttgcgtttttgtagagacggggtttcaccatgttggccagtctgttcttgaactcctgacctcaggtgactggcctgcctcggcctcccaaagtgctgggattacagaagtgagccaccgtgcccggcctgtctcagttttgtaaatgcttccagctgggtacacaaatgtgaatgaactatattaaaaatgctctcatgatgtatgggtgcagccgggaggggcagggtgggctgcgggccactggagactggtgagcaccgttctgtcttgcccagaagaccctgcagtgcgaggccgcctgactgagtgcctggagaccatcctgaacaaagcccaagaaccgcccaagtcgaagaaggtccagcactccaacgcgaagaatgccgtgctcttcgaggccatcagcttaatcattcaccatgacaggtgtgtcggctgcctgtggagaggcttcgtctcgcgcacacacacacgttccttctcgttggcacgagactgggcggatcatgtctggtttgtccactccatgggcctccccttcgtcctgcctctgtgctccctgccggatgctttttttctttctgtgcagcccggcccctcctgctctgagctcaccgtggattgctttggtgactgtggtctcatcccacacgagggccttttcctccttcccctgagcatccccactcctgactggcttctcatgtagtggaacagagaggagacgggtggggtggggggtgtgcgcgcatgtcccgtggctttgctggatgtggagccgcacttggtgggtccagggtcgcagggcagtgctggaaacgtctgtgcccatccacgaagcgcagaggcgcagggtggcggtcgctccacacagcctggagggtctgcctcctctgctcccacgccttctctgctcagcagttgcggcgcaccacatgtggtctggcgtgggtcttgcgtgtggggccatgctttagggtcctgtgagaatgagatcgcagttctcaccaggctcccaataatgagggcacgtgccaggctgtgggcagacgctctctacagcttgtgaacaccacccatttgctactacagcatttttacaaatgatgaaaactcagtctgagagtcacacttcagaactgagagttattaaaactgaaatttcccattttggagaaagctctgttgttatgtgaggagaagccacatcctgaggagacagtagagtcagtggggcagcagccgcgctcccggccttctcggccttctccctgccctgggctggtgcctctggctgagaccccattgccggtcacagcttgaccggcctcccgcgggcctgatgcagattgaggctcaggaggtgctgggaaggctccagtggacacacgggctgctgactcactgtggggatgcacaggatggacacaaaatggatgtcaggggtgggggtcgggcgtcatctgcatctggggaggcccccgagttcccacttgagcagtgtggtggcggtgagtgccgtgtgactttgctgtctgccatctggacccgtcggggaacgcagactctgtccagtttgtgttgcacttgctgaggaaaccccacccacttcccctccctccacacagtgagccgaacctgctcgtccgtgcctgcaaccagttgggccagtttctgcagcaccgcgagaccaacctgcgctacctggccctggagagcatgtgcacgctggccagctctgagttctcccatgaggctgtcaagacgcacatcgagacggtcatcaacgccctgaaggcgagtgccctgtccttgggttctgctcactccctgagcaggtgccgtgggtcttcctgtgaaggctgggggtacgcagtgcctcctgactccccgcagagatggaggtggtgctggt

SEQ ID NO: 6412 - DNA, 2300 bp, Homo sapien
ctacaaaaaatacaaaaattaggtagacgtgctggtgcacacctgtggtcccagctacttgggaggcaaaggtgggaggatcgcttgagcccaggtgtttgaggctgcagtgagctgagatcttgccactgcactgcagcctgggcaacagagcgagaccctgtcgttcattcattcattcataaataatgcatacatcattatttatgtatgcataaataaccaaaaaggaaaaagagtgtctgcagggcgtggtgacgttggagccttgtacgccgctggtgggaatgtacagtagtgcgggcactgtgggaagttcctcagaacacaaaagaagatggaattactctgtgacccagcagttccacgtctgggtacagaccccagagaattgaaagctgggtcttaaagaggtacctgtccacccatgtccaatggcagcactattcacaatcaccgaaagttagaaacagcccagatgttcatgggtggatgcctaattaaacgaaatgtggtctgtcgacgcagtggaatattattcagccatcaaacggcagaaaggaatgaaattctgatgcataaagcagcacacatgcaccttgaggacatggtgctcagtgacacgggccagacacctggacaaatcctgtgtggctccactcatgcggtccctagagcagtgacttcgtagagacagaacgtagctgggggatgccagggcctaggccagggggatggggaattggtgtttaatggggacagagttccgtttgggaagatgagaacgttctggagatggtggtggtggcagcagctgcacagtgtggatgcacttcctgtgcccttgtgtgcacctaaatatggctaggaaggtgaatgttagtgtattttaccacaatttaggagaaagacataaaaaagcctttgagtgtaaaaaaatgctgtgcacggaaccctgtggctgcaggggccctggctgcggacctgcctcctctcagcgcctgccttgagcctcctcaggactgctctctctctcatctgtgaaaaacacagaaagaatgtgaaaaaagagaattagtcctctgcccgccaggggtctgttagaaaagtgagggttgtcagagtgattcctgtgggaaacgctgcattgaaaacaggtggtgcctttagtcctggtttaagtttttaagctctgggccgtgatagcttcacgaggtgttggttttgggtttttaaattgtgggaggagtgatgccaaactgtttactgttttcaaaatatttgagatttcctttctgaattcaaggggtatacagatgttcacaaagattttttactgtgatataaataaaaacagcgacacatcctaaatgtgcacctgtgccgtggctgagccgctgcagtgagggctagtgtgcaacaccgatgctgtgctggacgcgtgcccagccgggtcccctgacaggaggcagccggggccggtgcgtgtgtttgcatgttgcagtcatggggcggggccggcagaggcctgtgtgattgtggcgtccctggaaaagatgcttggcaggcccctccagctgtagcccagcctgcagacggggcgttctgtgggtccttccccgtgcatatgcgtgtgatctcacccatcccgtgtgggtgcgcaggaggggccgagggaggagggtgctggagggcggaagttacctctgactggaggagatacccggcccgtgttaccagcactggtgtgctcgttctaaaactggaaaaaatttgttcttaattttaacaacagtcatacatcacaacagtgaacttaaattcagctgaagattgtggggggctcttgtttttcagggtaaatattcagggtaagtgtgaaatggtgtgtgtgaaaaaattgtttttgttccttctaggtcggatgtttatcttttatggtaataagacctccacgcagttcctaaactttaccccaacactaatctgttcagacgaccttcagcctaatatccttggcttcattgccccatgcccgcagacagcataatgtggggcttagaggaggcttttgaggaagttttttggttttcttattttgttaaaatagcgagataattccagatgctatatgaaaatcaggcagtcgtaatctgcctatggtgctgggcaggagaaggaaaacaggcagtcttccatattggagagccagcttttgatcatgcacctaaaaataccgtgtacatgcctcctccccttccatctggccagtgtgagtccctttccttttcacctgctct

SEQ ID NO: 6413 - DNA, 2300 bp, Homo sapien
cgtcgaccgccagcccagccacgacgtccacagctcagtccacaacacggaccacaatgacactaccaaccccagccacatcagggacaagccccacgctgcgtaagtcatggcgccatgggatgccagcactgccgaaggcacccggtcccaccaccagctcacattcagtgattcagccataaagaagaccccgtatttcccagagggcaagcgagaaggcagcccaaaagtgtaggctggagctggaggcaaggaaggccgcctggcactcacaaaggcaggcctggggagcagaggtgcaggagggtgggggccaccaccacggccacagggaaccagaaggggataaagtagggcctgggttccagtcacagagcggcagctgcactgaaggagtcagcacgcagctcagggcaggatgtggagcaagtccaggtgagatggagacaatggggcaggctggagtgcccagcaggggccatgtcacaggaacagaggcacagacaggcaagaaaaaggtcacatagacaaaaggacgggccagcggaggtcagggtagagaaacaaaaacaataacgatgacaacttcaccaattcccacagcaaaatcgaccaatcaggaactgccaggaacaacggccacccagacgacaggcccacgtccaaccccagcaagcaccacaggcccaaccaccccacagccaggacaacccacgaggcccacagccacagagaccactcaaacaagaacgactactgaatacacaacgccccaaaccccacacaccacacactccccgcctacggcggggagtcccgtcccttccacaggtcctgtcactgcaacatctttccatgccaccactacctatccaaccccatcacaccctgagaccacacttcccactcacgttccacctttctccacctccttggtgactccaagtactcacacagtcatcacccctacccacgcacagatggccacatctgcctccaaccactcagcgccaacaggtaccattcctccaccaacaacgctcaaggccacagggtccacccacacagccccaccaataacgccgaccaccagtgggaccagccaagcccacagctcattcagcacaaacaaaacacctacctcgctacattcacacacttcctccacacaccatcctgaagtcaccccaacttctactaccacgattactcccaaccccactagtacacgcaccagaacccctgtggcccacaccaactcagccaccagcagcaggccaccaccacccttcaccacacactccccacctacagggagcagtcccttctcttccacaggtcccatgacggcaacatccttcaagaccaccactacctatccaaccccatcacaccctcagaccacacttcccactcacgttccacctttctccacctctttggtgactccaagtactcacacagtcatcacccctacccatgcacagatggccacttctgcctccatccactcaatgccaacaggcacgattcctccaccgacaacgctcaaggccacagggtccacccacacagcgccaacaatgacgctgaccaccagcgggaccagccaagccctgagctcattaaacacagccaaaacctctacatccctacattcacacacttcctccacacaccatgctgaagccacctcaacttctaccaccaacatcacccccaaccccaccagtacaggaaccccaccaatgacagtgaccaccagtgggaccagccaatcccgaagctcatttagcacggccaaaacctctacatccctacattcacacacttcctccacacaccatcctgaagtcacctcaacttctaccaccagcatcacccccaaccacaccagtacaggcaccagaacccctgtggcccacaccacgtcggccaccagcagcaggctacccacacccttcaccacacactccccacctacagggaccactcccatctcttccacaggtcctgtcactgcaacatccttccagaccaccactacctatccaaccccatcacaccctcacaccacacttcccactcacgttccatctttctccacctccttggtgactccaagtactcacacggtcatcatccctacccacacacagatggccacttctgcctccatccactcaatgccaacaggcaccattcctccaccgaccacgatcaaggccacagggtccacccacacagccccaccaatgacaccgaccaccagtgggaccagccaatccccaagctca

SEQ ID NO: 6414 - DNA, 2300 bp, Homo sapien
ctctgccactttacagctgggaaatggaagcctcagtggccaggacccgaagccctacaggcctggccggggaaccagtgtccactggctctcacccccaacccacccctgcccctacattcaaagcttcataggatccctcctgagaacctgagctcggttctcacaagcccagacaggtggtcagacaagcacaaccgccgggctgacatggccacagggctcccagccatgacacctgcccatgaggtcccttttggcaccagctgccctggtgcagtgacccacccagggaaggaggccctaagatctctgcccctcatcgtccccacctcgagcccgggctgagaggccccagctcagaacgagggccagctgtgagccctgcgtccatccaacctctcagcatgacagggcaagggcctcactcctgtgcctcagcttctcacctgaaccacagggaccactgagcgtgttaagaagggacagccaaggctggacacggtggctcacgcctgtcatctcagcactctgggaggctgaggcaggaggatctcttgagtccgggagttcaaggccagcctggacaacaaagtgagacctcgtccctacaaaaccgaaaaattaaaaagaagaacagatgagagtagaacacccagaatgcctggtgtggggctcctggtggggggcagcacacgtactgcaatttcctacaaaagcaacttattgtaacttcaagcaacgttccacaaaactgaagctgatttaagtgaaacacgcgacacctactgtgtatggcacgcgtggccctggggcctcttccgggggcaggtggggcagctcccgggcgtgtgggcacaggtgggacagaggtggcaggcccgggtcccagccagcaggctcagctcacctgtgggatgggggtgcagccccatgtggggagcccggcccagggagaccaggcggcctcggagtccctcctggctcaggccgggatgctgacgtgtggtgggagcagccccgaggccagcgagggctcctgtcggagtcggggaccaaaatcccctttgggaggggtccctgggctgccaaacgaagctggggcaatcctggtgaccactcagacctccacctccctcccccccgccagccaccggcaccaccccgatgtcaccagaccttgccctgtccccggcccctcagacgtggcacgtgcctccacaggcaaggccccctggtcatcccagtccctgcccctctgcctgaaggggtcaggagcataccggcgaccccacagccccgcagagatgccccagcagacgagcagcccccgagttcctgtcctcaagatggctgccaacagcgctcgaagggggaagaaaacagctgtggaggggtcttcaggagcaagcctgggacctggcgggctgcagagacacggtagctcctcaggcctccagggcagcctgtctaagccccaaggccgctgcctgtcccagacggcggagcccctgctccccaacaccccctggcaaggtccctcccgctgggtgatctttcctgttgggcagggaactcaggggtgggcccagggcccttcagggggtgctgggattcagggtgaggggtgggcccagtgcccctcagggggtcctgggattcaggtgcagcagggttccccccaagctgggtcagcactgggctccccggaaggggcagagcaggtgccccagggcccccgacctcccccaacaggtccatcccggccaccaggcgtgtggctgacagtgccacgttgacccagcagcggggagggcccgggccaggatggcccccatgcagggggtgtttgcaggacctttgggggcgtgcgtgcgtcagccccccgctgggaatgggtgataatggggccgctgcctgcaggattttccaaagaaagccgagtcctgataaagcaggcccagatcctgtttggccaccgcggcgcccgccggcagtggtgattaaggggctggaccgcggggcgcaggcaggtgcggcgggggagggcccgccagcctatataaggcacccaggaccggccgttggagccgcatggatggcagcagcaggcctgccgggcccagcgcgagctcctctccactgtgcaccatggtccagcggtggctgctgctgtcctgctgcggagccctgctcagcgctggtgagtgaggtcgaggggcgccagacactgcggtgccctcagaggggccctgtgtgcgggggtctctgggccttctcgcctcgacaactcggctggc

SEQ ID NO: 6415 - DNA, 2300 bp, Homo sapien
gagtggggaagggtgggagggagagattccaaagaggtgtaaggagccctgtgtgggtgatgggtggggacatattcatcctgattggggtggtggtttcccaagttcaaccaatttatgtcaaaactgacccaatcatacacgtaaacatgtgcggtttattgtatgtcaattctaactcagttaagctgttttagcctgtgtcaacgcactttcctgaccagtaaatcctaagtgttttccttgttgccacataaaatcctagtcataatttatagtggatgcatgttattctagagttgtttggctcttagagatttaaaattaatcagagaaatatattagagcccaaactatagtgacagtaaaaaatgaccagtgcttgccagggatttgtggggaaggatggaatagctgagacacagggcatgtgttagggtggtacaaccattttgcatgctactatcctggtggatatttgacactctacatttgcaaaacccagaaaacttaatagtgcaaagagtgaaccttgatgtacacaaacataaaaatattcaggaggttgagggatgccacagatgaaatgcggaatgtggcaaaacaatccaactgtatttcaaatgcatgaaataaactcacagaagggggcgggggtggagggatgttgaagggccctgacctttgggcacttcggcaaggagcaagggggcactgagattcctgccctggggctacgacaccacccaggaacccctgatctttctgttacttatgactggggtttctccaaaaagcaacagtctcctttgcaaaaagtggccacaccattatcaagcggtggacagtgtaagtttggggctgggaagattctctgggaccacattgcagctctgccattcttgggctgggtgagccgaaggagtgctttcaccctctctgagtctcagtttccttgtctataggatggagtgaggtgagtgccttcctcccagggttgagggctccagtgaggtgggcctatagagcagttggcctgtacttgctcatcatgagctcttgtgaggtggagccctgtggagctgccacagaaggtgaactccagtaccagggagatttcatttgtccatccttttacccacccacccaccgattaatccatcatccacccacccacccacccatccacccacccactcatccatctatctgtccatttgtccatccatccatccatccatccatccatccatccatccactcatccactcatccatctctccattcatccatccacctatccagtcactcactcacatatccatctatccatccatcctttcatccatccattctttgacccatccacacatccatccctccattcatccatgcctccatccatccacctatccattcactaacccatctatccatccatccatccatccatctatccatccatccttccattcacccattcatccactcatccatccatccatccatccactcacccacccattcatctatccatccatccacccacccattcatccatccctccctcccatccatccatccctgacccattcatccatcccttccatccatccatccatccatccatccatccactcacccatccacccatccatccatcccatccatctacccacccactgacccattcatccatccttccctccctccctcccatccatccatcctttcattcacccattcatccatccatccacccacccacccattcatccatccatctaacgatctgtccctccctccctccatttatccactcattcacccagccaaccacccattcatccatccgtccactcatttacccactcatttattgatctattcatccatccatccatccatccatccatccatccatccatcccatccatctacccactgacccattcatttcccctccctgcttcccatccgtccatctatccatccatccatccatccacctgctgacccattcattccccctcccttcctcccatccatccatccatccatccatccacccacccacccacccacccacccacccacccacccagaagcaaagttattgagtgcatctgctgtgagggtggccatggggggcccacatgggctgctgcccttgcagcattcggagcaggatggccagcaagggtcacacagtgtggccagggtggtgagaacagtgttcagtgtgaggatgtgacacctggaccaagtcttgaggggcaagtgccccagggtgtctggac

SEQ ID NO: 6416 - DNA, 2300 bp, Homo sapien
gggcaatacggctgcccactctcccactctgcacttgctggaggccgacatttcagtaaccagcaatgggggccacatttggaccaacacaggacgtggggagagaggggatgcagtgctgtggaactgcctggcccccatcgcctccaccaccacagtagatgctgcgaatctggcagtggggaccggctgaggcttggaggcaaagaggctggggacactctcgctttgggggtgccagtgactccatagtcgccccggcctgatggagccctcactgtcctcttccccagaacagctccctttccccgttaggaatggggttcagctctctgcaccctgccccatgcagggctgcctgtaacctcagacagggctcctacctgggaccttgccatgggccaagaggggtgttggggtcagacccctgagcctgggaaccaccactgcccgtccagaggggacacagggtcagatctaggggacctacctcaggcttcagggctggaggggctgtgctgggcagcttgtgctccgctaggattcctccaatccccccagggcagggggagcctggcctggaaaatctctgtcctgaggcccgcctggggcatgtcagggtcaggggactgcagttggggccgtccttgggtttccccagggctcagtgccagtgtgcggaggcccacaccaggaagtgaacaatgatctcctctggcctcgcccagctggctctggtttcctaatccccggtcctcctggcaggggccacacactgagcttcctccacgtgcccaggtcctggcagggagcgcagaccctggggcctggtgctggcgggcaccgcaggagggcgggaggggcttcgtcccaggccctgggtctgggcagcaggtcagccagggaaacaggcttggtgctttgggccccgagtctctataactgttggggtgagtccctccccactgccatcatgctgccggcatgtccctggcatgttcaggccaaagccaggaactcaactcagggcccctctctattttcaggaggagaaaattgtagagagaggggagggcccccagacctcagtttacccactggcgacacaggggtgcctgcctgtgccctcccgggccggggcaagcagtggtgggcccagtggtctcgtagtctggggtcggtgtgagttccggttctccaggcttttttccagacaactgctgggattggtgggcgagaccaaggctcatcaaaggcacagccttgggggcaggatccccaccatgagtcagaggtagttctggggagcctgggcaggctgtcacctcctcagctgtcaggcccgaggtcctcatgtggtccccaggagaaggggcagacggccacttccggccaccagccagctccctgtgtgcctgattccgtaacatgtcccctggctgggcatgtactccccaagttctaattacatgtaactgcagagaagggctcagcctgggaaaaggatgggcatagggggtggttgggggctggggcctctgacacagctccatgagcccggccaagagtcccacacaagtcagtggcccccccggaccctgaaggatcccacatcctccctgccctcggggaggcccctttctggggtcaggcctggaagctgccccagagcttgggccccaggaatgggttggtcctcccagcgtaacgtgagcctgatcaggcctggggacctgctcagcgggtgtctgggggcccatggcgggctaaggagcctgaccagacttgcttctggcaggacacccctcccccggccaccctgggctcgcccctctagtagctgcatgtgttccccgggtgtgtgttggcattcaggctacagggctgcctcatcctgaagaaggctgcgtttacccagggagccataaagagatgacctccgataacctgaatcaatatttccccattggggctcgggcccccgcagctgtcttcttgatcatctggcagatgccacacccacccttggccctcccctgccttcctgccctcctaccctcctgccaggacatataaggaccagacccctgcccccgggcgcaacccacaccgcccctgccagccaccatggggctgccactagcccgcctggcggctgtgtgcctggccctgtctttggcagggggctcggagctccagacaggtgagagagcagacacaggggtctggggcctggcagagtgtcctgggggcagggcgaggcgggcgggcaagtcgcgtctgggaggaggagctggtcc

SEQ ID NO: 6417 - DNA, 2300 bp, Homo sapien
gctggaggcctcggccctcagacgaccagcaggaagtggtgcctggggcctcagctgcccggacatgctgcgcagagtgccatggggacaaagccgcctgcagcccactgacctgtctgggaggatcaaagtctgggcactcggggggcttggtgccgggcgtcggcttggagggcgtggacgatggcttggaaggcgtgggcgtcgacttggagggcgtgggtgttggggagggcgtggatgggcaggaccagttatagaactccaacgtacagctcagtgagcagttgacgaaataacaggtgtctccgtatgtgccgttgtacacctcctcacctgcgaagggagacagacccacgatcacaccgtccagaggcagggctatccggaggcagggctagccgctggaccccgtggaggtccccacagcggaggtccccacagaggccacccaagggaagccgtgccctggacacagccaccctcgacggctgctgcctcctgagacgcttctactgcgatctcagccctggcacctgacccattggtacatgccggggccagcctcggccacccaagcacaggatgtgaacagcctgagtacctggtgcgtagtaggtgtcgttcaggacacagcagataagcacagaggaagggtagggcctcaggcctgtggtcctgatgatgctgggtgtggagagtggggtcggcgttggggtccaggcactggtggtggtcgtctgcacagtgctgggggtgggggctgaagatgacccggtcgtggtaccgcgagtgggggtgcctgtgagagcaggagacaccagtgagggctgagacattgcacatctcagatgccacagggtcccaactgccactccccagctgcaagggagccagacagccgaccgggtggcagaactggaggaccagggcctcgtgcccacctcccaggctctcagagtcaccaggcagggtggagcggcaaggccagtatcaccacagccgagtgtcacgagagcctgcaggtgacctggtgctctggcagcaacacagcttgctggccaagccgatggccagcaagaggcgtccagaaggcactggctgtggcacgccgtccaccaggaaaaggccccaaggaggggctgcagccagaagcaggtggacccgcaggcacctcactggcagcctctctctgccccccagccttgatgggctcccacagcaccgcatcacatagcagtgggcccctgaagaaggccgtcttatgggcgagcaggatagccaagggctccactgcccagcactggccggtgtcagcagctcctcagaaggctgtcctatgggcaagcggaatggcctttggcttcactgcccagcactggccagtgtcagtggcttctgcccacacagtgaccaagcttcgtgggcagagaggcgcccagaacgtgccttgagccttcctgggacagtcctgcccggcacaaggggaggaagaagcatcccaggccagaggaaccaagcagctctgcttacctggaggggacgtggtggtgctgggcggtggagacagtgtgtggcctccgctcgtggtcgtgggtgccgtgggtgtggagggtggggccgtgctggtcatctcaatggcaggtggtagggtactcagaagggtggttgactccgtgagaggggaagaggtggaccgagaggtctgaggggttgaggactcaggcggaggattggatgtggtcaactcagcaatgggtgctgtgcttgtgtgggtggggggccccgtgcttccagtggtgggtgttggggttggggtcaccgtagtggtggtgctgatgggtatcatggttggggtctgtgtgccggtgggtgttggggttgcggtcaccgtagttgtggtggtgatgggtgtcacggttgtactctttgtgctggtgggtgttggggttggggtcatcgtagtggtggtggtgatgagtaccgtggttggggtctgtgtgccggtgggtgtcggggttggggtcaccgtggtggtggtggtgatgggtgtcgtggttggggtctgtgtgccggtgggtgttggggttggggtcaccgtagtggtggtggagatgggtgtcggggttggggtctgtgtgccggtgggtgttggggttggggtcaccgtagtggtggtggtgatgggtgtcgatgttggggtctgtgtgccggtgggtgttggggttggggtcaccgtagtggtggtggtgatggctgttggggttggggactgtgtgccggtgggtgttggggttggt

SEQ ID NO: 6418 - DNA, 2300 bp, Homo sapien
actcatccactcactcactcattcattcacccattcactcaatcattcattcactcactcactgactcattgactcattccctcactcattcacccattcacttattcattcactcacccatttattcactcactcactcatttactcattcattcacccattcactcactcattcactcactcactaactcattgactcattcactcactcattcccccttcacttactcactaacttatttactcactcattcactcactcattcattgactcattaactcattcactctttcactcactcactgactcattcactcattcactcactcattcactcactcacccactcattgactcactcattcacttattcactcattcactcactcactgactcattcactcattcactgcttgcttattcactctttcactatctctctcattcacatttattcattaactcagtcactcactcattcactctctcattcacttactcatttactcactcatttactcattcactctctcattcacttactcatttactcactcatttactcactcactcacctgttcactcactcgctcactcattcacattcattttaactcactcatttactcatagactcactcatttatccacttacttattcattacctcattcattcactcactcaatcattttccctttccccacactcctgccacatgtgaagtgctctttctctaggcacctgggctaagacaggacatggggagggaaaggcacagaaatggagaagtaggcaatcataaagagcttgggacgggtccctagagagctggaagcaagtgctcagaacagccttgaggcacctcttcgaccctaacccctctgcagcaggacaaagggcccagcccagcctctccctttcctgccattcctcccatgggagaccttctggttggacgctccacatgggcagtggagcagccgaccttggctggggagtgtgtggctgcctgggagggagagtctagccacagtgtccagccacacacctgtggtctgggcaagtgttcatcacacaacagcaccttctcagccagagcccttcaggccaaagactcactgggacctttctgtgctgggactgctcggaccagtcaacagcttcctgtccagagggtactgagcatttctggatcttggtggccagagaccatcaagtgacttgaactggccctgcccgcctggggtcaggagacagaagcacaggtggactcctgggcaatgctgggagggggctgcatggtgagggaggggttctatcatttgcctggaggctgctgccaggagcccctctccagggagggtgaggctggctggcgctacttcagtggcagcatgtggctggcctgagggacgccttggctcactcactcctcaatcactcatttactcattcattcactcactcaatcatttttcctttcgccacactcctgccgcatgtgctctctctctaggcatccgggtaagacaagacatggggagtaaaaggcacagaaatggagaaataggtgaccataaggagctttggatggggctggggctggcctctccctcccaggcagccacacattccccagccaaggtcggcagctccactgcccatgtggagggtccaaccaggaggtcggccatgggaggaatggcaggaaagggaaaggctgggctgggccccctgtcctgctgcagagggattagtgtcaaagaggtgccttaaggctgttctgagcactcacttctgggcaccaggaactcacaggctgctgggcatggcacggtgcccagggagagtctagggtggggtatgtggggaggacccctgcaggccagggcttgggggggccctcggaaactgggctctacccggcagacacacccatctccgcctgccaccggccgctggccagcccgcagtgagcacccactgtttacttgggtgagggggaaccacaggccccgccctgcccacccacgtgaagcacggggctggagccagctctggggctacaaaaagctcctgccaccttgggtccctcctcagaggctgctgagggacagggcactcttccccgccgtccacacaatgagtgttggccggaggaagctggccctgctctgggccctggctctcgctctggcctgcacccggcacacaggtacggcttggcccctggccgctctactggtcctgggtggtgcggtactgagtgggcctcaggcagctcagtctttgccc

SEQ ID NO: 6419 - DNA, 530 bp, Homo sapien
cagcacaacctctgctcctataaccgcatgacctctggtcctggaactactcccagccctgttcccaccaccagcacaacctctgctcctacaaccagcacaacctctgcctctacaaccagcacaacctctggtcctggaactactcccagccctgttcccaccaccagcacaacctctgctcctacaaccagcacaacctctgcctctacagccagcacaacctctggtcctggaacttctctcagccctgttcccaccacgagcacaacctctgctcctacaactagcacaacctctggtcctggaactactcccagccctgttcccaccaccagcacaacctctgctcctacaaccagcacgacctctggtcctggaactactcccagccccgttcccaccaccagcacaacccctgtttcaaagaccagcacaagccatctttctgtatccaagacaacccactcccaaccagtcaccagtgactgtcatcctctgtgcgcctggacaaagtggttcgacgtgga

SEQ ID NO: 6420 - DNA, 2300 bp, Homo sapien
ccccagaaaggtaaccccctacttctcacccttctgaaggctcaggggctcctacagggaacttgaatgtctttgcaattagtcttcagctgcaaagtcttgagaaggtcactggcgctagtggaggcagcccggccgtcaggagagggccatgctgtagcccggcgtctctgatcaccctgggcttcccaggcacgtgctttccagacactgggtgtgtggggccgaaggctgaggctgtgctgaggacagccagggccagagcaggtggatgaggctgcacagccagggagtgtggcagagccagggaggagccactcccacaccagaggcccctgccccgggccagctcggtgtctggggtgggtgctgagggtggggcaggaaggaaactggggcacagccaccctcccctgtccccacacgggactctcgggactgtgaccccgagaaccaaggggtgccccggagatcgggagaggccggaccctgcaggtctctgtgcttctgcagaaaggtgagacctgggccacacccaactgctccgaggccacctgtgagggcaacaacgtcatctccctgcgcccgcgcacgtgcccgagggtggagaagcccacttgtgccaacggctacccggctgtgaaggtggctgaccaagatggctgctgccatcactaccagtgccagtgtgagtggagcgccgagcgggacccagggcagccggggcagccactccccacccaggtggaaatgggcggggcagaggagggggcttggctgaagcagaaaagaattgggtgggacagcaggaaggacttcccagcatcaaggcggggccgcatggggccgagcctccccgcttaggggtgctgagtgaatccctgtgagcctcggagcagcctggctggagaaggtggaggagtctgtccctgcctcgctccagccttgtcaagcgcccgctggatggagctctgtgcggacgctggccacgtgtgttctgatgacgtgagggtcttgtgcgccctgtgagatgagacggtggggggtcagggacagatgtgacctgttgggaggaaagccccagggccatggtgccaccacccgagccacccgtaaggctgcccctggggcctggcaggtgtgtgcagcggctggggtgacccccactacatcaccttcgacggcacctactacaccttcctggacaactgcacgtacgtgctggtgcagcagattgtgcccgtgtatggccacttccgcgtgctcgtcgacaactacttctgcggtgcggaggacgggctctcctgcccgaggtccatcatcctggagtaccaccaggaccgcgtggtgctgacccgcaagccagtccacggggtgatgacaaacgaggtgggggcgcgcccggtgtgccgcggagggggtgggggacgcggctttcccggcaagagcctgagcagcggctgaccgcccgcccgcctgccttctgacttcccgtcgaccacgccctgcgtccagatcatcttcaacaacaaggtggtcagccccggcttccggaaaaacggcatcgtggtctcgcgcatcggcgtcaagatgtacgcgaccatcccggagctgggagtccaggtcatgttctccggcctcatcttctccgtggaggtgcccttcagcaagtttgccaacaacaccgagggccagtgcggtgaggccacagggctcccgggcatcgtctggcattcgcgggggcgggggtgccgggcaggggcgaggccaccacgtgccgcgtgtgccggtgtctctgctttctggctgctctgctgagtgcaggccacaggcatgaggcttacgcctgccggtacctgcagctccccagtaccatagggactgtcccagggttgttctcgggggacagtgaggcacaggcagggcccgctgcagttcaccaagttgtgaccctgagacaccagggtcctgtcccccagctgggggtggggccagccggctctgctgtccagcagcctgacccccaccgcgtctgcccaggcacttgcaccaacgacaggaaggatgagtgccgcacgcctagggggacggtggtcgcttcctgctccgagatgtccggctctggaacgtgagcataccctgaccagccagcctgccaccggcctcacccgacgcccaccacggtcgggcccaccacagttgggtctaccacggtcgggcccaccacagttgggtctaccacggtcgggcccaccacaccgcctgctccgtgcctgccatcacccatctgccagctgatt

SEQ ID NO: 6421 - DNA, 2300 bp, Homo sapien
ccacccaggtacagggccaggcagaagcccgaggtgtgccctgagttaaagaaaccgtcacaaagaacaaagggagaaggcgggttccagcctccaccacagccctcgcgctctgaggagccacctgggggcctcagccatgaggggtgacaggtggcaaaacgggccagctccgttcacgtcgctgtgcagctgtctccgccctccatctccagaacgttctcacattcccaagctgaaaccctgtccccatgcaacaccagctcaccatcccctctgccagcccctggcgcccaccgtccacactccgtctctgcgggtttcatgactccaggggcagcacacgagtggcccctcctgcctttgtcctctgtgtccacctgcctcactctgcacagtgtccccagcttcccccatggagcagcctgggccagcctctccttttcacggctgaaccgtattccaccgcacggatcagcctcacgatgctgacccagtcctccgcccagggacacatgggcagcttctgccctttgtcagtgatgctgctgtggacatgggtgtgcaaatgtccctcaggacccgccttcagttcttctggggacagacccagagtggagttgctggtcacccccaccagcagggcacagggctccgggtccccacgtctctgccaacacttcctacttcctgtgtttcttgatccccgccatcctattgagcgtgagacaggtcagaagctttgaagatgggctttcgtcttgtcccagaaatcccacctctaagaatttaacttcagaaagacaaacgcgggggagctggtgcagggcccgtgacggggactgtgacgtaaataaaacaacagacctggacaccaccctagggtccccatggggccggacgaggccacaccacccgacctggtgcttcctgcctggcgtctgcgccacggagcattcaggacgctggtgaccagggagccaggaggtgggagcatctgaggtgcaggtcacacgggcaggaggtgtttgcaagaggtattgcagcgcggacggagtgtcctgcagatgacgctgtctgtcctgtagatgacgctcgtcaaggaggtttaccacatagcccccaggaagcccacccgacaccagccggaggtgctaggcttctgcggctcccacctggggcaggcggaggaccccgggcaggtccaggaccccccggagcagctgcttcctcaaccctgccagggttaatgaggaggccccagagtgaggtggaggccaaatgggactcagggccggagcctctggcctggctggatcagggctggcattggacaagcgcagctgactcccgatgtgcatggccaggagacactctgggcctcagtttccccttgaatgtgaaccttgaaacagatcagcccagagacctcccacggtcttcaaggggctctggtcagctgggctggggtctctggaaatagagcctcctccagggacccccacaagccacccagactgagcatcctggccatgtgcatgcctgagctcagcaggagcctcccggcctccccgtgggctaagcagtggtgggaggggagctccagcctcgtgggccctccccgggcctcggggacccatggtcagtggctgggggtgctgcccagaggctgggattcccttccagcaggagccgcagtggggctgagtgtgaggcaggctggctgaccactgtttccatggaccctgcgtccaaggccagccctgccttccagcggctttgccatctaggacgggtgccaggtggggtaggcccttctctcccttccgattctcagaagctgctgggggtgggggcgtcctgggcctcagggcacagagctgcaaatccttcctgatccaggcctctcccctgccacagcccctccccgagagcaaacacacgtggctggagcggggaagagcatggtgccctgcgtggcctggcctggcttggggccaaggctccctgctacataagctggggcccccaggggagcaagcacccggcccggctccctccctgcccgtccccgtccccccacccgtgccagcccccaggatgggtgccccgagcgcgtgccggacgctggtgttggctctggcggccatgctcgtggtgccgcaggcaggtaagagccccccactccgccccctctcgatgctgtcttcacggcgggggtctctgcaggtcgcttgcctgggagcttctcctgcagagtgcacgggcagatccccctacgactccctgagtgtcctgga

SEQ ID NO: 6422 - DNA, 2300 bp, Homo sapien
gaccactgcaggggacgtgccacaaccccgccaccgaccacagagctggagacggccaccaccaccaccacccaggccctgttctcaacgccgcagcctacgagtagcccggggctgaccagggctcccccggccagcaccacagcagtccccaccctctcagaaggactgacatcccccagatacacaagcacccttggtacagccaccacgggaggccccacgacgcctgcaggctccacagaacccactgtcccaggggtggccacatccacccttccaacacgctcagcccttccagggacgacggggagcttgggcacatggcgcccctcacagccacccacgctggccccaacaacaatggcaacctccagagctcgcccgacaggcacagccagcaccgcttccaaagagccgctgaccacgagcctggcgccaacactcacgagcgagctgtccacctctcaggccgagaccagcacgcccaggacagagacgacaatgagccccttgactaacaccaccaccagccagggcacgacccgctgtcaaccgaagtgtgagtggacagagtggtttgacgtggacttcccaacctcaggggttgcaggcggggacatggaaacttttgaaaacatcagggctgctgggggcaagatgtgctgggcaccaaagagcatagagtgccgggcggagaactaccccgaggtaagcatcgaccaggtcgggcaggtgctgacctgcagcctggagacggggctgacctgcaagaacgaagaccagacaggcaggttcaacatgtgcttcaactacaacgtgcgtgtgctttgctgtgacgactacagccactgccccagtaccccagccaccagctccacggccacgccctcctcaactccggggacgacctggatcctcacaaagccgaccacaacagccactacgactgcgtccactggatccacggccaccccgacctccaccctgagaacagctccccctcccaaagtgctgaccaccacggccaccacacccacagtcaccagctccaaagccactccctcctccagtccagggactgcaaccgcccttccagcactgagaagcacagccaccacacccacagctaccagcgttacacccatcccctcttcctccctgggcaccacctggacccgcctatcacagaccaccacacccacggccaccatgtccacagccacaccctcctccactccagagactgcccacacctccacagtgcttaccgccacggccaccacaactggggccaccggctctgtggccaccccctcctccaccccaggaacagctcacactaccaaagtgccaactaccacaaccacgggcttcacagccaccccctcctccagcccagggacggcactcacgcctccagtgtggatcagcacaaccaccacacccacaaccagaggctccacggtgaccccctcctccatcccggggaccacccacaccgccacagtgctgaccaccaccaccacaactgtggccactggttctatggcaacaccctcctctagcacacagaccagtggtactcccccatcactgaccaccacggccactacgatcacggccaccggctccaccaccaacccctcctcaactcctgggacaactcccatccccccagtgctgaccaccaccgccaccacacctgcagccaccagcaacacagtgactccctcctctgccctagggaccacccacacacccccagtgccgaacaccatggccaccacacacgggcgatccctgccccccagcagtccccacacggtgcgcacagcctggacttcggccacctcgggcatcttgggcaccacccacatcacagagccttccacggtgacttcccacaccctagcagcaaccaccggtaccacccagcactcgactccagccctttccagccctcaccctagcagcagaaccaccgagtcacccccttctccagggacgaccaccccgggccacaccacggccacctccaggaccacagccacggccacacccagcaagacccgcacctcgaccctgctgcccagcagccccacatcggcccccataaccacggtggtgaccatgggctgtgagccccagtgtgcctggtcagagtggctggactacagctaccccatgccggggccctctggcggggactttgacacctactccaacatccgtgcggccggaggggccgtctgtgagcagcccctgggcctcgagtgccgtgcccaggcccagcctgg

SEQ ID NO: 6423 - DNA, 2300 bp, Homo sapien
cagcccctgggcctcgagtgccgtgcccaggcccagcctggtgtccccctgggggagttgggccaggtcgtggaatgcagcctggactttggcctggtctgcaggaaccgtgagcaggtggggaagttcaagatgtgcttcaactatgaaatccgtgtgttctgctgcaactacggccactgccccagcaccccggccaccagctctacggccatgccctcctccactccggggacgacctggatcctcacagagctgaccacaacagccactacgactgcatccactggatccacggccaccccgtcctccaccccgggaacagctccccctcccaaagtgctgaccagcccggccaccacacccacagccaccagttccaaagccacttcctcctccagtccaaggactgcaaccacccttccagtgctgacaagcacagccaccaaatccacagctaccagcgttacacccatcccctcctccacccttgggaccaccgggaccctcccagaacagaccaccacacccgtggccaccatgtccacaatccacccctcctccactccggagaccacccacacctccacagtgctgaccacgaaggccaccacgacaagggccaccagttccacgtccaccccctcctccactccggggacgacctggatcctcacagagctgaccacagcagccactacaactgcagccactggccccacggccaccccgtcctccaccccagggaccacctggatcctcacagagctgaccacaacagccactacgactgcgtccactggatccacggccaccccgtcctccaccccagggaccacctggatcctcacagagccgagcactacagccaccgtgacggtgcccaccggatccacggccaccgcctcctccacccaggcaactgctggcaccccacatgtgagcaccacggccacgacacccacagtcaccagctccaaagccactccctcctccagtccagggactgcaactgcccttccagcactgagaagcacagccaccacacccacagctaccagctttacagccatcccctcctcctccctgggcaccacctggacccgcctatcacagaccaccacacccacggccaccatgtccacagccacaccctcctccactccagagactgtccacacctccacagtgcttaccgccacggccaccacaaccggggccaccggctctgtggccaccccctcctccaccccaggaacagctcacactaccaaagtgccgactaccacaaccacgggcttcacagccaccccctcctccagcccagggacggcactcacgcctccagtgtggatcagcacaaccaccacacccacaaccaccacacccacaaccagtggctccacggtgaccccctcctccatcccggggaccacccacaccgccagagtgctgaccaccaccaccacaactgtggccactggttctatggcaacaccctcctctagcacacagaccagtggtactcccccatcactgaccaccacggccactacgatcacggccaccggctccaccaccaacccctcctcaactccagggacaacacccatcaccccagtgctgaccagcacggccaccacacccgcagccaccagctccaaagccacttcctcctccagtccaaggactgcaaccacccttccagtgctgacaagcacagccacaaaatccacagctaccagctttacacccatcccctcctccaccctgtggaccacgtggaccgtcccagcacagaccaccacacccatgtccaccatgtccacaatccacacctcctctactccagagaccacccacacctccacagtgctgaccaccacagccaccatgacaagggccaccaattccacggccacaccctcctccactctggggacgacccggatcctcactgagctgaccacaacagccactacaactgcagccactggatccacggccaccctgtcctccaccccagggaccacctggatcctcacagagccgagcactatagccaccgtgatggtgcccaccggttccacggccaccgcctcctccactctgggaacagctcacacccccaaagtggtgaccaccatggccactatgcccacagccactgcctccacggttcccagctcgtccaccgtggggaccacccgcacccctgcagtgctccccagcagcctgccaaccttcagcgtgtccactgtgtcctcctcagtcctcaccaccctgagacccactggctt

SEQ ID NO: 6424 - DNA, 2300 bp, Homo sapien
ttttctttggtgcttttatttgtcctacattttcttattttttttctctcattgccttttgaatttattaaatggagttttaaaaaattcagttgttttatctcaagtacatacacactgtgctgggaaagtacaggggctcccctggaaatggtaacatgcacttatcagcttctgccatgagggagtctctgagtgaactctggctccggaggctgcccggctaaagaataaataaagaagaagttaatcattgtctgtgccacctccggatccacgcggagacctcggccgccccgtcctggcgcgggtgctgctgtgccttgtgtgggtgctacctccccttggggctcccgcaggaatgtgttacttctctcgagtcagcgcttgtttagatttccttctgtgtttctcttttcttatcccttctggtgtctcgggccttccatttggggtcactttcctttagcttcaggttcatctagaattttccttgctggcaaacttgatttttgcttgtacatgccttttctctgtgtcctgacagctatttttgtgtgtgtggaactccaggtgggcggtactccaggtggacagtactcccggtggacggtcacttgtcctcagtgcctcgaaggtgggaccccgccctctcctggctcctggagtggctgctgagcagcccgggagtggatgtcccttcctccggctttccttcgtttttggccctctgtttgctgccttctgaatacgctgcttctggcctgcctcccagttcacttgaggtctttttttttttttttttttttacatggaggctcgctctgtagcccaggctggagtgcagtggcacaatctcaactcactgcaacctcttcctcccaggttcaagcgattttcctgcctcagactcccgagtagctgggattacaggcgtccaccaccacgcccagctaatttttgtatttttagtagagatggggtttcaccatgttggccaggctgttctcgaactcctggtctcaagtgatccgcccacctcagcctcccaaagttttgggattacaggcgtgagccactgcacccggccctaacctctgttcatctgggcctctaacactgtcccttgacctgcccgacaggcccctggttaggcctgctgtgcaagtgtttcctgtccctgagtcactgtctccagatcctgcgggccctgccctggcaccgtgctggtgaggcctgccttgctgccctgtgggaagtgcagcgtgcccctgccacccggccttgccctgtttctttgcacagcgcctcctgccgttagcatacagcataactcatgatgcttcccgtttgtcttcttccactcacgtgtaagcatcccaggagcaggggtgccccagcacctcaccatggaagcctcaggcacacagtgacacgcagaggctgccgcagcgcgcgccctgtgcccggcgcccagggcctgccacgtcacatgccgtccctctctggatctctgtccgcccttggcctgctgcttgactggcttttgtttcatctgaatgagaaggggttttccgcctctgccttgcttgaccgtcccagcacttaggatgcaaggctgcctgcagtggagttcctggcagagaccccatttaaagtcgcttgttctgtagtcagcttttataatctatgcttattctcattctgtcctgtactcttccctttcaccgctcttcagcttacacgggttcgtttcaatactgtcatctcccagcttcccttacacaaattctagtgtttgctttgagactttagcagagccagggaacctcccggcatgttggctttgaagcgcctgttgtgttttgtataattaaaggaagaggggagggggtgataggaagagggaaggaaagccctgtctgaggaaggccccggaaggggagacaaggcacggcgaatgagtgctcagcgagggctcctgggagggggctgctgagcggccgtgggaggaggatgtgggaactggggacaaagtcaccactgcccgtccacactggcgtgggagctgccttgccaagagcagttgcatgaaatgccacttatttgctcaagggttgtttattgaacatgccagtgccaggagactggcgtggagcatgaggccgaggctggctggagtgggttttggggagtgtcaggaggctggtgtggagcgtgaggccgaggctggctggagtgccaggggctgcagggtcaggtactggtccagcttttggatgctggtgctgtgaagggtg

SEQ ID NO: 6425 - DNA, 2300 bp, Homo sapien
gagtctcctgttaggcagaaaggagcacttggctgccacggcaacttgcggggactcactgtggtggagtaaagatgaagaggtagagacgctgccatcagaggccgtccaggacctctgccgacccgtaggctccacacctgagtctcataagtgtcaggaggtttccttcaaagtcctcagaaaaagcagctatgcccaaaacctggggcttcattctaaactcagaaaaaatgttctacctgaagaattatctcctcgggagaaacaccaggacttgtggatacagtgttaagggtggggagccctggtgacccctccaccacgtccagtactgggctgcgcgagggcagggaccttggagcatcgtgaaaaaggactttttccacccacggcatgttcagagccactgttgataaaaactgtaccgctcacgacagcctgccccagcccagcctcagtgagtgacacggtttgaatctgtgtccccgccaaatctcacgctgaattatgatccccaatgttggaggtggggcctggcagggtgggtgtgtgggtcacagggacagatccctcgtggcttggtgctgtcccggtgatagtgagttctcacaagatctggtcattacagtgtgtggcacctccccacccccaactctcttgctgctttcgccatgtgacgtgtaagctcccacttggccttccgccatgactgggagcttccagaggcctccccaggagcagatgccggcaccatgctacctgtacagcctgcagaaccgggagccaattaaatctcttttcttacaaattacccagtctcggtattcctttacagcaatgcaagaaggccctaacagtgagccaggaggccactcacgccaggagcccatcatctctgagtcagtctacaccagctctcctgcaatattaatgctatagaagaaactgccaggcaactctcaggagagaattcagagcaggaaaggttctctgaagttcctggcgcctatcctctcatttgcaaatgaagaaactgaggttttgcacggtggccactaaccggggacacaattgggcccaagaagtggtcaccactgccctcactctgtgtaaatgagaaagaggaaacagccatcatctatgggaccaactagagtgcaggcccgcctccacctggggggccatcagggtgcgggacccgcctccacctgggggggccatcagggtgcggggcccgcctccatctagggtgccatcagggtgcgggacccgcctccacctggggggccatcagggagcagggcccgcatccatctaggggaccattagggttcagggcccgcctccacctgggggaccattagggtgcggggccctcctccattcgggagtcagagctcggggccgcctccatctgggcaccgggccctcctccatctggagaccattggggagcggggcctgcctccctctggggcaccatggggcacggggcccgcctccatctggggctcacaacgggcgcaggccccctcccccggggctgcctccccaaagctctgccccggcacggcggtgagctcaagcctcctgcagcgtgggcgcgtccgtccggcccgccccgccccgaggtgtggacgccgccgctcccctccggccggccaggcgccccgcgtgccccgggagagccgcggagtcggcccgccagccgcagctgagcagtagccctgacccaaggccccgcccgcaaccgcaggtcaccgcccccgcccgaccctcgcccggctgcctcaccggcccgcgctgagtgctgacggtggtcgccatggtgctgcggcggcccccgtggctcgccgacccgacagtgacgcgccgggcgacctcctgcgcccccgccggagcctgcgacggagacagttgtcacctcgaggccgccgccgccacagtcagctgacagccgccgcgccccgcccccggcaccgccccactgcgcaggcgccgcgccaggcaccgccccttccggctctcgcgcgcacgcgcgctccagggtagggcaggcgcagcctctcgcccggcgcctgcgcacctgctctctcctcgagccctgcagcccggcgaaatggctcccggcggggccgtttgcgcatgcccagtcatgacggttgtcggcgcgggccctagcgtggcggcgctgcagtctgggcagtgggttggttcctcctcggtcctctgtcgagtggcgacagggcctagccacctggcgggggtgaccttcggacgtgcgacccgctcggaga

SEQ ID NO: 6426 - DNA, 2300 bp, Homo sapien
accttacaacctgtccaccccataggggaataatattaaggcaagagctgaatctagtgtttagcggaggtcctggtgggagatacagattttaggatcatcagcatatggatggcatttaaaggaatggaactggatgagctcactgaggatgtagatagaaaagatgtgcaaggactgagccctgaggtaaggcactccgatgttaaggagtcaaagtgttaccagtgtgccctggcatcttgtaatctcccaggatagaaataaagagagatcagcagacatagcagcgaggagaaagagaaatctttatttagcttgtgcacaaggaagtcagcaccatgaaaggaaaacggtggggggccccgccgccagggggtggcacgtgggttagtttcacagggaagggattggtccaggcatggataggaggggtttgtctagtgcttctcagtagctttgcatgcttcttcatgcattgcatgcaacattcacattttaaatctctacccctaggtgtgatttttagcgtgaaaatgaggaaggggtaacaatagttgaagtataagtctaactgcacatgtggggcccggggaagtccctaggcccccaaagcaggaacttgtggttaatagcttcttgggtcttgtgctgtggattggctggatgttaagctacaacttgaggaaggggctttcgttctttttctctacaccccatcaaaacaggcaagcggccaggctgccggttttaaaaggagagactggtaaccgagacccaaagatgtggtctttgggataagaggaaagtgagagcacatggtgtcctggatggggagtgaagaaagcatgtgtagcaagaatgactatcgattttgctgtagttcccggaggacgaggactgagaactgaccactaacaatatagagatcactgacaaagagtttttagtggagtggttgtgttaccggaaaagggtcctgatccagaccccaaaagaggattcgtggatcttgtggaagaaagaattccaggccagtccacagagtaaagtgaaagcaagtttattaaggcagtgaaggaataaaagaatggctactccatagagcagggtgttcccaaaagcacgaggaggaaggcgtccacctgggtacgcttgtttatatgtaagataaaagccaaaaaacatcacgggggagacgtgctgtactacctgggctcgtcaaaggattgccaatctttgcataacgcctgtcctccgcaagcatctgtatcattatctttaaagcgaaacttcaactaagaatgcttcttgttcttaagatacccggacatcgggacctaagttccgggtctgctgcgtaaaagtttattaacctgttcccgtgaccgtaaacgcccgactcctggggatgcagccagcggggttcagcctcagtttacccagcgctgttcgagctggagtcgctctggttggagcgcctgaccgcgagggccgaggtcaggccggactggggttctccggagcgagcaggagaggagcggggctcctgcggagcggcgcggcggggaggccgagggcagggcgggctcgagctcgggctcttctggcagcgcctccatccccgttccgttcacccggcagccgccccgtggaggaaccgcgccccatctttagccctgtgaaacagaaaggcccttcctccggcaggcagctgagggaaagatcgccctgcaggggatgtcgggcctgtcactgctttgttgcgggccacagttccctcccttctccgagcgggtcgcacgtccgaaggtcacccccgccaggtggctaggccctgtcgccactcgacagaggaccgaggaggaaccaacccactgcccagactgcagcgccgccacgctagggcccgcgccgacaaccgtcatgactgggcatgcgcaaacggccccgccgggagccatttcgccgggctgcagggctcgaggagagagcaggtgcgcaggcgccgggcgagaggctgcgcctgccctaccctggagcgcgcgtgcgcgcgagagccggaaggggcggtgcctggcgcggcgcctgcgcagtggggcggtgccgggggcggggcgcggcggctgtcagctgactgtggcggcggcggcctcgaggtgacaactgtctccgtcgcaggctccggcgggggcgcaggaggtcgcccggcgcgtcactgtcgggtcggcgagccacgggggccgccgcagcaccatggcgaccaccgtcagcactcagcgcgggccggtgaggcagcc

SEQ ID NO: 6427 - DNA, 2300 bp, Homo sapien
cttgcgcccggaggacaggcagggagccagaagagaggccccagactgagccccagaggccaccaatggcataggctgctcagacacagacagggaagaaaaggcctcagggctgcagtgagggttgggagagggatgcaggctggcaaggaggtgggaaggaagaaagcaagaattttggccactggagtagccggatgcaaacggtcaatagggcaaaatgctgctgaggatgtcacaaaggtgcgtctgactctgctgcagcctgggaggccaggtgaccatggcagcagagagagggcatctcaggtcaagtgcccctgccctctggctgtggcctgacgccctctcctggtctcctgcacaccctcggcctctgttggcacctggaccagaccactcccagtcagcctccagccagacctcactgcttgacagtttctccagctggaggtcccagtctacattcagctaaaaatgtctgctgtccccactcacagcagcagcagcgggggaaaggggagtgccctctgcctctgtcccatgctctcagcccccctcccctgcccccactggtggggccctgattgctcatgctcagaggccccagaattgggtagggaggacccttagtccacagcatttgaagggaagcagggcgggcgggtgcaggccgagagtggacaggtgctttggggcccactcccctccccagctggaaatacagacagcccaaagagcaggagggcgcactgggaagaccccgcagtttcctgagctcatacgggcttaccagcgtggggagcggaccacggtcagcagcagtgtgtggcagagcccgcaggggaaacgttgcccgcagaccatacacgggcaagatctgggacccccacttctgcagcgttccgggtctccctcacctctcccctcccaccaccttctgcagcacgggcttaaggaaataccagtgtttttctgcaaagaaacagagggtccgtccaggtctggctgcctcttcggctgcctgtgtttagacctccaaaggctgctcccggcaacccctgcccagctgctcaacctgaaagaggggtcggtagcaagggccgggaggcgccagggcgctgcggccggatcccaggtgagttccttgactccgcgccgcgcaggtcactgtggcataactgggaaaaccgccgcttctccctcgggagcggaggcggagggccacgtcctccctgggggtgcacaatctctgcttggacaacgcccgcgtgcagtagccccacagactcccatgcagcccccccgccacgtgtgccgcatccgcgccctgcatgcaacacccgccccctccagcgcagcatgcccctcgctggcgtgcagcaccccccatgtgtgcagcacccctgccccgaatacagcacctctccccagtacagcactcccgccccgcatgcaacactcgcccccctccagggcagcatccccatcccccgcgcgtgcagcaccccctcgaggggcgggaaactctttgggacacccggggtcacgccctgcagggtaaaacccccgtccagggcagccatctgcaccccctcgccatgggcccactgcctgctccgtcccgggatgcgccttaatggcgggtcgggcggcagcgggagctctgctgcctggtgggaccggacgtggcagccggcgggctggaggctcccaggtcccggcctcgccctggcctcgcctcgccccctagagtctccccgagcgctcgtagcggcggggcggggtggggaggcgctgattggccggcgcgggcaccgcttgccgccgccacggcatcccgctgcgttcgtacaggctcgtgtcgactcggctccgttgcgcggcccggctcggctcccctcagctgcgctcgactccgctgttcggctcggctgttcggcttggctacagggctcggctgttcggcttggctacatggctcggctgcgcggctcggctctgttcggctcggctcggctgctgggctcggctgttcggctcagctgcgcggctcggctcgtctcggctctgttcggctcggctcggctgctgggctcggctgttcggctcagctgcacggctcggctcggctcggctcggctcggctgcgcggccgctgacgggcgtgcgctgggggcgcggggcgcggggcgcgggcctcggcggcggcggcggcggcggcggcggaagccaggtgcccccgcccgccctgtcctctcgacgaggcggaggcgtcgccgcgggccaggcctcggact

SEQ ID NO: 6428 - DNA, 2300 bp, Homo sapien
ggagtccagggtcccaggtcaccatccaccttagaagtccagcgtccagccccagggcagcagccacgggagaactggggagaaggctgtatggggtgggggtcttcacacagcggccaccaggctgggggtatcctgaggtcaaagcctgtgccacgtccccccatcttcccaggagacacctgagtgctatggccactccttgtcaggtccagggcctggaccctcaaggacacccctgtggctgccatcctgacaggcggaattcatcgcagaccctcaacctgatggcacaggtcagggttcacgtcggaaccctccccgctggtccttactagatctgagagtgagtcaggtggggtgtgtgtgtgtgcacatctgcctgtgcaggggtatgtgtgtgcacgtctgcctgtgcaggggtgtgtgtgtgtgtttggctgtgcaagggtgtgtgtttgcctgtgctggtgtgtgtgtgtgtgtgtgtgtggctgtgctggggtgtgtgtgcatatctgcctgtacaggggtgtgtatgtctgccttatggaggtttatgtgtgtctgcctgtgcaagggtgtgtgtgtgtatgtatctgtatacaggtgtttgcctgtgcaggtgtgtgtgtgtgtgtgtgtatgtctgtgcaggggtgtgcatatgtgtctgcctatgcagggatgtatgtgtgtctgcctgtacagggatgtgtgtgtatgtgtgtgcctgtgtaagggtgtgtgtacacacatctgtgtgtgccgtctgaccctggaggcatgggcctggctttcctcagggcctgcatttccctctctgtttctctgccccgccccagccatccccttcaccccttgcagcctggagctgggggagtcagggagaggctggggctgcagacggggcagctggcatcctcatgctcccgtgcccgcctcttctccctgtgctcagtcgtgctgcttgggccgtgggagtggagctccttcgcacaggtgttagtcatctgtgtttccttagcgatttacctgtccttggctcatttaaaacagttggagtgttggtggttttgtaacgaactggtcagagcaccttccgtgagaagggccttttcccccagttcaccggggctcccctgctcagggtgtgccgggggctttgagtcacttctgtgtctccttggaggctgtgtggcgtccgcggaagttggtgtctgtgcggtgtggttctgtttatgggtgttgtagagaaggcgccgtccagagacagagccactgctgaggtgggtggggggtgtatgaagggcacaaggacgctttgggggtgtcaggtatgatggccctcaggtcatggtttcacacgcgtgtgctttaaatgcgtgctggctgtcacgtgtcagtcgtgcctccacagagcttcaggaaccaccgagatggggagcctgccggagacacaggttttctgagcgcaccagcggctccaaaagcagagggaagagccctgcgtgcaggtggggcgctcatggcgtcggcctcgcagagcggtgacggacacagagtccgtgtttgggggggtttgggacgtcggcctcgcagagcggtgacggtcgcagagtctgtgttttggggggtttgtgacgagtccgtgtttgggggggtttgtgacgtcggcctcgcagagcggtgacggtcgcagagtctgtgttttggggggtttgtgacgagtctgtgtttgggggggtttgtgacgtcggcctcgcagagcggtgacggtcgcagagtctgtgttttggggggtttgtgacgagttcgtgtttgggggggtttgtgacgtcggcctcgcagagtggtgacggacacagagtccgtgtttgggggggtttgtgacgtcggcctcgcagagcggtgacagttgcagagtccgtgtttgggggggtttgtgacgtcggcctcgcagagcggtgacagttgcagagtccgtgtttgggggggtttgtgacgtcggcctcgcagagcggtgacggtcgcagagtccgtgtttgggggggtttgtgacgtcggcctcgcagagcggtgacagttgcagagtccgtgtttgggggcgccgtgaaagcacccagcgtagtcatgctgctgtgtgcgatgggtgctgggcccgcagacttcggtgcttcaaaggcctcactgctgagcacgagacgccgcttttgatgtcgtcaggctctctggtccccgggagtggactcgggggctccgagtgcagggctcacactgtgtctttgagggctggtcac

SEQ ID NO: 6429 - DNA, 2300 bp, Homo sapien
agggatgtgtgtgtatgtgtgtgcctgtgtaagggtgtgtgtacacacatctgtgtgtgccgtctgaccctggaggcatgggcctggctttcctcagggcctgcatttccctctctgtttctctgccccgccccagccatccccttcaccccttgcagcctggagctgggggagtcagggagaggctggggctgcagacggggcagctggcatcctcatgctcccgtgcccgcctcttctccctgtgctcagtcgtgctgcttgggccgtgggagtggagctccttcgcacaggtgttagtcatctgtgtttccttagcgatttacctgtccttggctcatttaaaacagttggagtgttggtggttttgtaacgaactggtcagagcaccttccgtgagaagggccttttcccccagttcaccggggctcccctgctcagggtgtgccgggggctttgagtcacttctgtgtctccttggaggctgtgtggcgtccgcggaagttggtgtctgtgcggtgtggttctgtttatgggtgttgtagagaaggcgccgtccagagacagagccactgctgaggtgggtggggggtgtatgaagggcacaaggacgctttgggggtgtcaggtatgatggccctcaggtcatggtttcacacgcgtgtgctttaaatgcgtgctggctgtcacgtgtcagtcgtgcctccacagagcttcaggaaccaccgagatggggagcctgccggagacacaggttttctgagcgcaccagcggctccaaaagcagagggaagagccctgcgtgcaggtggggcgctcatggcgtcggcctcgcagagcggtgacggacacagagtccgtgtttgggggggtttgggacgtcggcctcgcagagcggtgacggtcgcagagtctgtgttttggggggtttgtgacgagtccgtgtttgggggggtttgtgacgtcggcctcgcagagcggtgacggtcgcagagtctgtgttttggggggtttgtgacgagtctgtgtttgggggggtttgtgacgtcggcctcgcagagcggtgacggtcgcagagtctgtgttttggggggtttgtgacgagttcgtgtttgggggggtttgtgacgtcggcctcgcagagtggtgacggacacagagtccgtgtttgggggggtttgtgacgtcggcctcgcagagcggtgacagttgcagagtccgtgtttgggggggtttgtgacgtcggcctcgcagagcggtgacagttgcagagtccgtgtttgggggggtttgtgacgtcggcctcgcagagcggtgacggtcgcagagtccgtgtttgggggggtttgtgacgtcggcctcgcagagcggtgacagttgcagagtccgtgtttgggggcgccgtgaaagcacccagcgtagtcatgctgctgtgtgcgatgggtgctgggcccgcagacttcggtgcttcaaaggcctcactgctgagcacgagacgccgcttttgatgtcgtcaggctctctggtccccgggagtggactcgggggctccgagtgcagggctcacactgtgtctttgagggctggtcacccacccaggcacacctgtggccctgagtcagcactgcctgacgcccaccctcaggagcccccgcctgcctagggtgggaccatgggggaggctggtcctccattctcaggggctgggggacaccccttctggttgagaaggccacaggtggcccccccgccacccggcaggcacagcagggcaccaccgagaccactgtggcctgaggaggagcttcagcagccacttggtaggagggccttcgacggcccttttgtgcagaaggtgggtgttccccagtctcagaggccagggcccttgctggctggggtgggggctccagcccagggccccgctgaggggggcaggagcaggggcggagagaacagccgtgcgtctgccttttctgctcccatcaccatggcaacagatggagatttggcaggaaggaggagggggcgggctttggaggaggcagcccaggtttggagaccagctggggatcctcaggggcctagggtgggggctccagtctcaggctggctagttcctccttcctggtcactgagccagccttgctgaggggagagcgggttctggacgtgctctgagcttccttcctcacagccttgctcctgggccagatcagcaggaaagcagccagtgccccgccatggcctgcccgggtggggtcctgaagctggggccggagcagggggcacagttctgc

SEQ ID NO: 6430 - DNA, 2300 bp, Homo sapien
gtgcctgtgccactgaggaccacagggtgtgagggccagagcaggcagggcagagtcccgaggctaccccatgcaccgagccttggccccagcacccgccacactcagcctgtgggttccaaaccctccctggcggctgtgcccccagaaccatcccttcacctgtccctccaccctcaccccaccccaccccaacccaggctccttgaagactcatttgaggtccacccccaggagcccagatggtttgagatccaccatagtcagggctcctctcagctgcccccccagccagcaagaggatgggggcggcctgcagagaggctgggccaggaggcggctgtgggaggccctgggatgaggaggggcggcgggcagccacagctgggcgcactggtggccccgtctcctgcaggtacctggtgctagaacacgtgtcaggtggtgagctcttcgactacctggtgaagaaggggaggctgacgcctaaggaggctcggaagttcttccggcagatcatctctgcgctggacttctgccacagccactccatatggtgaggccccacccctggtgccccccactccccagggacccccacacccagtgcgctaccacagatgccccctgtgccccaaggactacaccccctatggtgctattccgaggtacaccatgccccccattagctgcccctcaagtgcaccatctcctcctccccattagctgcccctcaagtgcactgtcccctccattagctacccctcaagtgcaccgtccccccattagctgcccctcaagtgcaccgtccccccatagcggcccctcaagtgcaccatcccccccattaactacccctcaagtgcaccgtcccccccattagcggcccctcaagtgcaccctcccccccattagctgcccctcaagtgcaccatcccccccattaactacccctcaagtgcaccatcccccccattagcggcccctcaagtgcaccgtgccccccattagctgcccctcaagtgcactgtccccccatagtggcccctcaggtgcaccgtcccccccattagctactcctcaagtgcaccatcccctcccccccattagctacccctcaagtgcaccgtccaccccattagctacccctcaagtgcaccgtccaccccattagctacccctcaagtgcaccgtccccccattagctacccctcaagtgcaccatccccctcattagctacccctcaggtgcatcatcccctcctcattagctgcccctcaagtgcaccatcccccccattagctgcccctcaagtgcactgtccccccatagtggcccctcaggtgcaccgtcccccccattagctactcctcaagtgcaccatcccctcccccccattagctacccctcaagtgcaccgtccaccccattagctacccctcaagtgcaccgtccaccccattagctacccctcaagtgcaccgtccccccattagctacccctcaagtgcaccatccccctcattagctacccctcaggtgcatcatcccctcctcattagctgcccctcaagtgcaccgtcccccccattagctacccctcaagtgcactgtcccccccaccccattagctacctctcaagtgcaccatgtgcaccaggtgcttcccttttccccctgaggaccccctgcacctcccctttcccgagtgggcagtgtgtcgggaagttttctgcctggcacccacccaagcactctgggagcccctcggcctttccaggggccattgcttgcatccctacgtgcctgggggccctaggttggtctaggccagagcaggtgtgctagggagcaggagggggcaggaaggagcctgccagggtgcaggagggcatggcaggagaaacagggatgcctgaccaaaggccagagccaaacggaccaggcaggcgacttctgattggctgcctatgacatcaccaggctgggctgctattggcccttatgtgtgattggcgtttggagaggcagtgggctctgggcagggggtctccagggcggggaggcgctcaaggcagagactggccctgttcagcctcaccaccctcctccccagccacagggatctgaaacctgaaaacctcctgctggacgagaagaacaacatccgcatcgcagactttggcatggcgtccctgcaggttggcgacagcctgttggagaccagctgtgggtacgtggccctctgccctggagagaggctgggggacaggctgggctgggggaagaggagccagtg

SEQ ID NO: 6431 - DNA, 2300 bp, Homo sapien
gcgcctcttctgtcttcctcgtgcccagtcacgagctctgggcgggctcgacaggaaccacaggtccagggcctcactggtggctgctgcccccatgagggctgtccgcgctcccagctcagccctgaaagctctgggtccagttccagccctgggtgtcatcctggcccagacaggctgggttgtgcatggggtccccgtcgcctccctgccccttggctgtgtctggtgagggagttggagggtcgtcaccgtggggaccagcccccgggtgtccgggagccaggtgtgtggccagcgtggcactctccacggtccggggcctgggccgtggtgtggactagcgaggcccctcgtggccggctggcggtgggcaggcctggtgggtagtgcaggccgggcttttactcttctctgtcctcttctcttcggcggctgcctcggcccctccctgcatttccttcctccaaggatggcagctgccactgtctgggcacgtgggcgccggctcgtccgtgcagtgtggtggaacgacgcacagccgtcctggtccctgcacgggggtggcggccacacaccggagtctcagccgggcacgccgggccagggcctccctcctgctgtgtgcaggtctcaggctgagtagggcagtggtgggacaaggccccaccgtccctgccagcagctgccccagcctggccctgcccaggccctcctggttgtggacaagggaagggccggccgctgacccaggcatccctcacgggcatctagggacatggaggaccaggctgcaggccctgtgagagctcagccagggggggcttggcaggtgggaggctggagccagcacgaggcctggagcagaaggggctgcatacaggaagctcccgtctgtcccctcgtccttccgtccacccccacgctggatggtcctttgccgcggctgtctgatgccgtatcctgtgctgtgcctgggctgctggcatggggtggcccccacacgtgggctctgatgggggccccagtggggctgggcacagccaggcgccctgggccctcctgaattgacagggtgtgcagcaggacccagggcctcgaggctcttggcccgggctccaggcctcctggagggtttacctggggggagcagagcccagcacctgctgctccactgccccctggctgagcagtggccctgtaccttgtgacctccaggtctcggtccatcagcggtgcctcctcaggcctttccaccagcccactcagcagcccccgggtgagtgaccccccgcccccacccagctcggatgcacagaggccccaaccctcccagtcagcgtgtgccagggtgggggcagcctcgcggaccctgggaagcagccccaggcgccccccatgcccacgctcctgtggcggctgctgctctgtggcgcaggctgctctgctaactgcacgctcttttgttttgttttgtttgttttcttgtgtgtcacttcttttcttttgtggctaatcctcctgcccatgcctgcctgcctccccaccctcccgctcccgcctgtttctttctggtcctcctgtgccgtgtgcatgcgggggactggggtgcatgtgccgcgcggctgcccccaccccgctcgctccctgcgcctccccgtagcctattaggaagcttgtcctgcccccaccgccccccgagccgcccttcgtggcccgccccctggccacctccacggagcccgaagcttgtgggagcgcctcgaggcctggacacgtcctccctctgcaggccgccctgcggcccgaccccaagacccagaccttgccgtgcaaggccaagctgaccgacaagcctctgcagggcaccaagtccaaccccttcccggccagcaccccagcccggcctcccgccactggcctttgtccccagctggcaccacccctgggcccgcctgccctgcgggtgcccccccggcccccacccgccgggattgaaccaaacaccaaatctgtccccaccatacaggtgacccctcacccctcaccaaggggcagtcccctccccacccccaaggggacacctgtccacacgccaaaggagagcccggctggcacgcccaaccccacgcccccgtccagccccagcgtcggaggggtgccctggagggcgcggctcaactccatcaagaacagctttctgggctcaccccgcttccaccgccggaaactgcaaggtgagtgtctgcccggaggcgccagagtggggctgggagagagcagaggctgccttggggagg

SEQ ID NO: 6432 - DNA, 2300 bp, Homo sapien
ggtcgctcaggtctcaaggagaaagcagcccgtgttaagaacaaaggggcagcaggcctggtgggaacacgtgtgcaggggcggagcggagcagccaagccgaggtctggccccgccgcctttctgagccgtgagaggtgccactgcagagactctacagcgcccaggtgctgagatgccctgggggccgctgtgactggtgtctggacaaagatgtccccagagagaccccttcccagcgcccaggccctctccctcctctccacgatggcctcagtcactgggcagtgtctcggagaccaggcgactggcggtgtacacatatgagcctgcagcgtgaccccaggccaggcagcggcagagagcggcggtcaggctggagtcacttcacaggagaccccgggaaatgaagatgtggccagctgtggactgagtaagacgagaaccttcgtcctgctgctggctttaaaccaggggcccctgtggaaactgctcagtgctaagccccaggagcagcatctgcagcctgtgccaggattccacccagtggcctttctgcgccgatcaggtggcccttccagctgggtgcccaggtcggaggtgtgtaggtattgtcgcaagcccagatgcacagggctcagcagacttgggaaccttccgcctaggccctgacattgccgtttctgctgctaccaaaagctttcatgaacagactcataattatcttcctcagagaaggtggaaaacatcaaagccgagaaggtggctttgatgccactgtggctgcctgcgcttctcccctcccccatcttgagatggcctggaggccctgacccctctcaagggtccggcacggatgcctcccacagccccacccaagggcccggcacagacaccccttcccaagggtccagcacagatgcctcctacagctccacccaagggcccggcacagatgcctgcgacagccgttcccgagggtccagcacagacacctcccacagccccacccaagggcccggcacagatgcctgtgacagcccttattgagggtcctgcacagacgccttggacgagggtccagcacggatgcctcccacagtccctctttggcgacaactcgcttgctggggacctgagataacccccagccccagctgctgccagccccatgtcaaccaggcaccccagaggaacagcaccaagggaggcagctggcttcaggaagggatgcatgcggttgtctgggacactcagggctgatgtccttgagtctgaagtgctagctggaagcccaggcagtttccaggttgcagcctcgaggggcgttctttccccaggaagaccgaacctggcggatgcacccaccctgtgaggaagggtcccccgccagactcaacaggcgactgatttaagttcgtctcatctaaaaatagcttcatagcaacacccagactagtgtccggccaggctgtgcactgcccaccacgtgggtgctggagtcacagtgcaggcccctcacccctcgtcggcctggcctccctgggccgtcaggcatctttcacacatgggactatttttgccaaatgctgcacccctgggccgcaaagcagagagtcacgtttgtaccatctgtcctgtctcttcatcgggcagaacatcgaccatgtagaaactcacctgtgcttccagaactgccaggctgctttgtgcacttcctggctccaggccctggcatggggctggggtaaggtcagggccagtggtggccctcggagttttgaacccagaacagacagccgccgagaccggcaggacactgaggaggcgtcgaggggctgagtgagggttggacctggtccccgtgcttgtccggcaggactcccaggccgcacagtggccgaggaggcagctccaggaatgggcaagggaaaggggagttgtgaggccgctgggaggggcctcagaatcagtcgggagagggcaccactgagccccagccctgctggcccctcctcccggtccctgcctctgcctctcagcacacctggttccacctccaggcagcaacggcaggggacgccagcagagcgtgccacctctgaacagccacccaggcgcgctctgcctgagtctcgggctgtgctagaggcgcctctggccatggtcctctcacggctgggcttcctggcccccgcgctggtgggtggggttcgggtgctcttgagctggagagcagagggcctctgcatgttggggtgagcctgccagcaagacaggagtagccttctgtggcctca

SEQ ID NO: 6433 - DNA, 2300 bp, Homo sapien
gggagacgtgggtgctgccaggcgttcggggctttcccatggaagtccctctgttggtgcccgcacagccgttcctggagcagaggccatgtcctgcgcgtccccttggtcctactacctttgggccagtgcccgtccacctgccccatgggaatgagtgacccggtccaaagaaggtaggcttgcaggaggcttgtctcacagtgcactaagctccggggcccggccagccctgggtgctggggacagggtgagactgggggagcagctcggggaggcccagcctggagggcctcgtgcgtacttttcttctgtgttctaggagagcaggtgtggacgggaagaggcagggaggctgaggtgccagtgccggagtggcggctgctcactacctcctgaccacagccagagcctgggagagggaagccaggtctccaggttctgcccctgcccagccctctctgaggaccggaggtggaaggtagccccagcctggaaggctggcaagggggcaggaactgccagtagggcagcctccctgagtgggccctggggcacaccctgagagtgagcgcgctgacagctgctcctgctggcagccctgcgtgaccgaccaccaggtaactgccacctggagcttgccagttgacacagctcctaagacacagagcagggagacggcttgtagcccgcttggcagcctgggccactgcaacccacccctccaaatgggaaggccgagcccaggctgtagctgcccgggtggggtgtggtgtgctgtgctgtgagagcacagggcagggaggtgcaggcccacctgccggtggtcagggccaggcccagcgtcatggggagagccttccctgtggtggacacgctgggcatggcctggcacaggctggtgtggagtctgggtgcctcgctgtgctggggcgaggggctgcaggctacacggaagctcaccctgtctgtcccacccctgtactgtgaggaccccaagtgcccacgctgcatgtggcccatccacacctgtgcttcctcttcctcagaccccacgccctgtgctctggagagatggcagagtgggagtgccagggcccaggggccctgcccctgcccctccctgcccctgcccctgcccctccctgcccctgcccctgcccctgcccctgctcctgcccctgctccctgcctggctctggctactcccagcactgcccccagaggcctgcgctggtctccttttaaggcgaagatctgctgtgagaagctgaaagggaaacatttccctggcattcagggagcatttttcctttctctttctcttaaataaaccattagcaacttttcaaaacaagaaagaaaaaaaataaggacagggtcaggttgccacaaagacctttggcccccatcctcatcaccctgtggcctccccaggcctggtggacaacagggatactggagctgcaggccaggctgccgcctgatgccaggggccccgtgctctcaggctggccaggaaggcaggtgccctgcacaaggcctgtggtatgttttcaccggggccaccagcggcaggggcagggacaggctggccaactcaaaagaagccaggagtgagagggtttgcttctcctttccttccaagagcactggaaaactggaaggtgggcgctgggggccctaaaccctgggcccctccctggttggaggacttggtgaggggtgaggatgccctccgtgcaggggcccgtgtggcaagtgggagcgccagcccttcttcccaggaggtgccacgcaaggcagctccactggcccctctgcggagcagcctcaccgttggtgtcccgttggtgtcctttgagcctggcagggaggcagtgtcgccccgatgggctcgggcagctccctctacacctgcgctggccacaactgaccccccgggcagaccctgggtctgatgggcgtgtagtgaccacaccgcgtctcctctcttggcaggaagtccaaagccaagcctaatggcaagaagcccgctgcggaggagaggaaggcctacctggagcctgagcacaccaaggccaggatcaccgacttccagttcaaggagctggtggtgctgccccgcgagattgaccttaacgagtggctggccagcaacagtgcgcgggggcctgggggcgggccccctccctcctccctgctcctcctcgaagcccctcctcaagggggacccccacggctggtgctcagcagccccctgccgcgaggggagaatgtggcccgtggacgggcagagc

SEQ ID NO: 6434 - DNA, 2300 bp, Homo sapien
ataagccacagagctgccgtgtgctgaccagacccactgggcacacttggtgtgctcccccaccctaccgggcaccttgtcttgactgttcccccgcccccgtgccaccctcaccactgccttgcctggaccagactaggcacgcttggtgtgctccccccaccctacccggcaccttgtcctgactgttcccccgcccccgtgccaccctcaccattgccttgcctggttgcctggcttcttgtgcccgaagcctccaccatccccagcttcctttatgctctgccctccaacccccagcagctcattctccctgtcatgggcctctgcacggccttctctgtccaggccatgcctcccgagagtgggcaggtctgcgtcatgcacctcctggtcccagccctgctactcacgggggcctccccaggcctggagcccgctcttcctgtggctccctttgccacttgggtgacctgccagcacctgtgtccctgctgttggtggagcccccgagggcagaccggcagccgtgagcacggtgcctaggtgcgtgtggcaccacagggctgtgggatggccttgccaaggcagaggaaggcctgtgggcgcatggacgtcctgagcctcaccgggctgtttgttctgtagagaccagttacgcactgctcagagcatggcttagggactggcctagtggggaaaatgaaactgcagcctgttgggcctgctgctgctgctgcttagggaggcgggggccggcctggggccatcctctgctgtggctcctggagagtgtgtctgtgctgggttggtgtgctgtctccccgtgcgcccaggctgtgtgtgtgcgtgcagtccagacaccacaactcccatgggggctggtattgatgggggtgagcctaccctggctgctttcctgatggctctgtgctccccgcagcagctggtacctcaggctgtgtcctgactcctacagggcttcacaccgacagaggtgctgggacagcttctgaggggcagtggctggagatgctggggtctcttgattggcaggaagcacaggaagtatggctcccatgcgggtgggggatgctcctgatgaccccgtgttgtcagggggctgtcactgccagtggggtccacgctgactcaggatgaggagagagcattgccctctcaggtgtttgcattttcaggatgtggtggtctcctgtgtgcagaccagccagaaggaaggccggggccgtgccgctctgtgcgcccccatggggagctgctgtgggcatttctgttgggctgggtgccctgtggtcctggctggcagcagcctcagcccagcaccgtccaggcaccgcagaagctggtcggccccttctctctccagggccatccagcaggaaagccactttgagtgcctccagctgcgtacacactgcagggcagggcggcccatctgtctgtccgtctgtccgtccctggcccgagcactgactgggctaggctgggccggacaagggagaggggagtgccatcgacctggagctcgtcagcagagttgctgcctgtgttcagaaggcctttcctgggggcttggcagcagaggaccttgaggtggagcccaggacctttctgatggatccttcttgcaggccaaggacggccctgtcccctcccttctggtcccacccccaccgcctcttctggcagcctgaggtggagcccaggacctttctgatggatccttcttgcaggccaaggacggccctgtcccctcccttctggtcccacccccaccgcctcttctggcagcctgaggtggagcccaggacctttctgatggacccttcttgcaggccaaggacggccctgtcccctcccttctggtcccacccccaccgcctcttctggcagccatgccacttggaaaaggccaattcagacgctccctcgtttcaccagccttggccagcccttgcctctggaaagggggcagctgtttgtctctgccaggcgtcccattggccagggagtgaggctggagggcccggcagcaggcatttgcgagtgctggccagccggcaccccgccccgcttctcctccccaccttcccgtcgcccactcatgctgggagaccactgcagtctccctgaagaccaagcccggcccggccagtccctgcaaagtggactctgctgcaaaatggtgcttcaggctgtcagcaaagtgctcaggtaacacctgccagcctggctgggggaggggtgtgtagcacatctgtctgccctgttcttgcccc

SEQ ID NO: 6435 - DNA, 2300 bp, Homo sapien
tctgatgacgcaaaatggaataagctacgtcctcaacgccagcaactcctgccccaagcctgacttcatctgcgagagccgcttcatgcgggtccccatcaacgacaactactgtgaaaaactgctgccctggctggacaagtccatcgagttcatcggtgagtctgcggtgggcggagggcagggacctggctagaggaaggctagagctgtgtgtggccacagacacaggaggggtccccaggaagtagccggaactgttggcagttgggcgggtggggtcccctacctgggccagggagaagctgtgcagtcttagccctcacctggcccccatggcccacctgcccagataaagccaagctctccagctgccaagtcatcgtccactgtctggctggcatctcccgctctgccaccatcgccatcgcctacatcatgaagaccatgggcatgtcctccgacgacgcctacaggtaccaccttccccagtcgcgcacttgtggctcacagcgtcgcttcccttcccccggctgcccacttgcaccagaatgaccccaccgtccaggacccgtggcaagggaggagggcctgagaccagcctggcgcacatgagctcgtgggtgcccagcgggtgcgtcaggtgggcagcctggccccggcgggcgcctgggactgagcctcctcccccgcaggttcgtgaaggacaggcgcccgtccatctcgcccaacttcaacttcctgggccagctgctggagtacgagcgcagcctgaagctgctggccgccctgcagggcgacccgggcaccccctcagggacgccggagcctccgcccagtcctgccgccggggccccgctgccacggctgccaccacctacctcagagagcgctgccacagggaatgcggctgccagggagggcggcctgagcgcgggcggggagccccccgcgccccccacgcccccggcgaccagcgcactgcagcagggcctgcgcggcctgcacctctcctcggaccgcctgcaggacactaaccgcctcaagcgctccttctccctggacatcaagtctgcctacgcccctagcaggcggcccgacggccccgggccccccgaccccggcgaggccccgaagctctgcaagctggacagcccgtcgggggccgcgctgggcctgtcctcgcccagcccggacagcccggacgccgcgcctgaggcgcgcccacggccccgccggcggccccggccccccgccggctcccccgcgcgctcccccgcgcacagcctcggcctgaacttcggcgatgcggcccggcagactccgcggcacggcctctcggccctgtcggcgcccgggctgcccggccctggccagccggccggccccggggcctgggcaccgccgctcgactccccaggcacgccgtcgcccgacgggccctggtgcttcagccccgagggcgcacagggggcgggcggggtgctgtttgcgcccttcggccgggcgggcgccccgggaccaggcggcggcagcgacctgcggcggcgggaggcagcgagggctgagccccgggacgcgcggaccggctggcccgaggagccggccccggagacgcagttcaagcgccgcagctgccagatggagttcgaggagggcatggtggaggggcgcgcgcgcggcgaggagctggccgccctgggcaagcaggcgagcttctcgggcagcgtggaggtcatcgaggtgtcctgacccctccgctgccctcggccccgccgcccgcagccaggcccgttataaatgtatattatatataatgcaaagaaaggtaaatggttttactgggatttttatcgagaagtaaatatttcgattttttatttatttaagctgttcattctggcaatgatttggcaacagtgcgggtggtcctcgagctctatttttactgtctggtatttaaactgaaacatacgtttctaagcaatacgaggccaccttcagtcgcaagctgggtgccaggcctggggcccctcccagttcccccgccccaggaaacactgctgacctttgcaaaggctgccgagctttcgtgcactttttacataacaaaaaggtgaaaaaaaggaaaaaaaaacttctttgccacaaactgagccgcagaaccccccttctccccccacccacctcccctgctccctcccttctctgcgccggcctagggctctgcaccaaagccataggatggaggagcaggagctggtgtgccccggagaggtgcggccagccctccatcagct

SEQ ID NO: 6436 - DNA, 2300 bp, Homo sapien
cagctcatcaaggaccccctgtgggtagtcagggacccccttggcaggcagagaccctccacagcaggcaggcagcaggcccttttgctgttgaacttgctgggtctggccctggagaggactcccaggcctcgttccccaccctgtggtggaggctggagcaccagcccaggaacgttatctgagtgggatcctgaggccctgctgaccaggtgccactgcaatccctggtgtcagccgtggggtcagctgaggctgcccatccacagtcaggtgtttccctggcctctggcaacaggagggatggtgggaatgcacagaagcctgggcccagtcgaggcgggaggggccaggcaggggccaagcttgaagtgtctggagaaggagagtgagtgcgaggctggggctcctgggcagggaggagctgggacctgcccctcagtgtggagttggggctgggccagggacgaggtccacaccagccttgcacctgctgctctgtgaactctctcactggcccccgccggcctgggagctgacctggagagtccagaaacggtggtggcctctgtccccagcctgctgtttgcagtgcatgggtgtcctcagggcgcctccccccagtgcctcctgtggctgtgggttgggggtctggcttgctgagggcccgctacccaccgtagcccgctttgcacagggcgcagggcccagggtacatctatctcccagccttccctcagtcctgagctgggtggagtaaacttcctgactgcctggcagctgtgggggcacagggaagatggcattgcagggacacccagtgcccatctgtgtgtgacccaggtgtgacccaggtcccaaccctgccccaagcctcggtttccccatagttaaagcaaactcatcatccttaacactatgcgcctcctaggggctgtgagtgtaaagtggacccagaggaaggccagtcctggcaggtgacagggagatggggcccggcagtggggcagtgacaggcttgtcatcaagcctgcaggaggggcttccggagactccatcctcagacatccctactccacctgcccacccggcagtctgaggcctttgcaggccatgccgagggcctggcacctgcggggtccccgacactgaccctcctcccagggctgccccgcccctcccatcctgggccctatcagcccatgaaggagcctcctagaccccaggctccgctaggggagaggcactgtgtgggtgcaacacgcccctgcaggagctgggcactcacccccagcaggcacgtggcgcacactaaacctcagcctgcaggtcaggagggcagcagtggcaaaggagccgtgcctctgtgcctgagcccctcccgcacccgcctgctatccggctgcccccgggagcccactctccagtggaggcagccccaaggccaccatccaccaggggctggattatcggcttacggagctgccctggagtcaagtctccagggattggactccctggggctgtgctagggagagaggggcaggtgtgaggacagcaagcccggaggagggcagagagcttgaccatgtgggagggtgaggtgcagtccagaccccgacttgctgggggtcctgtggtggaaaagatgcagaagtcacagcagggagatgcctgtgtcccagggatgagatggaatgttctggaatgcctaagggtccgtgaaccccagggcccacaggaaggacccctggcctcttccagccctcagacccttctctgtggggcccatttgcccccctctgccttgttgcatcctgctgagagctggccttgtgacctggacggggtctctccagagggagaagggttcccacgggcacatgttggtgtgtcctggtgggcgcagctcccagctctgatctgtcctggggagcttctgggtgccacccaggggcccgcagcactgctgaccatccccctgtccctgcaggtccagcaccatgtgctaggtcactcccagcgcgaggccacacctgggccgtcggagcagcccctcctcacttcaggggtcaccctccccagcacccattgccccaccatggctggggaccggctcccgaggaaggtgatggatgccaagaagctggccagcctgctgcggggcgggcctggggggccgctggtcatcgacagccgctccttcgtggagtacaacagctggcatgtgctcagctccgtcaacatctgctgctccaagctggtgaagcggcggctgcagcagggcaaggtgaccattg

SEQ ID NO: 6437 - DNA, 2300 bp, Homo sapien
ccaagctgcacagcaagagcactgcggagccacgctacatcctgccaccccctcctccatcccacagtgtccccgccccccatcactgcagcaccagagcccctattcccctcagcagaggccggtacaccccgcagcagggagacggaggcagattctcccagaaggggtgaccctgttggggctgggcctattgttgccccctcccctccaggccagactattaggtatccccacctggtctgctccgcatcccaggctgggcagctgggcctagcgaggtggctgcagcagcctggctgtgccagcccctcccccagcgccgcggctgcctctgcagcaggcggaagggcgcgggggctttatccctcaggggccggctgggcaccccgggatggggaggcagtgcggcctggacactggggggatggatctgcagccctcccccccgacaggggaaggccccttcccgggtgtcccaggccagaggccgtcgcgtccctcccacggccgaggctccacacctcccggaccgactccgggccagggtccgcctgctccggttctggcccccgcgggggtgacgttcgggacgtcgggggctcgcgcagatccgcgctggatctcaggcggccctggtgggtcctggatttttgtcccccccccattccacacccaaagaaggagctgcggggagaagggcggcaacgcggcgggcgggcgtgggctgggcccgggtccgccgggcgttgcggggggcggggaaggggcctccctgtccctggcgtcctggacggccgtggccgctcattccggggccgcctcctcctcccgggcgcccaccgggtgccgctgccccagcgcccccgacgcggcgccctccgccccccggcccgggccggtgaaccccatccccggcgcccgcccccgccccgccggcgcctccgctcacctcgctcgcgctcgcctcgggggcgctccggggacccgcgccgcgctcagggcgcccgctcggccgcgccgtccatgggcccggcgggggcccgcgcagccggggcaggggccgggggagcgcgcgggccgcgtcgccgtcgccgccgtcgccgccgccaacgccgcggggagcgctcgctcgggccggggcgcgcgcactgcgggcgggcacgcgcgctcgcggcgcgcatcccagccccgcggctcggcgggcgcggccgggaggttccggcgcggctcgggctcgggctcgggctcgggctcgggcgtccggcgtccggcggggcgtcgtggggggagccggctcggccgccgcgctcggccgcgagtgacaggcccggggcggagggcggggccgccggcggggatgaggtcatgccgagcgaaaaaagcccctgacgtcacctgcagccaatcagcgcgcgcggctcgggggcaggtgacgtcagcggagcccgggctcggggtgaagctgaggcggctgccgcggggggggggcggggtgcagggtgcgggtgggtcgcgccgccgccgccttccgccctcaccccgggaccggctcttaaagggaccacgcggcgtccgggaccccgcctccaggaagccctcccggccccgggccccgcgtcacccaggccccccgtcacccgggcccccggccgcgtcgcacagaccccggacggtccagctgagcggctccgggcgcgaagtcctccccccgacccggacaggcgccggcgccgctccccccttctcctggcctttgttggcgctgggccgccgccggggagccctccccagacccaggcgcggcgttttacctgcagcggctgtgctcgccccgccgcgacccccgcaggacggagccggatccccctgcactcgggcggacctgggaccctcagaggcgagccggctgcctcgggtcacacatccgcgaactccgggggcgggctccccaggacgccgccgaccccccacgacccccagccctcccgcttccgtggaaagccgccccgacgacccctgtgcgggctgttgaggggccgcaccccgccgaccgctgtgggaacacctccgcgcgtgcggcggggacgcggcgagtccggggcaggaagaacgcacgggtaattgcaccttcggcaggtgttgggcgggagcaagggggtcagactcgcgctgcagggggagggcgggggaggcctcgctgtcctggaggaaggggacaaagacccctgcccaggagcctgggagcctttgaaagtaatgattttttggcgggggggggttgtcacgagacaccctag

SEQ ID NO: 6438 - DNA, 2300 bp, Homo sapien
gccccctcccctccaggccagactattaggtatccccacctggtctgctccgcatcccaggctgggcagctgggcctagcgaggtggctgcagcagcctggctgtgccagcccctcccccagcgccgcggctgcctctgcagcaggcggaagggcgcgggggctttatccctcaggggccggctgggcaccccgggatggggaggcagtgcggcctggacactggggggatggatctgcagccctcccccccgacaggggaaggccccttcccgggtgtcccaggccagaggccgtcgcgtccctcccacggccgaggctccacacctcccggaccgactccgggccagggtccgcctgctccggttctggcccccgcgggggtgacgttcgggacgtcgggggctcgcgcagatccgcgctggatctcaggcggccctggtgggtcctggatttttgtcccccccccattccacacccaaagaaggagctgcggggagaagggcggcaacgcggcgggcgggcgtgggctgggcccgggtccgccgggcgttgcggggggcggggaaggggcctccctgtccctggcgtcctggacggccgtggccgctcattccggggccgcctcctcctcccgggcgcccaccgggtgccgctgccccagcgcccccgacgcggcgccctccgccccccggcccgggccggtgaaccccatccccggcgcccgcccccgccccgccggcgcctccgctcacctcgctcgcgctcgcctcgggggcgctccggggacccgcgccgcgctcagggcgcccgctcggccgcgccgtccatgggcccggcgggggcccgcgcagccggggcaggggccgggggagcgcgcgggccgcgtcgccgtcgccgccgtcgccgccgccaacgccgcggggagcgctcgctcgggccggggcgcgcgcactgcgggcgggcacgcgcgctcgcggcgcgcatcccagccccgcggctcggcgggcgcggccgggaggttccggcgcggctcgggctcgggctcgggctcgggctcgggcgtccggcgtccggcggggcgtcgtggggggagccggctcggccgccgcgctcggccgcgagtgacaggcccggggcggagggcggggccgccggcggggatgaggtcatgccgagcgaaaaaagcccctgacgtcacctgcagccaatcagcgcgcgcggctcgggggcaggtgacgtcagcggagcccgggctcggggtgaagctgaggcggctgccgcggggggggggcggggtgcagggtgcgggtgggtcgcgccgccgccgccttccgccctcaccccgggaccggctcttaaagggaccacgcggcgtccgggaccccgcctccaggaagccctcccggccccgggccccgcgtcacccaggccccccgtcacccgggcccccggccgcgtcgcacagaccccggacggtccagctgagcggctccgggcgcgaagtcctccccccgacccggacaggcgccggcgccgctccccccttctcctggcctttgttggcgctgggccgccgccggggagccctccccagacccaggcgcggcgttttacctgcagcggctgtgctcgccccgccgcgacccccgcaggacggagccggatccccctgcactcgggcggacctgggaccctcagaggcgagccggctgcctcgggtcacacatccgcgaactccgggggcgggctccccaggacgccgccgaccccccacgacccccagccctcccgcttccgtggaaagccgccccgacgacccctgtgcgggctgttgaggggccgcaccccgccgaccgctgtgggaacacctccgcgcgtgcggcggggacgcggcgagtccggggcaggaagaacgcacgggtaattgcaccttcggcaggtgttgggcgggagcaagggggtcagactcgcgctgcagggggagggcgggggaggcctcgctgtcctggaggaaggggacaaagacccctgcccaggagcctgggagcctttgaaagtaatgattttttggcgggggggggttgtcacgagacaccctagacatttctaaaaggccccctccccgctgccgggtggagagggagcgtggggggatccgccttctgcccccgagcccccagccagcctgggccccccagggtcaccctggggctctgaagggggcttcggccgctggttgaatgaagggccacagaaaatgaagctggcgcaacgaccgcagaaccctcagtgggcacc

SEQ ID NO: 6439 - DNA, 2300 bp, Homo sapien
gcctgcgggtcccaggtcctttcaggcctgtgactgcctcctcaaggacctccttcgccccctccgggtctcagcctgaatcctcctgccccctcccagggccaagcctcccccacttttcaaacccagcaaggctgcagcaggcagccctactcacctggccccgcatccgggtccggcacctccagtctcagggtccccctccagccagggcctcccttctcgcagggccctcccgctttggggcgcagccccaaccccaataacccctgggctcccttccgggacagacccactcccgccaaggcgtttgtttgtgctgtgtgccagctctgcgccaggacgcactccaccgccacccccaccccatacgggccactgccgctcccctcaggctggccagggaagggagctgcaagcgcttattaatcgccaacggtgtactcagctctgaggctggcaggaagactgagtatggaaagggggagccccaaaccccgctcagcatcccctgctgcccacagtactccccacccccagccatcaccattggcaccctgagctccgtggtcctggtgcccactgagggttctgcggtcgttgcgccagcttcattttctgtggcccttcattcaaccagcggccgaagcccccttcagagccccagggtgaccctggggggcccaggctggctgggggctcgggggcagaaggcggatccccccacgctccctctccacccggcagcggggagggggccttttagaaatgtctagggtgtctcgtgacaacccccccccgccaaaaaatcattactttcaaaggctcccaggctcctgggcaggggtctttgtccccttcctccaggacagcgaggcctcccccgccctccccctgcagcgcgagtctgacccccttgctcccgcccaacacctgccgaaggtgcaattacccgtgcgttcttcctgccccggactcgccgcgtccccgccgcacgcgcggaggtgttcccacagcggtcggcggggtgcggcccctcaacagcccgcacaggggtcgtcggggcggctttccacggaagcgggagggctgggggtcgtggggggtcggcggcgtcctggggagcccgcccccggagttcgcggatgtgtgacccgaggcagccggctcgcctctgagggtcccaggtccgcccgagtgcagggggatccggctccgtcctgcgggggtcgcggcggggcgagcacagccgctgcaggtaaaacgccgcgcctgggtctggggagggctccccggcggcggcccagcgccaacaaaggccaggagaaggggggagcggcgccggcgcctgtccgggtcggggggaggacttcgcgcccggagccgctcagctggaccgtccggggtctgtgcgacgcggccgggggcccgggtgacggggggcctgggtgacgcggggcccggggccgggagggcttcctggaggcggggtcccggacgccgcgtggtccctttaagagccggtcccggggtgagggcggaaggcggcggcggcgcgacccacccgcaccctgcaccccgccccccccccgcggcagccgcctcagcttcaccccgagcccgggctccgctgacgtcacctgcccccgagccgcgcgcgctgattggctgcaggtgacgtcaggggcttttttcgctcggcatgacctcatccccgccggcggccccgccctccgccccgggcctgtcactcgcggccgagcgcggcggccgagccggctccccccacgacgccccgccggacgccggacgcccgagcccgagcccgagcccgagcccgagccgcgccggaacctcccggccgcgcccgccgagccgcggggctgggatgcgcgccgcgagcgcgcgtgcccgcccgcagtgcgcgcgccccggcccgagcgagcgctccccgcggcgttggcggcggcgacggcggcgacggcgacgcggcccgcgcgctcccccggcccctgccccggctgcgcgggcccccgccgggcccatggacggcgcggccgagcgggcgccctgagcgcggcgcgggtccccggagcgcccccgaggcgagcgcgagcgaggtgagcggaggcgccggcggggcgggggcgggcgccggggatggggttcaccggcccgggccggggggcggagggcgccgcgtcgggggcgctggggcagcggcacccggtgggcgcccgggaggaggaggcggccccggaatgagcggccacggccgtccaggacgccagggacaggga

SEQ ID NO: 6440 - DNA, 2300 bp, Homo sapien
ttggatttcccaggtagatggccctatcatctatgaatctgcactttcgtttctttccaaacctcacattgcttgtttcttgtcatattgcatgggctggcatcaccattataatgctaagtggacatggtgatggtgggagtcttagcttccattccccagaaagtagccagatgcaaagctcagtgtacacattttctggaagggaggaacacaccgagccagggaggaggtgaagctgaggcaaggctgcttcttactcagctgctgtggctttttggaagttgcagctcagctggccacgtctgcacaccctctcccacgagaccatacagcgatgctccacctcagaatggtccacagggaggaggaagggagaatagtttctctgcaagctccttcctgtcttctgctctcataggtcagagttgctctcccgaggaattaagttccctgcatcttcaggtggtgttactggcccctcttggcagctgctgggcaggccagagtgtctgagggtttggggaagctggcacattgtgtggagtgagagagaggttcattaaaattcccaattattcctatacattcccaattatagtcccaattgtatttgtggatttatctatttcttattttagttttgtcaatgtttgctttatatgttttaaagctcagttatttggcacatagaagtttaggattgttttctgtttggttgcatgaactctcctatcatcatgaaatgttatctcttctaataatggttttgtttcaaagtccacattgtctgatcttactatcattatactaggtttttgaaaacattaatgtttgcctaatatatctttttttttattcttttgctttctatcttcctggatcttgatatttagggtttgttttttctaaacaacatgcatcttatttaacttctctctgtttttttttctttccttttttttttgagacagagtctcactccgtcacccaggctggagtgcaatggtgcaatctcgagtcactgcagcctctgcctcccagattcaagcgattcttgtgcctcagcctcccaagtagctggaattataggcacgggccaccacacctggctaattttttgtacttttagtagagacgaggtttcaccatgttggccaggctggtctcaaactcctgacctcaagtgatcagcctgccttggcctcccaaagagctgggattacaggcatgagccaccgtacctggcctaatttctgtcttctgttagcttccgggttatgtattcattatcctttaatggctaccttagagatggttatatttatttatttatttttttgagatggggtctcactctgttatccaagctggagtgcagtggcataatcatggctcactgcagacttgacctcccaggctcaggtgattctcccacctcagcctcctgagtagctaggactataggcacctgccaacacacccggctaatttgtgtatttttggtagagatggagttttgccatgttgcccaggctggttttgaattcctggtcttgagcaatccatctgccttggcttcccgaagtgctgggactacaggcgtgagcttctgcacccatccagagattatgataacatattatcagttaataatctcgtgtcttcataaacaaggcaagaaccttacaactatttaattctgtttatccctctcctgacttctgtgctgttgtcatatattttacttccacaaagtttaaaaattttataggacattgaatattgttttatttatttatttagagacggagtcttgctctgttgcccaggctggagtgcaatggtgcaatcttggctcactacaacctctgcctcccaggttcaagcaattctcttgtctcagcctccgaagtagctgggattacaggtgcccaccaccatgcccagctacttttttttttgttttttttttgagatagagtcttgctcttgttgcccaggctggagtgcagtggtgcgatctcggcgcactgcaacctccacatcccgggttcaagcgattctcctgcttcaccctcctgagtagctgggactacaggcgcatgccactacacccggctaatattttgtatttttagttgagacaggattttaccatgttggccaggctggtctcgatttcctgacctgtgatctgcctgcctcggcctcccaaagtgctgagattacaggcgtgagccactgtgcccagcccttggctactttttatatttttagtacagacagggtttcatcat

SEQ ID NO: 6441 - DNA, 2300 bp, Homo sapien
aatcccagcactctgggaggccgaggtgggtggatcacttgaggtcaggagttcaagaccagcctgaccaacatggtgaaaccttgactctactaaaaatacaaaaattagccaggtgtggtagcacatgcccgtaatcccagatactcgggaggctgaggcaggagaattgctcgagcatggaaagcggaggttgcagtgagccgaaatcgcaccattgcgctacagcctgggagacagagcaagactctccatctcaaaaattaataataataactatctcaattttgtaaagtgggccaaggacgtgaaattaacgagactctaatgacaggtgaccatatggaaagaggcacagcatggctagtaaccaggaagagggaatattaaaccacagtgtgtaacactgtgttacacacccacatgaagggtgtaagttgacagttgcaagttttggtgggggtgccaggaaacaggagctctctggcaatgctggttggacagcagctggctggggggatcccttgggaagacagcttggtaacaagaacctcctgactttcaggcacccacacctgcaggaggggttttgggcaagaaagttgcagcttgcttgaaatagcaacaaaaaggaaacaaaaggtccatcaacaagtaaatggataagtcaatgtatatttagaaatcagagaaaacaaataaattaaaaccatatgtatccctagagaaaatctctttagcctaacacctatttttttcaaaagcaatttacagaaagagaaatacagtgtaatacccattacataaagttttcagcatgtaaaatttttttttcttttttcttttctttttttttttttttttttgagatagagtctcactctgttgcccaggctggagtgcaatggcgtgatttcagctcactgcaaccactgcctcccaggttcaagcgattctcctgcctcagcctcccgaatagctgggattacaggcacatgccaccatacctggttaatttttgtatttttagtaaagacgaggtttcaccatgttagtgaggctggtctcaaactcctggactcaaatgatccgcccacctcagcctcccaaagtgctgaaattacaggtgtgagccaccgcgcctggccacaaaacatttttaaaggaacatacatattaagtaggagtgtgaggaccttcatgagagtggtgaattccaaattcaagaaattattagggtgggacagaaacaatatggagagatggaggaacagagacttcatttatttatgccattttttcccaagttgagtagggtttttttttacattttttaaatatattactctttataccatcgttcaactaaaatagatcactttttttttttttttgagacagagtcccgctctgttgcccacactagagtgcagtggtgtgatctctgctcactgcaaccttcacctctgggttcaagccattctcctgcctcagcctcccaagtagctggagttacaagcatgcaccaccatgcctggctaatttttgtatttttagtagagatggggttttgccatgttgggcaggctggtctccaactcctgacctcaaatgatccacctgcctcggcctcccaaagtgctgggattacagatgtgagccaccacacccagttaatttttgtgtttttagtagacacgagatttcaccattttggccaggctggtctccaacccctcacctcaagtgatccacctgcctaggcctcccaaagtgctgagattacaggtgtgagccaccatgcccagcctaaaatagatgcttttgtaaatccagtgtgactctggagtcaacagggagaggctagacccttgggggcctccattaagtctggacacagattcagcaagagagcagcagcccactgagcagcccatacaccaaggggcggatttctagaggaaacaagaaaaaggggccctaaaaatggcacaaacaggaaccaggaaatgtgtgcccagcctcacacatgaccctgggcagggatataaagggtccaggctcagggagctccacacctgcacctccctctcacctgctcctctacctgctccaccctcaatccaccagaaccatgggctgttgcggctgctccggaggctgtggctccagctgtgggggctgtggctccggctgtgggggctgtggctccggctgtgggggctgtggctctggctgtggaggttctggctccagctgctgtgtgcccgtctgctgctgcaagcccgtgtgctgccgtg

SEQ ID NO: 6442 - DNA, 2300 bp, Homo sapien
aatgtataaaccagtggaatagaattgagagccagaaataaaccctcatgtagatgaccaactgatttttgacagggtgccagatcattcaatggaggaagagcagtacttcaacaaatgatgctgggaaactagacatccacatgcacaggaatgagctggacccctacttcacaccacatacactaattaatttaaaatgggtcaaaaggcctacatttaagagtcaaatctataaaactattaaaagaaaacatgaccttggattcggtgtggattcatagataggacaccaaaagcaccagcaacaaaagagaaatacaaatacattggatgccatcaaaagttaaatatttttgcaccaaaggacgctatcaacaaagtgaaagaacagtctacataataaaggaagaaaagatttacaaatcagatatctgataagcatctagtatctagagtatataaagaactttttcttcaacttttattttagaatcaggcagtacatgtgcaggtttttcacatgggtatattgtgtgatgctgaggtttggagtatgaatgaatccatcaccaaaatagtgactgtggtacccagtagtttttcagtccttgcccccttgctctctcctcttgttccccagtattcagcctttgccccctccctcccttcctccctcctcttgttccccagtgtctatggttttcatctttatgtccatgtggactcaaagtttagctctcacttataagtgagaatatgtggtatttggttttctgcttctgcattagttcccttaggataacggcctccagcttcatccatactgctgcaaaagatatgacttcgttcttttttgcagctgtgtagtattccatggtgtatatgtaccacattttctttatccaatccaccattgatgggcacctgggttgattccacatctttgcttttgtgaatagcactgcaattaacatatggatgcatgtgtctttttggtagattgatttattttcctttgggtatatacccaatcatgagattgctgggtcaaatagtagttcaattcttagctctttgagaaatctccaaactgctctccgtggtggctgaattcatttacattcccaccgacagtgtacaagtgttcccttctctctcaagctttgccagcatctgattttaggtttttttgttttgttttgttttttactttttatcaaaagccattctgactgatatgagatggtatctcgtggtggtttcgatttacattccccgaatagttagtgatgtggagcattttttcatatagttgttggccagtgttgaaggaggggcctgcagggaggtgtctgggtcatgggggtggatccctcatgagtgacttagtgccacccccttggcgatgagtgtgttcactcagatctggttgttcacaagtgtgtggctcctcctcaccccttgctcccactctcaccatgtggtgtgcctgttcctgcttcgccttccaccgtgaggaaaactccctgagggcctccccagaagctgagcagaggtgggtgccatgcttgtgcagcctgcagaaccatgagccattctaacctctttcctttataaattacccagcctcaagtatttctttagagcaatgcaaagaatggtctaacacacccggaaagctgagactggcatgagtataaagatcgtggataattttgaaatctaaaaatgtaaaattaatattattgagggagtcaacacaggaaagatgagagcacgtgggcagaggctgttgcccattggtcacatgtggtcagcagagagcaggtgaccagcaccctggagctttgcaggaagaaccagacagcctggagctgaggttttaattgtaggggccaaaacaaatggggaaaaagacaaatttagaaaacaaagaaagtagatgctcaactgagccagaaggaagtcactagcaaagaggaaaaaaatagagctctggaaaaatagtgtaaacagtcacaagaaagggaccctgtgtcatgcctgacatctggacaggtatataaagagcccaggctcagggagctccacacctgcacctccctctcacctgctcctctacctgctccaccctcaatccaccagaaccatgggctgctgtggctgctccagaggctgtggctccggctgtgggggctgtggctccagctgtgggggttgtggctctggctgtgggggctgtggctccggccgtgggggctgtggctctggctgtgggggctgcagctccagctgtg

SEQ ID NO: 6443 - DNA, 2300 bp, Homo sapien
attgctcacttggggagcttggtttttggagacctgagtctgccaatgctcccagctgaataaagccctttccttctacaattcagtgtctgaggggttcttgtctgcggctcgccctgctacagaaacactatgcggtgattacaaaagaagaagaaggccaggcgtggtggctcatgcctgtaatcccagcacattgggaggctggggcaggtggatcgcttgagcccaggaggtcgaggctgcagtgagccatgagcgcaccactctgcactccagcctgggtgacagagcaagaccctgtctcaaaaaaaaaaaaaaaaaaaaaaaaagaagaagagcaaatcattgacacacagaataacatcgtgagggaaagaaaccagagtacatttttaatgatttcatttttgcaacattcaacaacaggcacaactggtcagcagagctgtgcctggagcgatgggcaggaagggaaggcggcgaaagggaaacttctgggggtgaagcagttggtcatggttggagtgatgggcacacgagtacatgtttagcggaactcatggaattgtacactcaaaatatgtgcagagcccaggagaccaaggctgcagtgagctaggatcacaccactgccctccagcccgggcgacagaatgcgaccccgtctcaaaaaaaaaaaaaaaaaaatgcagcccaagcctggtggctcatgcctgtaatcccaacactttgggaggccaaggcaggtggatcacctgaggtcaggggttcgagaccagcctggcgaacatagtgaaaccccgtctctactaaaaatacaaaattagctgggtgtggtggtgggtgcctgtaatcccagctacttgggaggctgaggcaggagaattgcttgaactcgggaggcagaggttgtagtgagctgaaattgcatcactgcactccagcctgggtgacagagggagactcagaaaaaaaattttttttcactgcatgtaaattttaccttaataaaaaattaaaatttggctgggtgcagtggctcacacctgtaatcccagcactttgggagactgaggcgggtggttcacctgaggtcaggagttcgaaaccagcctgcccaacatggtgaaactctgtcttcactaaaaatacaaaaaaattagccaggcctggtggtgggcgcctgtaattccagctactggggaggctgaggcaggaaaattgcttgaacccaggaggcagagattgcagtgagccgagattgcgtcactgcactttagccctggtgacaagagcgatactccttctcaaaaaaaaaatattaaaattaatcttttagaaaataaaagtgtgttagagaggttggctaatcaaaatttttgtagccttcaagaagaataaacttgaagaatatccattgatttgtagaatttttacaaagaattaatagaggaaaactcaaaagcattagaaagggtcctgttcctctgttccctctgtgagcccagcttgcctgaagggaacgtgggtctaatccgtgtctggaggagtgagccaaaccgcaggaggaagaggtaagaaagacaaaggagaaccagggccacactcaaatccatgctcttcaaaactttgttttacagatttgacaaaatatttatacttgaagtttttaagcggtggaacctatagacagcctttctttcagcttatttttttaatttttattttattttattttttaccaaatgaccatccttgatataaacaccaatgccagggggtggagggtctgcatcgctgaggagagccctgagcaccaaggacaatggtccacccttcggccaagcaaccaccgcctcccaggctcctgggacacccactggagagggagcccagtgtcttctaacaaagggaaacacctatgaggaagaggccaaatttagaaaccaaggaaaggacagcttggcttgagctgatggtggctcatgggattgtggagagattaaaaataacacttgtgcatgtgaaatagcagaaacaacaacagaagtattcacgtgttcagtataaacacctgggcaggaatataaagagcccgggctcagagaactccacacctgcacacctccctctcacctgctcctctacctgctccaccctcaacccaccagaaccatgggctgctctggctgctctggaggctgtggctccagctgtgggggctgtggctccagctgtgggggctgtggctccggctatgggggctgtggctccggctgctgtgtacctgtctgctg

SEQ ID NO: 6444 - DNA, 2300 bp, Homo sapien
caggaaatctacttttgtctcccggatgacaagtttgcttagaaaggtttgtctccttcctttcctcctccttttgttttttaaggtttgttttcatagctgttacagaatctcatgttacctctcttgggtttggccaatcctgtctagatcttctacctatgttgaaacaaaatgggatgctcctggttccctttacccagcacctgagggcggagctgccaagctctggtgagcacctggggtgcgtgatggtctgctcatgtccagtgcggcctcgcgcagggctggtgggggacagctttgttaggatgcctgggctctgtgctcacaatccaggtcttatgaagtgtccccatcccagcctcaccgcgcctagtcgggaggcgtgaactgttgccacacagggctgcatcctctgacccagtgtgttccctaggaagaagccattttcagcacagcaggcacttccctctctgtgggtttctctcagtcccctgccccacagctcccattagcaatgggaacgacggaacctataacccctctctcgcctcttccagataagacaaggcctttatcccaagcttgaaagacattcttttttttttttttcttttttttttttttgagatggagtcttgctctgtcgcccaggctggagtgcagtggcacgatctcggctcactgcaagctccgcctgccgggttcacgccattctcctgcctcagcctcccaaggagctgggactacaggcgtctgccaccacgcccggctaatttttttttgtatttttagtagagacggggtttcaccatgttagccaggatggtctcgatctcctgacctcgtgatccgcccgcctgggcctcccaaagtgctgggatgacaggcgtgagccagcgcgcccggctgaaagacattcatttttataccatctaataatgttggcgaggctaaaaatgacaattaagacaaagtgagaatggcttttaaaaacgtcagaaattaaactcaagtacatgcctgtggaaaaacaaagtacactgtttgaacacaagggatttgttctctcaatatccaaataacttttaaagcagtaatgagaagtcaaaaaggtataaattttttttttttttttttgagacggagtcttgctctgtcgcccaggctggagtgcagtggcatgatctcggctcactgcaagctccacctcccaggttcacaccattctcctgcctcagcctcctgagtagctggaactacaggcgcccgccaccacgcccggctaactttttgtacttttagtagagacggggtttcaccatgttagccaggatgttctcgatctcctgacctcgtgattcgcccaccttggtctcccaaagtgctgggattataggtgtgagccactgtgcctggccaataaaaaagtatataatttatattggagtaaaagaatcaccctcactaatagttaattgaagagattaacaacaggatgataaatgagatcccccatccacccatgaaattcctgagatttttaacataaacaatactcaccacgtgaggctgtgtatgcagcagccaggagtcctgagcaccccacgacctgaggctggcggaggagagattcactgcagtgcaccaatgtgttaagacagaaccaagatacaacgttggttcctcaattagcctctttaattatatggatgaaagcttagtttttaaaaaattatcttcacacaaagttcacagtttcaaagaaaaatataatgccataggtgggaagaaaagatgggaagaaaacaaccaaaatgatctttgtagaaaacccatcctctgcccatcacatgaggaaaacagaaggcaggtgatcagttcagtacaaggtccagttccaaggaggaagtgactacatttagaaacataagcaggtgggtgttggatcaggccaatgagaacccgaagtccagcaaacaaataatcacatacccaggaagtgctgggaatgatggagtgaccaaggtctcagagcaaccctacccagggatataagggggtccaggctcagggggctccacacctgcacctccatctcatctgctcctctacctgctccaccctcaatccaccagaaccatgggctgctgtggctgctctggaggctgtggctccggctgtgggggctgtggctccggctgtgggggctgtggctctggctgtgggggctgtggctccggctgtgggggctgtggctccggctgtgggggctgtggctccagctgctgtgtgcc

SEQ ID NO: 6445 - DNA, 2300 bp, Homo sapien
gatctggagcctacagatacaggtggacatcagatcctgtctggatactgcacagttttatgtaaagttgtgtgtttttgtgcatgtttgtagacttgtttaaagagaggctctgtaaaattccacagaggaatctacgaacccacagtagttaagaatgggtctgcagaggtagttcctaatgtggagcacaggagcaaagtctacaacatactcatgtctgctttacgctgaaaaggtgaaaaaaattaaaattaactaaaattaaaatagcaaatgactagacaggagcatatgcaccttatataatacacacatttcagggggcatttgctcaaaagctacataatcgtggggtgccccacgggacagggtgagaccactgccatgttgattgttccatcagagcattgtaagaggccctctgatgatcctctttgcccaattcagcgaacccgaaggtcatcaatggaccacgaagaacaaaggcccatgaaagggaagatgttcccaaagtacaaaaggaaaagtcctcttgtacccgagggaaggagctgatccaagggtgtcactaggagtcagcgcgggtgttgatacattacttcaggggctggaggcaaatatacgaggtactggaagcaaatgtatcaagcactgggacaaatgtatcaggcgctggatgcaaatgtatcaggcactggatgcgaatgtatcaggcgctggatgcgaatgtatcaggcgctggatgcgaatgtatcaggcgctggatgcgaacgtatcaggcgctggatgcgaatgtatcaggcgctggatgcgaatgtatcaggaagcaaatgtatctgttgcctctgttccagagctggaggatgccgcctctggtggggacagccaacacaaggcggctctctcctaatgggttttctgttcctccctgagatacagtcccctgccccagaacagagtggggctccagcatacacggcaagagtcaccgagtgccagctggtgtttacaccgtggcctgaggcctgttgactgggctcggggcactcacaggtattgtggtcacgggggcaaatggccatccggttccctgctctccaccggctttctttagcatccagtgggcctgcacccgaatgtagttgctgcttcccaggctgagcccgggacccggagcaggcgggcacccagacagggcatcctcttccgctcactggccctgaaagggcctctgccatcagcctgtgccgctgtccgggagcccctgggccggccacgcagtgggggaacccgcttcacagcgacaccgtgcggcggcaggaggaaccgctgcaggagacaatgcgatctgggtcctgacccagcgcagaggcagtgtctgccccttgcaatgcttggatttccttcctcaaaaggcagccttcgatgatctgaaattcaagttccagcaggcatcctgtactgtatctgtcagccctgccacccgagtggtctgaaagccctggaagagaccgcggttatcacaggagaacactttccatggggagcacgcagcaagctccagaataagcgcttaaaatccccgtctcagtcaacactgcaaaccttccaacaaagtcttacaccgaaaacgaccctgctgagctgagggctgaagccccaggtcctgggacccttggaaacagcccgcgggccaggagctgctgtggaccgtgaaggtgtagggcctaggcacgtcccaagcaagacacgatgctcccgcagaggaatcttcccgggagcaagccaggagtcctgggctcaaaatcaccctcggcaagaccaaggcctctgagcgagccactgcctgcccatcgcttccttcttgtcacatggaaagggaaactcaccgcggggccagtgtttactgaggggccgcttccatcacagacctgacagcacattcgagaaaagtgcgaggaaaacaggagttatttataaaaatgtaaagcagaagagaatactgggaccagtggcacaagcaggaaccaggaagtgacagtgtgcccagcctctcacctgaccctggacagggatataaagagcccgggctcagggggctccacacctgcacctccctctcacctgctcctctacctgctccaccctcaatccaccagaaccatgggctgctgtggctgctccggaggctgtggctccggctgtggaggccgtggctccggctgtgggggctgtggctccggctgtggaggctgtggctctggctgtgggggctgtggctccggctgtggaggctg

SEQ ID NO: 6446 - DNA, 2300 bp, Homo sapien
gccatctcatctgcatcctgggaagcaggaaggagcacagaggaaaacacaagcctgctctggccagctcagtgtgctccttccagaaacaggtaaacacaaaattaccctgcgaagccgccattccattcctaggtctatccccaaaagaaatcaaagcagggactcaaatacttgcacagcccttgccacgacctggatgtagtcagtgcatctgttcccagcaaaactcttgttgaaacgggacccccagtgtggcagcgtagggaggtggggcctgaggggagggagacgtgtgggtcgtgggagtgactccctggggagtccgtggtgctgggagtgattctcctcttgtgatacagggtgagttcccatgggaatggatttgttcccatgagtggggcttgttctgaagccaagacatccctgagctttatctctcttcccgtgtctgcttcccctttgacctcctccagcagaagccagggccatgccattgaacttctcagccagcagaactgtgagcttgatgaattaccccatcacagaggttcttttatggctacacagaatggactcagacacccatgctcacagccgtgcagtcacaatagcccaaaggtggaaacaacccagcaggtgaggggatctgaaatggggtagacaaacacatcggggtcttacggagcctggaaaaggagtgtgctctgacgcctgcagcaacgccaccaaccttcacagcctcgtgccgagtgaagccagccagtcacaataggaccaatgctgtgaccccacagatggaaggcccccagaggagtcagattcaagaggaagatggcagaatggcagtcagcagggccagtgacagaggccgatgggagtgagtgattagtcaggacggagctccagtttcgcgcgatgaaaaggtgctggagctgcatggtggcgacagtggcacagccacgtgcaggttcccaatgccacggaactgtgcacttaccatggggatggtgggaactctcatgtacccgcatttgaccagagaggaaggaaggaagggaggggggagggaggagggagggaggtagcagagaaggaaggaaggaagggaagggggagggaggagggaggaggcagggagggaagaaggaaggaagtgagggagggaggaagggagagagggatggagggagggaagaaggaaggaaggacggaccagcctgttaggctgactgacagagtaccccctgtcctccaatgctgcccacggcaggcatgtggcagtggctgacagggagtgagtctggaagcgacccttgtcggggcagcctccttggtcctgtgattcaagacagggtgaaagtcagtggcggccattggtgcctctggccggggttcctcacaggggcccgcaaggggacagcgaatggagcgtggagggtggagggctccttctccagaccggagcgatgggttcgggagccattctgtgcctgtctttgctgctgggctgaggagctggatggcatgctgggagtagtgggagctgctgaggagtttggtcctggagcgaagaggctgaatccgcatgtctggagtcaccgtggagggcacagctagagggagcagcagggtgtcccagggagaagacaccagggctggaattagagggacatcaaggctgatacttagaggcatccaatatatggggcctgcctgatgggctgctctcaggtgggatttggggggtgtgagaggggtcagtgcccaaatgaccatggggtccgtggcctgtatgcccagtcaggtgacgacgccattcagaaagtagatctcatggggtgcccggctgctgagtctcaggccagatctgcagtgagtgtgctgccccaggcgtggaacactctggtgccatcgggacccaaggctgagtgcacccaagagctgtgggtctgaaacagcggtcagaggtcactgacatgtggaggaggcccctggagtgtgggagacagaatccccaggtgtcaggcttggcaggaggctttgcaggtggggaggaagggcaggtagcgtggctgccggaggagggagggcactggtaggaggagggtggcctgtcccgggcagaccagcctctttgggctgtgtggccccagctccctgagcccagagggaggtgagggtgagaaggcctggaccaggcaggacgcagcccccagggcccctgctgggaagaggtcagaacctcccaaggacccagaaggccaggtaactgagaacggggctgctctctgaatctc

SEQ ID NO: 6447 - DNA, 2300 bp, Homo sapien
tgacgcctgcagcaacgccaccaaccttcacagcctcgtgccgagtgaagccagccagtcacaataggaccaatgctgtgaccccacagatggaaggcccccagaggagtcagattcaagaggaagatggcagaatggtagtcagcagggccagtgacagaggccgatgggagtgagtgattagtcaggacggagctccagtttcgcgcgatgaaaaggtgctggagctgcatggtggcgacagtggcacagccacgtgcaggttcccaatgccacggaactgtgcacttaccatggggatggtgggaactctcatgtacccgcatttgaccagagaggaaggaaggaagggaggggggagggaggagggagggaggtagcagagaaggaaggaaggaagggaagggggagggaggaggcaaagaaggagggaagagggaggcagggaaggggggagggagggagcagagaaggaagggagggaggcagggagggaagaaggaaggaaggaagtgagggagggaggaagggagagaagcaggaaggaaggaaggaaagaaagaaggaaggaagggagggagggaggaggagggaggaggaagggagggaaagagggagggagggaaagagggagggggggagcagagaaggaaggaaggaagggaagggggaggaaggaggcagagaaggagggaggagggaggcagggaaggagggggagggaggagggagggagggagcagagaaggaagggagggaggcagggagggaagaaggaaggaagtgagggagggaagaaggaaggaaggaaggaaggacggaccagcctgttaggctgactgacagagtaccccctgtcctccaatgctgcccacggcaggcatgtggcagtggctgacagggagtgagtctggaagcgacccttgtcggggcagcctccttggtcctgtgattcaggacagggtgaaagtcagtggcggccattggtgcctctggctggggttcctcacaggggcccgcaaggggacagcgaatggagcgtggagggtggagggctccttctccggaccggagcgatgggttcgggagccattctgtgcctgtctttgctgctgggctgaggagctggatggcatgctgggagtagtgggagctgctgaggagtttggtcctggagcgaagaggctgaatccgcatgtctggagtcaccgtggagggcacagctagagggagcagcagggtgtcccagggagaagacaccagggctggaattagagggacatcaaggctgatacttagaggcatccaatatatggggcctgcctgatgggctgctctcaggtgggatttggggggtgtgagaggggtcagtgcccaaatgaccatggggtccgtggcctgtatgcccagtcaggtgacgacgccattcagaaagtagatctcatggggtgcccggctgctgagtctcaggccagatctgcaatgagtgcgctgccccaggcgtggaacactctggtgccatcgggacccaaggctgagtgcacccaggagctgtgggtctgaaacagcggtcagaggtcaccgacatgtgaaggaggcccctggagtgtcagaggtcaccgacatgtgaaggaggcccctggagtgtgggatacagaacccccaggtgtccagctaggcaggaggctttgcaggactgagcaggtggggaggaagggcagggagcgcggctgccagaggagagagggcactgggggtggctcgacctgacgaggctgcttgaaggagacactcttggaaactgacagggctgcaggcactcctgggagcaggaggagggtggcctgtcctgggcagaccagcctctctgggctgtgtggccccagctccctgagcccagagggaggtgagggtgagaaggcctggaccaggcaggacgcagcccccagggcccctgctgggaagaggtcagaacctcccaaggacccagaaggccaggtaactgagaacggggctgctctctgaatctccagggaggacaaaggcggccatggcagcaaggggacagggcagaggggaaggcgggcaggtggatgttggaagccgcagattcccatccagtatcctagaggaggagacccagggctgtgtcctaggaggcccaggaagcctggtcagcctggaggctgagggcgggcccgggagatctggtaaggacatcagtgtctccacgaagagcagcagggtctcagcccatggcagccgcaggccccatgactggggccgcagcctccagagcc

SEQ ID NO: 6448 - DNA, 2300 bp, Homo sapien
ctgctgctccctctagctgtgccctccacggtgactccagacatgcggattcagcctcttcgctccaggaccaaactcctcagcagctcccactactcccagcatgccatccagctcctcagcccagcagcaaagacaggcacagaatggctcccgaacccatcgctccggtccggagaaggagccctccaccctccacgctccattcgctgtccccttgcgggcccctgtgaggaaccccagccagaggcaccaatggccgccactgactttcaccctgtcctgaatcacaggaccaaggaggctgccccgacaagggtcgcttccagactcactccctgtcagccactgccacatgcctgccgtgggcagcattggaggacagggggtactctgtcagtcagcctaacaggctggtccgtccttccttccttccttccttcttccctccctcacttccttccttcttccctccctgcctccctcccttccttctctgctccctccctccctcctccctccccctccttccctgcctccctcctccctccttctctgcctccttcctcccccttcccttccttccttccttctctgctccccccctccctctttccctccctccctctttccctcccttcctcctccctcctcctccctccctcccttccttccttctttctttccttccttccttcctgcttctctcccttcctccctccctcacttccttccttccttcttccctccctgcctccctcccttccttctctgctccctccctccccccttccctgcctccctcttccctccttctttgcctcctccctcccccttcccttccttccttccttctctgctacctccctccctcctccctcccccctcccttccttccttcctctctggtcaaatgcgggtacatgagagttcccaccatccccatggtaagtgcacagttccgtggcattgggaacctgcacgtggctgtgccactgtcgccaccatgcagctccagcaccttttcatcgcgcgaaactggagctccgtcctgactaatcactcactcccatcggcctctgtcactggccctgctgactaccattctgccatcttcctcttgaatctgactcctctgggggccttccatctgtggggtcacagcattggtcctattgtgactggctggcttcactcggcacgaggctgtgaaggttggtggcgttgctgcaggcgtcagagcacactccttttccaggctccgtaagaccccgatgtgtttgtctaccccatttcagatcccctcacctgctgggttgtttccacctttgggctattgtgactgcacggctgtgagcatgggtgtctgagtccattctgtgtagccataaaagaacctctgtgatggggtaattcatcaagctcacagttctgctggctgagaagttcaatggcatggccctggcttctgctggaggaggtcaaaggggaagcagacacgggaagagagataaagctcagggatgtcttggcttcagaacaagccccactcatgggaacaaatccattcccatgggaactcaccctgtatcacaagaggagaatcactcccagcaccacggactccccagggagtcactcccacgacccacacgtctccctcccctcaggccccacctccctacgctgccacactgggggtcccgtttcaacaagagttttgctgggaacagatgcactgactacatccaggtcgtggtaagggctgtgcaagtatttgagtccctgctttgatttcttttggggatagacctaggaatggaatggcggcttcgcagggtaattttgtgtttacctgtttctggaaggagcacactgagctggccagagcaggcttgtgttttcctctgtgctccttcctgcttcccaggatgcagatgagatggcaggtgccccagcagccctcgccaaccataaggcatggattcctcaccttcggctcggggagcacagagactgagggccgtggactcggggtgagatggtggcacctccatcacagacccacagtctctgtgtccagcccttccggaaagatgacagaaatgaaaagtctgccttatggaagacaaggttattcagaattttcggttctgtatggtctccttagaaacattagcagactttaaaaaatgaaaatagcccatgttcattgtgaaaaagtgagccatggcctccggggcaccggagccacagagccaccacgctttgcttttgtttctcactcccctactctcccc

SEQ ID NO: 6449 - DNA, 2300 bp, Homo sapien
cggccaagactgacacctgggggttctgtctcccacactctaggggcctcctccacatgtcggtgacctctgaccactgtttcagacccacagctcctgggtgcactcagcattgggtccctatggtatcagagtgttccaggcctggggcactgcactcactgcagacctggcctgagattcagcagctgggcaccctatgagatctagtttctgaatggcgtcgtcacctgactgggcatacaagccacaggccccgtggtctgtgggcggccattgtcctgtgtgtggggtggggcactgggaccctcccacagctttggctttctcagagtttctatccctgtgtcctcctctgtcagcaaagcccaaaggtggggggctcctgagctgccacctcctttgtttctccaactctgccggttcattggactatgcccttggtgcctcacagtgtgctgactgacagcatctctaagccctaaaccactgagcctggagtcatccagctccagggaaatgactctgcagggtcacgattcctgggtctgcactcaggccccctctttccaaccaagacagcaggatcccaggtatcctgagacctgtcctgatcctgaatcctgtcctgatcctgagtcctgtcttgatcttgggtcctgacctgatcctgccctgagtcctgtcctgatcctgggtcctaccctgatcctgtgtcctgccctgatcctgagacctgccctgatcctgggtcctgtcctgatcctgattcctgccctgatcctgtggtcctgccctgatactgagacctgccctgatcctgggttctgccctgatcctgagtcctgtcctgatcctgggtcctgtcctgatcctgagacctgccccgatcctgagtcctgtcctgatcctgccctgatcctgagtcctattgtgattcaaagtgctgtcttgatcctgcgtcctgccctgatcctgagtcctgtcctgatcctgccctgatcctgggtcctgccctgattctgagtcctgtcctgatcctgggtcctgcctgatcctgagacctgccctaatgctgagtcctgttctgatcctgagtcctgttttgatcctgagtcctgtcttgatcctggttcctgccctgtttctgagtcctgtcctgagcctgccctgatcctgagtcctattctgatcctgagtatttcctgatcctggctcttatgagatcctgggtttcatcctgttctacccacgggtgatagcccaggatggggtcacctgctctagggtgtctccatgcgtggtctccctgtgccttctgtaaacttcccctgagactttcggagtcaagtcagcatcagcatcagcatagaagtgggttgaataggaccccctcattcctgtccacctggaaactctgaatgtgatcttatttggacactgggtctttgcagatgtaatcaagttaagatgaggttgtactggagtagggtgggccctgatccaatgtctggtgtccctgtaagagaaaggaggggaggaggtcagacacagacactcagtggagaagcccacttgaggatggaggcagagacgggggatgcagccacaagccaagaatgtctggccaccaccagaagctggaagacgcagaaaggatccttccctggagccttcagagagtgtgtggcccacggagaacttgatcttgaacttctgtctgcctgaaccgcgaggcaccaatgtccgctttaaggctcccgttgggggccatttgttatggcagccccaggaaatgaacactggtagcaaagatgagcgcagcatcaaagccaagtccctgctcccgttgcccttactaacacagaaggacaggggccttgtcatttttcagaggacatgtgagggaaatcatgaactaaagaaaaagtgcaaaactatgtacaccactgaggttattttaagattaagcaaacaaacacagtttccctaaggaaatggcacaaacaggaaccaggaaatgactgtgtgtccagcatcacacctgatcctgggcagggatataaagggcccaggctcagggagctccatacctgcacacctccctctcacctgctcctctacctgctccaccctcaatccaccagaaccatgggctgctgtggctgctctggaggctgtggctccggctgtgggggctgtggctctggctgtgggggctgtgggtccagctgctgtgtgcccatctgctgctgcaagcccgtgtgctgctgtgtgccagcctgttcctgcaccagctg

SEQ ID NO: 6450 - DNA, 2300 bp, Homo sapien
gaccctgggcaggccctggaccctcgggcccaggcaaccctctcctgctatggaggcctcctcactgcctgaggccttcagggcaaactggggtggggcagcactgggcagaggctgtgtggcaggccagggtctcccagaaggtggtggctggccgggtaagcccagctcagatgctggggagacatgggggcatggcacacaggccacactcagcctgggatcaggccccgtctgaggacaccgggtccagttttccctgggccaggcccttggaaaggaggagggagttggggagggagaacggaaccctggttctccgacaggccccatccacccacggcctgtgggctccagggagagcatggccagggtgcccaaggagacgaggaggaggctcctcatgcttcatgacccctcctgctcgttagggtttatcaacatcatttaagatcagccttgtgctgtgggttcctggcgtgctgtggataacactgtgcccgggtcagcccaggcatgaggggcggggactaggctggaaagaggaggggcttgcagagggctgggcttttccaggggattagggttcagaacagaggtttggggagagaaagggttcagagtcaggcacaggcaggcagacaggaccccaagcaggactggccttccagacaggaaagagggttgcggagacacaggaggccagttgagagtggcagaggagaaaggagtttcatgggaggatggggcttggagagagatgagggagggaaaacgggggccgccatgcatcctcagcttccgggggactttggagagggtcgaggctcagtgggagctggaggttggtgaagaggacccagctcagggaacctgcgtggtgaagtgggggacttggagggagggagggaaggctggagttttctccatggggaggaactcatggggactgttatggggatggaagatcagctggcgtcaagcataccgtgagagtgaggatgtggtggggtagcggaggcggctgaggctgggaggacaggcattggtcaggaaaaatgattcacagggaacaaagtatcctcaggggaccaggctcagaagggctggtagggatcacagagaggctgtgggcaggtgagtaaaccagcctccagggagacaagtgtccttagcagccaggacctcagcacaggaccagagctcggaacgggacactttgccctgcgagcagatggagcatgacctggggtctgcgcaggagaggccacattctcccagactctgggagtgaactggagtggggccccggctgggtgaagtcagactccaggaaagggggcaggagctccgatgggcaggagtgggctcagccaggaaggaacagagtagggggtgctgaaacttaccggaaggcctggacttggtgggctaaggagggaagggactggagggtggtcttgggggccttgtggacttggttagggacaggatggggcagagacgggcagtcaggtagggggcctgctggggctcaggggactggagcttcgtcaggaggggactgagctgctggaactgagagtcaacaggccagaagggcaggacccaggggcgggggtccctggaggcagcagggcccaggcgctggggtggagcgccatggggagagtgggaagaggaagagggtctctcttggggaggcagatggggagggttccgggagcgtccagtcttccacggggctgggggctccgcgagagggatggggccgggtggggtggggaggaagacgcagtgggtccggggagatggaggtggcgcggacaccctggtcgggggctgtaggggtcccatccctgcgggaccttgcaactccccagggtcgcggcttccgaggcccccaccctcctggcaggaggaggcggaggcggggaggtggctgtgcccgctgccgccgtgagtcaggctctgggctgcagccgcgcggccggtctggcgctgcggagggagcgcaggcggcgggggaggcagcggcgccgccgccgagccccgcgcgctccccaccccctcaaggttgggccgctgggaggcggatcagtggacagacagcggcccgcgggacggcggaaggacgcgcgcaccgaggctcagggggtccggccgcgcgccgaggagtcgcttgtaggtgaggaggcgccgtccggggggctgcggcagacccggatggggctgggggctgcagagcctcggccgcagaccccccggcgagcgccgcacgggagctgggaacgcggggt

SEQ ID NO: 6451 - DNA, 2300 bp, Homo sapien
gccagcacggcagctgactcggcagcaccgggacaagcatttggggtgccccgggcctatggccccctgccctgccctgcccagcccatgggctccagcctggtcggccagcggggactgacttgttcccaggtctggagcagtagccggcaggatgtggccttggctggggtttcagggtgtctagtgtgagtgccagccttgaggagtgatttcagggaggtggcccagccaggcagccacggcactcgaacagaggctatttctgctctcggggaccctcagagcaggcctaccagtcaccctcctcagccctcttgtcccgggaaataaatggccccaggtggcgtgggggggctggcctagctgggccttcttgcctcccaggccctagaagcggttttgtgtgcagtgagctgagctggcaccaagcaagcctgcccagggtccctggttgcagggattggactcagaagtcccctccagccacagctgccacagtcacggatccccgggctgataacgcggtgcgcttgttccgctgggaggggaggggttgggagcgtgtgcccggatgcagtggtagcagcccctggggttctaataggtaagtaggagtttgtgggcatgtggtggtgggagcagagttccttttgggatcagtagctctggagtcacttagagccccctcgagccccaccccaacaggttagaagatgaggcagatgtgacatttgccattatcttgatgcctctgcctgagggtggtggctgccttggccttcctcccaaggggctgcagggctttcaccccagagccatgctacggcagacacctggagcaagaacatttacccagggtggcacggaggcttggaaacacatgcctggcgtttggcatgcctgaaatctgagcagagctgggcagaactctgcagggcctggcagggcttctggggagacaaatgtcctgtcatcagatgctttgtgcactgaggcctgggagggcagagaggtacaaggaggcagccataccctgttgtccctgccctgtcccactctccccatctccctccttctgcagcttgtcagctccgtccagctcccatcttcatggctgctgccctggggttgctccgagggctccctccagcccggcaggattctcggggccctggagtctgaccccgggttcctccgtggttttctagctggtgactggaccctgagcctggagtccccccctgtctagactgtgggttgtaaccagaaacccctagcaaaggggaagctggagcccaggcccttggggagcccaccaacagtcacatgaatgctggctgtgccaagtttggctcggccctggctctgccctgcgacccctggctccctctcagtggtgtttcctggcctcagaggcagccccaaggtggcctgaggccgggagcaggccctggctcccctgtcacctacccagtgaccctgggcaggccctggaccctcgggcccaggcaaccctctcctgctatggaggcctcctcactgcctgaggccttcagggcaaactggggtggggcagcactgggcagaggctgtgtggcaggccagggtctcccagaaggtggtggctggccgggtaagcccagctcagatgctggggagacatgggggcatggcacacaggccacactcagcctgggatcaggccccgtctgaggacaccgggtccagttttccctgggccaggcccttggaaaggaggagggagttggggagggagaacggaaccctggttctccgacaggccccatccacccacggcctgtgggctccagggagagcatggccagggtgcccaaggagacgaggaggaggctcctcatgcttcatgacccctcctgctcgttagggtttatcaacatcatttaagatcagccttgtgctgtgggttcctggcgtgctgtggataacactgtgcccgggtcagcccaggcatgaggggcggggactaggctggaaagaggaggggcttgcagagggctgggcttttccaggggattagggttcagaacagaggtttggggagagaaagggttcagagtcaggcacaggcaggcagacaggaccccaagcaggactggccttccagacaggaaagagggttgcggagacacaggaggccagttgagagtggcagaggagaaaggagtttcatgggaggatggggcttggagagagatgagggagggaaaacgggggccgccatgcatcctcagcttccgggggactttggagagggt

SEQ ID NO: 6452 - DNA, 2300 bp, Homo sapien
agtgcttcacagtcgtcttcgacacgggctcctccaacctgtgggtcccctccatccactgcaaactgctggacatcgcttgctgtgagtcacgaaccctggccccgtcgcccaggtcctgcccttccgggatgtcgctgcagggctgcctcaggaatcacttgggcaacgcaattctcctgcctcttggccccgtgagccaggccagccctccaccctgctccagccactgactttctgggtgaaccaccagctgtggtcttgctctcagcagggctggggctggggtggccacagagggagccggctgtggctgggagggaggcccggggtcacagcccacagtcccggggctctggcatgatggtgggcctcagatcccctccaaatcccaccctggggaggcagcttggggggtgcgggctccatggtagattgtagggggatgggagggctaaggccgtggcgtgggctgcgggatgaccggcgggcccccttgtcgcccggggcagggatccaccacaagtacaacagcgacaagtccagcacctacgtgaagaatggtacctcgtttgacatccactatggctcgggcagcctctccgggtacctgagccaggacactgtgtcggtgagtccctctggggcctttcccaggactcgagggtgccagggtgtggggttcacccaccgtgggtatgtggttgaaagggagggctcggtgatcccagcccaaccccagccctcaggtggccggggcagtcagcagggtgaggaggggtctgggaatgggcctggttgtgtgcaggctggagggacagcctcaaacccagggggtacaggggcaggggtccccggagtcaggccacaatgagtgggagggaggacagggcagatcgatcgggctctttttggcacattgggtttgaggtgccagcaggtgttgagggctggacctggggctgcacagggtccctgcagcaggccgagggcttggggaggcttggggttgggaggatgtaccaggaacccgctgtgggggctgctggcggagagtcaccggcaggagcctgggagggcaagggagggggagcagcagtggctgttgggggccccgcctgcatccaccatcctcagggccctgtgcagagcaactccctgccctaggagagggtgagctggcccttgtcaccctgcctgggcctcagtgagttctcacctcggagctgtctgctgggggtggaccaggccacaaggggttcaggagttacgggatggtgacacagcccccagctctggagcgggccaggagggcagcagagcccccctgcaggcccagggacccgggaagagggccccttcctccagctgaagctgctcctaacagttccctgctgggctggagtccagtctgtactgggggctcctcagagccctcctgtctggaccctgctcagcctgaacaggaaattgccccgtctgccctcttccgccctcttctgccccctccgccccgtgtcagcctcaagctgtcgttcccttcccacatcctgctctggccgtgttctctctctgcagcctcatccagggctgggggaggggacaggcagagaaggggaagggggcagtatggctgtgagcttgggatggggtcggcaggttccccatctctcgggctcctggcccaggctgtgtcttgttcccagcgctgagggcaggagcaggacctgcctgtcattggtggtgggagtaagaggtcggagcagggagcggagcaaggggcctgcccgtctgtgctcctgcctggttcccatctcgtgtaaaccgagccctgatgacttccacgaagagggccccgccataccccgtgtccccatccccagcggtgttcagctcagggtttccagccctttcttctgggccctctgggccccatcgtgtgtgggatgggcatccattgaactgggttttgtagcctcatgctcagggagtggtgtagggctcagcctgtctgctgcccactgactctgccctggcctgcaggtgccctgccagtcagcgtcgtcagcctctgccctgggcggtgtcaaagtggagaggcaggtctttggggaggccaccaagcagccaggcatcaccttcatcgcagccaagttcgatggcatcctgggcatggcctacccccgcatctccgtcaacaacgtgctgcccgtcttcgacaacctgatgcagcagaagctggtggaccagaacatcttctccttctacctgagcaggtgggcgtgtgggttccctctcgc

SEQ ID NO: 6453 - DNA, 2300 bp, Homo sapien
tcttcccgggtccctgggcctgcaggggggctctgctgccctcctggcccgctccagagctgggggctgtgtcaccatcccgtaactcctgaaccccttgtggcctggtccacccccagcagacagctccgaggtgagaactcactgaggcccaggcagggtgacaagggccagctcaccctctcctagggcagggagttgctctgcacagggccctgaggatggtggatgcaggcggggcccccaacagccactgctgctccccctcccttgccctcccaggctcctgccggtgactctccgccagcagcccccacagcgggttcctggtacatcctcccaaccccaagcctccccaagccctcggcctgctgcagggaccctgtgcagccccaggtccagccctcaacacctgctggcacctcaaacccaatgtgccaaaaagagcccgatcgatctgccctgtcctccctcccactcattgtggcctgactccggggacccctgcccctgtaccccctgggtttgaggctgtccctccagcctgcacacaaccaggcccattcccagacccctcctcaccctgctgactgccccggccacctgagggctggggttgggctgggatcaccgagccctccctttcaaccacatacccacggtgggtgaaccccacaccctggcaccctcgagtcctgggaaaggccccagagggactcaccgacacagtgtcctggctcaggtacccggagaggctgcccgagccatagtggatgtcaaacgaggtaccattcttcacgtaggtgctggacttgtcgctgttgtacttgtggtggatccctgccccgggcgacaagggggcccgccggtcatcccgcagcccacgccacggccttagccctcccatccccctacaatctaccatggagcccgcaccccccaagctgcctccccagggtgggatttggaggggatctgaggcccaccatcatgccagagccccgggactgtgggctgtgaccccgggcctccctcccagccacagccggctccctctgtggccaccccagccccagccctgctgagagcaagaccacagctggtggttcacccagaaagtcagtggctggagcagggtggagggctggcctggctcacggggccaagaggcaggagaattgcgttgcccaagtgattcctgaggcagccctgcagcgacatcccggaagggcaggacctgggcgacggggccagggttcgtgactcacagcaagcgatgtccagcagtttgcagtggatggaggggacccacaggttggaggagcccgtgtcgaagacgactgtgaagcactgggggggcgtcccgatgccaatctccccgtagtactgggcctggcaggggacagggtccgtcagggatgggagagggggccccatctccccactgggcctcagaaggcccggctgtccccagagccaaggcccatactggagggaggggcatcacggggcccacagctgccaacagccacccactcccacctgctcagcctgcagggaagatgggccaggtccccagccctcggtcctaatgcccacgggtacttggggtctctagacccctggcttctgtcacctacccctgctcaatacatggtgaggctgaggacttccccacggaaaagacaaggccagaggtcaagccagggtggggacagacgtggccctcagcctgagccccgggtgcaggaaagcccggcctggaagactcccctggtggcccgcagtccaaggtctgagaaaggaagtgacttcctccccaggttggggccatgtcaaggtctgattctgggtgtctcagtgcctgccctgccctccagggtgaaccccaggcttggagggcttccaggcagaggggttcagctggtcaaggggagaaggtaagccttacaatcactgcctgcccagcaaccctgccttaatggcccagggcctcagtttccccgtgtgtacacagggatagcaggcgcaggtgggggtgctgactcagggatcaggcaagtacaaggggtcccatgccgccgagcctctcaggaggcagagagtaagagggtcctggagtttggggtcgcctgggcgcccgcttcccccaggattggagcctgggccaccgtcagccaccagattcctggcaccagcccagcccaatgtttctccaaccgcctggcttcacggagcagcagcagctgctgactcatggccccacagaagtgaccactggcagggggacactcagcaaa

SEQ ID NO: 6454 - DNA, 2300 bp, Homo sapien
tccagggacggtgccacgttagagatggggttccagggacagtgccacgttgaagacggggttccagggacggtgccacgttggagatggggttccagggatggtgccacattggagatgggcaagtctgggctaagggaggagggcccagggtggccagggcagggcccagtgaggtgctgctctgaggaggtggagagtgggcgcttgggcaggggacacttggagagtaaggatgaggtccatctgggtaccctgggtatagggagtgttgttgaaaaaaagccaaacactataaaatatttgaagatatttattctgagcaaatgtgaggactatgacctgtgaaaccacctcagcaggtcctgagaatatgtgagcaaggtggctgggtaacagcttggctttatacttttttttaaaattttcaggtcttttctgtagagacagggtctcaccatgttgcccaggctgatctcaagctcttcagctcaagcaatgctcccaccttggcctccgagtatgctgggattataggcaacagtcaccatgcccggcctggttttacggattttacagagacagatgttacaggccaaaaccataaatcaacatatgtaagatatacattggttcagcctagaaacagggttggcaggggcagcttccaggtcataggggattcaaagatttcctgattggcaagtggttgaaagagttatgttttgcctaaagagttaaagtgggattactcacgcctgtaatcccagcactttggaaggctgaggcaggcagatcacctgaggtcaggagttcgagaccagcctggccaacatggtgaaacaccatctctactaaaaatacaaaacatatatacacatatacatgtatatatatatacacatatacatgtatatatatacacatatacatgtatatatatacacatatacatgtatatatatacacatatacatgtatatatatacacatatacatgtatatatatacacatatatacacatatacatgtatatatacacatatatacacatatacatatatgtatatacatatatagtgtatatatatacgtatatatatgtgtatatatacactatatatgtgtgtgtgtgtatatatatatatacatacgtgtgtgtatatatacatattagccaggcgtggtagcacgcgcctgtaatcccagctacttaggaggctgaggcaggagaatcgcttgaacccaggaggtagaggttgcagtgagccgagatcatgccactgcactccagcctgggccacagagcgagattctgtctcaaaaaaaaaaaaaaaaaaaaaagagttgacgtgagtggacaaaaggtgcccgacctcctaagggaaggagcttctctagaaaacgcgaatttcgccccctcaagagacagctgtgcagtgccatatcaaaacatgtgaaaggaatgtattttagggtggaatactttgcctgccttcgggcctgctgtctgccacgtgaggctgtgccagtgtgaggctggaatttgggatctggaggctagagccatcggtgaggcctgagtctctaagcacagcgcccagagggagagggcggagcgggtccgaccccctttgcggcagggcctgagctggttttccaggtttctctggaagccctgtagaggagcggagggtccattcggtgggctggggactttgaatttaaccttggtttgcaagaggcttccagagaggatgtctgggagcgtctcggagggggacgagggggcgccgggaggagcaggtgcaggagcccacggcgcagcgccccgcgcaggcctggacgcggggacggccgcggcggccgggacaggggtcaccccgcggggccctccagggtgggccgccccacgaccccaggccaggccgaaacgggaatcctccagaccccagaagctgggccgggctgaccccgcgggcgcgagcggcgggaactgtaggcgcggcaggcgcaccaccaccccgccccccgcccgggcgctgtgcgcgtgcgccgaggttgccccgcccaggccaggccccgctccgccccgccccgcgcacgccggccgcgcccacgtgaccggtccgggtgcaaacacgcgggtcagctgatccggcccaactgcggcgtcatcccggctataagcgcacggcctcggcgaccctctccgacccggccgccgccgccatgcagccctccagccttctgccgctcgccctctgcctgctggctgcacccgcctccgcgctcgtca

SEQ ID NO: 6455 - DNA, 2300 bp, Homo sapien
gaccgcacctcccgcctggctgtgtgctccagagcatctggggaatgaccgggccctcccctccaacaggcctaattcagtcccccatgccaggcaggaccagggcacacgagaatggtgaagtcctggggcaactgtcaccatggcctctgcaggctcagtgtcgggagacccagtttctgacctggatacactgctcacctttgaggtcggggcctagagggacggtgccacgttggagacaggcctccagggacagtgccacgttgaagacggggttccagggacggtgccacgttagagatggggttccagggacagtgccacgttgaagacggggttccagggacggtgccacgttggagatggggttccagggatggtgccacattggagatgggcaagtctgggctaagggaggagggcccagggtggccagggcagggcccagtgaggtgctgctctgaggaggtggagagtgggcgcttgggcaggggacacttggagagtaaggatgaggtccatctgggtaccctgggtatagggagtgttgttgaaaaaaagccaaacactataaaatatttgaagatatttattctgagcaaatgtgaggactatgacctgtgaaaccacctcagcaggtcctgagaatatgtgagcaaggtggctgggtaacagcttggctttatacttttttttaaaattttcaggtcttttctgtagagacagggtctcaccatgttgcccaggctgatctcaagctcttcagctcaagcaatgctcccaccttggcctccgagtatgctgggattataggcaacagtcaccatgcccggcctggttttacggattttacagagacagatgttacaggccaaaaccataaatcaacatatgtaagatatacattggttcagcctagaaacagggttggcaggggcagcttccaggtcataggggattcaaagatttcctgattggcaagtggttgaaagagttatgttttgcctaaagagttaaagtgggattactcacgcctgtaatcccagcactttggaaggctgaggcaggcagatcacctgaggtcaggagttcgagaccagcctggccaacatggtgaaacaccatctctactaaaaatacaaaacatatatacacatatacatgtatatatatatacacatatacatgtatatatatacacatatacatgtatatatatacacatatacatgtatatatatacacatatacatgtatatatatacacatatacatgtatatatatacacatatatacacatatacatgtatatatacacatatatacacatatacatatatgtatatacatatatagtgtatatatatacgtatatatatgtgtatatatacactatatatgtgtgtgtgtgtatatatatatatacatacgtgtgtgtatatatacatattagccaggcgtggtagcacgcgcctgtaatcccagctacttaggaggctgaggcaggagaatcgcttgaacccaggaggtagaggttgcagtgagccgagatcatgccactgcactccagcctgggccacagagcgagattctgtctcaaaaaaaaaaaaaaaaaaaaaagagttgacgtgagtggacaaaaggtgcccgacctcctaagggaaggagcttctctagaaaacgcgaatttcgccccctcaagagacagctgtgcagtgccatatcaaaacatgtgaaaggaatgtattttagggtggaatactttgcctgccttcgggcctgctgtctgccacgtgaggctgtgccagtgtgaggctggaatttgggatctggaggctagagccatcggtgaggcctgagtctctaagcacagcgcccagagggagagggcggagcgggtccgaccccctttgcggcagggcctgagctggttttccaggtttctctggaagccctgtagaggagcggagggtccattcggtgggctggggactttgaatttaaccttggtttgcaagaggcttccagagaggatgtctgggagcgtctcggagggggacgagggggcgccgggaggagcaggtgcaggagcccacggcgcagcgccccgcgcaggcctggacgcggggacggccgcggcggccgggacaggggtcaccccgcggggccctccagggtgggccgccccacgaccccaggccaggccgaaacgggaatcctccagaccccagaagctgggccgggctgaccccgcgggcgcgagcggcgggaactgtaggcgcggcaggcgcaccac

SEQ ID NO: 6456 - DNA, 2300 bp, Homo sapien
atgctcaggctgatggggacaggaacccacacactgacaccaatggagtacagggctctaggtatttagaataatggggtacacgtgtctagatgtcagtgaattgaggtggaagctcagctcctcagaggcacattacagagccatgggaatgagcagctctcagacagggcagacacgagggcagaggaggtgcacccagcagtgagatgcctggagcacaggacgtccaaaaccacaggaatgaggcaccaggctcccggccctgggctgacacccaggcttaagtaccatgtgtcatgggggattcagagggttcaacaggtggggggcacgctgtcgtggcaccctggtgacaacaggagaccaaggaggggcaggtcacctggccctgggcatgagggagggggctgcacaggcactcaggtccccaagctgtgtctcccaggcactctcaggcgtggggtgtaaagatgctgatgccagggttccccatgaacacagacccccctaaacaaggtaaatggggtccacacaaaagttgtgggggatcaggcccctgccatgaggtccccaaggcccttgggagatgaggtcaatgcggggaggaccgggagaacccccgtcctctgacatggtggctgcagtaccagccatttgaggagtgggttacatgcccccagacttccaggtgacgggggtggccacccagacacttcaagacatggggttttcatcaccaaaatccagatgcagattctcagaggataggaactgagcccatggaatcagcaccagccatgttcagagggtgcagacccccatgcccaagacggagcagagcctcccagaggctcggtgatggggtgcagcctccacggaggctcgatgatggggtgcagcctctctggaggctcaggtcatggggtacagcctccccggaggctcaggtcatgggatgcagcctcccagaggctcggtgatggggtgcagcctccccagaggctcaggtcatggggtgcagcctcctcccagaggctcggtgatggggtgcagcctccccagaggctcaggtcatggggtgcagcctccccagatgcctggttgatggggtacagcctcccgggatgaagaggcacagacagtatgcatgaaaggtgagtgtggcacacacaagctaagacacagagaatgggcatagggcatcccaaagcacagagaactgtggcaagctgagttcccccatccccggccatcccgggccccagctgatgagggtgccccagccctgcagggctcagcagctggggtcagagtgggtggggcaaacacgcgctcacccagcacacttttctttgtgtgccagtgactcctggctccccagagccagcgcttgctttgcagtccaacctcaagcattccccaggcgacctcagaggaagcgtccccatccaggagccccaccagggtctccatgaggctgctggctgccaagccaccgtctcggggcctcgggactggcctcgggctccagctctgtttggttttctccttcctgccctggaacctcagacgccagtctggctgtgaaggcgcccatatactggggaaagtacaaagcccctacacagctggctgcagagaaccgcgcgcagggcacgtagctcagctgtaccctggggccagcgtcgagccaccccctgcatgtgtccccttgcttgcctaaaagccccactagggcagcctctggcccttctcatcccagattgagtcagactaggagacagacccataccctgtgcaaacaccagaaggacgtacaagtccccacacgcccagggccgcgtgtgaccggacgggcccagacgtgcacatgcatgcccacacgtcctcctgctgtggcccgaaagcatcctcggagcctgggctatgtcctccacacttgctgcctgaccagccccgtggggccggccccgctgggacaggttttcccgttaagcattaaccaccagcagataagggctctgagggaacgccctgacctgggatggctgctcctcggtaggcccaagtcatggatctgactagagtgaccagaccagactaactggcagagcagagggagaggagcttaggctataggctctgctcgggggtccaactgaagcaagaggcactgaggttagaccagagtgaggacttccagccactcacccgggggccagctgataagaggatcactcattaggaaaccaagaactcaagggattgggtcagcccagcaggagacaaaggcacag

SEQ ID NO: 6457 - DNA, 2300 bp, Homo sapien
tggcaagctgagttcccccatccccggccatcccgggccccagctgatgagggtgccccagccctgcagggctcagcagctggggtcagagtgggtggggcaaacacgcgctcacccagcacacttttctttgtgtgccagtgactcctggctccccagagccagcgcttgctttgcagtccaacctcaagcattccccaggcgacctcagaggaagcgtccccatccaggagccccaccagggtctccatgaggctgctggctgccaagccaccgtctcggggcctcgggactggcctcgggctccagctctgtttggttttctccttcctgccctggaacctcagacgccagtctggctgtgaaggcgcccatatactggggaaagtacaaagcccctacacagctggctgcagagaaccgcgcgcagggcacgtagctcagctgtaccctggggccagcgtcgagccaccccctgcatgtgtccccttgcttgcctaaaagccccactagggcagcctctggcccttctcatcccagattgagtcagactaggagacagacccataccctgtgcaaacaccagaaggacgtacaagtccccacacgcccagggccgcgtgtgaccggacgggcccagacgtgcacatgcatgcccacacgtcctcctgctgtggcccgaaagcatcctcggagcctgggctatgtcctccacacttgctgcctgaccagccccgtggggccggccccgctgggacaggttttcccgttaagcattaaccaccagcagataagggctctgagggaacgccctgacctgggatggctgctcctcggtaggcccaagtcatggatctgactagagtgaccagaccagactaactggcagagcagagggagaggagcttaggctataggctctgctcgggggtccaactgaagcaagaggcactgaggttagaccagagtgaggacttccagccactcacccgggggccagctgataagaggatcactcattaggaaaccaagaactcaagggattgggtcagcccagcaggagacaaaggcacagaggggaatggcccgaaggtgcctggggctggaagcagaggcagtggcggagccaagccggcccacctggctctctgtgagccccctgccccacactgcccagggcagcccccgcccggcccctaccctcctcacacttggttccccccagcccacagcacctgaggatgccctcttccaagccaggcagccctgcacctcaggacccctccccgtcgtgcagaacctgctcaaaccaggttcagccaggccacctcctgctgcccctcaccaaggccagcctgacgggcccatcgccccctcctgcaaagctaggtagggctcagggtgcccccagccccaagggacccttggaaataggctggagcccagatgctcagcctctgcgtcttggggagaccttcctcccaaagggagttgcccagctatcacgggccagcagttccggccacaaggtggggttcctgcagccctggcccccgcaccccctcctaccccaggagagagttccccgtcaccagaggcagtgctgtccgagagctggacccgccttcgggtgtctgagaggaaggcctggtggctggccggccacaggaagtggtgggcgtcaggtgagagcatttacacctggggggctgccagccccagcactcggggaaacgttgcttttccagaggaagggctcacggaaaggtgttcccacggaagcagaaaccattccgtatagactcaccctggagggaagcattagcaagcctgaaatggtgcccgccttgggctaacatgaagtctaaaggaggggctcacccccgttctgcctggtgggggctgggggccctaacggggtggaattcagcacaaaacgtcatggcaggtctgggggtcctggggtgaccagggagggttccctggaagaggtgggctcacgctggccttggagggtgagtcggatggggatgcggagaggccttctaagcagcttggcagctgcaggagcagagcagccgccttcgtggggagagaggagccggtttccagagccttaaggagcccgctggagcggtggccaggggggagccggggaggagggaccgtctccctttcctgggaaaacatggcgtgaactcccagagaaggttttcccagcagggccacaggagacagacagccaaagctagacaacggggagagcagccccgggaggctcaggcagggagggcggggga

SEQ ID NO: 6458 - DNA, 2300 bp, Homo sapien
cacgctggccttggagggtgagtcggatggggatgcggagaggccttctaagcagcttggcagctgcaggagcagagcagccgccttcgtggggagagaggagccggtttccagagccttaaggagcccgctggagcggtggccaggggggagccggggaggagggaccgtctccctttcctgggaaaacatggcgtgaactcccagagaaggttttcccagcagggccacaggagacagacagccaaagctagacaacggggagagcagccccgggaggctcaggcagggagggcgggggattcccagatctgggaggggagacccgagagcccccagcgcccaagggtctccagggcactgtccccgggagccatgagggaggccgggtcccgaggggcggacggcgccacctggtggccatgcgcccgctgcacctgcacctccctggggtcccggcggtccggagggaccccgcacctccccaggctttgggacccccagcatcggcagccagcgcccccagggtcctggggttctccggagcagcttctgggtggcccctgtgctcctctggggacaaggtcaccaggctggcccgggagtgccgctggccggccgcggcaaatcactgcaggggagctctccccgcccggccctgactgttcttagactaaaggaggggggacgccagcaaagcgggggcacaggggaggggcgcacgcacacgcacacgcacacatgcccgcactcacagatggagattctgtattggcaacttatccggaatctcaaccataaaaatctggagtgaagctactttaatctcagcatgtatacaggctctgacatttcaaaaagagaagttgccttgaaactccacgtagggaggaggcagtggcctgtttgaatctggccggcacagtcccgctccagggaccctgcggacccagcccattccatcagccaccaccagtaggagcgctccgccagccacgtgtgggacgccggacccacctgggagtgtcccccaggagctgaggggctgccgaggcccgtgagcttcactgcacacccacactgcatctgcaggggactcacccaaagggtcccccgaactcgacaagctccgtcatttgtgaggcccagtgcagaatgaaaatgtgcagcatcttgttccaaaattaagaatttcaagatggccccagcacgcattaaaccaagcagggacccctctgagcatggggccctgcgcacagggtgcagcctggaaagctggccctgacctccgcatctcctttttgtacctataatccctccattgtgctggcccctgtgttctggggacaggctgggcttcccaggccatgctggcctccagagccacaaaactagagctcccagcctcggtccactcgtctgtaaaacacctggcctgctgacctcacagggtcaacatgcgtgtggggctggaacctggaccctccctcccctccttgagctgcagccccctcatctgaacactgggggtttgggtccgttctgggagtgcagctgcctctcccagcctgccagggagtggggcattgatgctgtgtgcgcgtgcgtgtgtgtgtgtgtgtgtgtgtgtgtgtgtgtgtgtgtgtgtgtgtgtctggagtcatggcagggtccctttctgtctgtctccttgctctgccccagactggggggctgcagaggtgagggtatctggcctcaacagctgcttattcccgatgggatggcctgggctgggcccctgaggccaggctgacttggacatggcaagaggggtcccaggctcttgtgggcaaagcaggggaggcgccaatgtggaggaacagagtctcctggctggctgctgctctctggagcgggtggagtcagggaagagctgagctggggagtcaccctgggcctggggtcaccgtaggccccatgtagcaccctggttcccctgcctgtaggtgacaggagccagcccagccaggtgtgctccctccccaggccctaggcaggcgggtacaggggccagcagctgcgcccgccccaccttccttcccacccacatgccgaagggtggccaggcaggcaggtggacgagtccaggcagcggctgagtcagtgtgtgtggaatgttctggccgctcccagctgcaccctgcccctacctgccaccacctcaccttcatcctcaggcgctgcggccctgagcccctgccaggaatgcacctttagcccaggcctgctcagtgagctccgccgacagccagccctgc

SEQ ID NO: 6459 - DNA, 2300 bp, Homo sapien
gcagccccgccttcgcctgcgcctgcccttgccccactcctgaatgcaccacatgcctctgtctccccgctgagcccaggcacttgcccaggccgccctgcaggaccactgcaataaacgccttctcctgccactgtgtgtccggctggagcctggaggggatgcagaaatagggcccgggcccgctcaccagggtcccctgacaaggacgggggaggggctcctctccagactcagccaggccctgaggcctctgaccggtccctgcttgaccctcgggtaggggtggggaacctccccggggagcacagatctcccctctccgggccgcctgggaagaccggggaggtgggggccagagagtcgggaccacatgggatggggcgggctagagccagccctgtagggacagagtgggcaatggtgtctgggggctggtgagcatggagggaggacccccaacacctcagagacctgtgctgcagggccttccctgcatgagcagcagggggcagcagatgccttcggaagccgctggggcctttaggggctcagtcctggccggatgcccctcccagtccccacacatctgggctgccttagcggctggggcctccacgctgctgtctcctctgatcctccccacggggctgcgaagccggcagggctggggccaagagcccccactccgagagggtgccaagtcacggtccaggggacctctgcagggcgggggcctgggggctgggggggcgatggcctcgggcctgggtgaaaagggcaatgccaggcctgcccgggcagccaggagggccccaagcccccacgggtgtgagaggctcccaatgcaggtggcgccattctccttaggttgaaggatgtgttccaagtcgcccggcaaggggactgcagcagggcgttctgggcaggcgggaggggcccagaggcacgtgcggcgtgcccctcactcctggtcctgctccccaggcaggaagatagcatcacgcagggagggggcagcccccagccctcggccactgtggcagggcccagaaggccacatctggaggtccaggcctcaccccagaagccaggcttgcagaagggggtcaggcctgggctgaagtgggaaacccattgcaggggctgagccggggagctggccccgcagggagaggctgtggctgtcgccagcaagcagccaggttggtggactggacgctgacctcgggtgagatgggctgaggcgaggtgtggatactcgcagctacccctcagctgacccgagctgtgtgcccggctgaggccacaggcaaagccagggacactgtcctcaggctccttacgagaacgacagaggcatctccagcgcgtcaccgagccctaaatagagtagcccagccacggcaccccccaccaagacttcttggactgggcggcagcacgcggccaggccaggcggccggacaggtggggaggtctctgtggctctccacgcccccattggtctgaggaggactctatgccctttctgagcaggggcccagcctgggggaggccatttatacccctccccctgggcccaccagcccaactcgccgctgccggcctgacctcgctcccagccctgctgcccagattctaggtgaggcccagcccggcccgccgaggccgggggacagggcgtggctcgagctggtttgagggaggacttcctggggcgggggtctgggggcctgggggatgccaccagcagccccctttggggcctgcacgggtccgggagtgagaaggagaggctttggggaggcagctgtagcgagaggcaggtattagacactccctgaccaccaggcttcacctctggggaccctggaaggagagtttaggggtcaagaagccccagaacctgagcccccaggccaaactgaggagggatttcttccatgcacttaggcccaaagccaaagagagagggttaaaaataacagcgtcactcaggcggccacctgcgctggcccatcccaccctccctcggggacagctgcagctcctcaggctatgcctgggacattttgggaacactttctcctcttacttctcaccctggggaattccaagacattgtccttgaaggaggtgagagtagggggaggaggtgagagtagggggtgggcgggagggggctgtcatcaggagccctgaacccctcaccacctacctgatgggcacaggcatcacggtggcaagggcctggccaacacctctgtcttcctctccccacaggctccaagctcagg

SEQ ID NO: 6460 - DNA, 2300 bp, Homo sapien
catgattcagcttcaacagggttgggtaggcagaggggaggagggcacactctccaagcccttggggcaggccgatcgtcaccccagccttcagctccagggcctgtgggcctccccctccgcccgagcggcttcgtagacctggggctgagtgtggttttgtgctctgtgtctccctcttgaaattcttagggtttttttgtttttgttttgttttgtttgagatggagtctagctctgtcgcccaggctgaagtgcagtggcacgatcttggctcaccgcaaactccgcctcccaagttcaagcgattctcctacctcagcttcccgagtagctgggcttacagccgcccgccaccacgcctggctgatttttatatttttagtagagatggggtttcaccatgttggccaggctggtgtcaaactcctgacctcaagtgatccacctgcctcgggctcccaaagtgctgggattacaggtgtgagccaccgcacccggccaaaattctcagtttttgaaccacagggttctgcattctcattttgctctagctccaaaagtgaggcagccggtccagccttcgggcagtagagggcaggagggggtggaccccagcctccacctgcctgtcctcttcctggcaaggttcctgaagctcccagcgacgatgctggggctgcccttctgcaggccaagggaaggacctcaagggcaggaggacacaggcattgcacctgccgatgcagtgcctggacgggtgggtgagcggaatggctgcaacctggaggcgagaccctaccaccatgaggggagccgtttcaggatggcctcaggatggaggccgcatggtgagaaccgcagggctctgccatgtgccactctgcaagggggacttgggggcccttagggacccccagggaggaggcgtggggaagacacaggcatggcctgttcatctccatggcgctgggcctgatctggttttagccctgcccatcgtctgggccacggatccctctggtgcctccactcgtggggctctgaaagcctctgctggtctttgtggtgtgtttggtgggtggggggctcgctgagtcccaaggaggcggcctccggttcggccccaccctgatgggtcaacactctgggcccagggccctcccaacccctggcctctctccagcccctctttgccttgggaccccctgtaagtccttgctggttggatttctcaggcccagccgctggccagggctcccttctcccattctcctgcgctgaggtttccagcagggaagccttcgccacctctgtggctgccctactctggcccagcttaagtcctcccctgcctcagcttttggggtctggctcctgcagtcatgcatccctcctcctgaccctggagccactgcgtggtcactcccagaagctggggacagtgagggctggaaacagcctccatccctcccctcgggctggcctatgcctcttgggagggtccctgaggcactgcctttagagcctggggacacgaaccactcggtggtcaactccagcgaccagagcacggagagcaaggggcagcggggggacgaggcggatgcccgacagctcggcatcagcaaggcagtccaagacagaacaaggcacccgacgggtagaacgcaggggcatcccgggcacagcccccaaagccacctgggacccacagctgtttgatgtgctcaaggctatgaccccaggcttcgagaaaagactccaccaagttccatgagcacctgtaggagagccggcctctgggtagatttcacccaaagaagctaaaacgctcacgtggtgcttatgggatcacagacgtgtttgtccctgatgctgcaggagaactggccactcacaggtggacctgatggccagagctactagcggggaccaggggtaacatgggtccccctccccgagccatgaagagctgcctgcggccatcttggccctcgcaccccgtctctgtcaccccaggcccctgtaacttgcttaacgcttcctgaggggtggtttgggtttttttttttttcttcctctcctcttgtagcaacagattaaaaaacaacaccctgacccaagccgagacaggttccaaacctcaacctgcagccggaagggggaagtgaaactcggctgggggtgggggctcagaagccgccccagaaagcactgaaagccacagcacgtacacccactccagggatctgccagcaccctgtggggcccagactacaggctgatggcggaggctt

SEQ ID NO: 6461 - DNA, 2300 bp, Homo sapien
ccagtctggtgtgtatgtagggagtggggacggacttcctgactcccgcagtctccatggggtagcccaccacctgagtcaccacagcccggtctatggtcccatgtggaattttccgactgttgccgccacccccggcgtgctgccctccgcggtgattcacccgcttgcccgtctgctcacagcctcacccttgcttccctcagtgttcccaaggtgctgcgcaaccccaactccctggcctggccagggtcatgatagctggggaggcaagaggtggctgttctccttgaatgtagggacagagggtggcatgggcagatgagtgcccgtgcacagatggtggcccaggactaattgggtggccagcggccggcagatctggctctggttctggctgtgccaggccctcactctgtgaccttggatgccagtgctgctggctggaccttggtttctccatcctggacatgggtacatggtggttctgagtgccagcgagctgggcaaaccgccggatgtgagactgccgtcgcggagctgaccctcggtgagccctgaacatgcgtcccatcccacccctcgtccgtccggccactagccccgagtgttctccagtgagtcacagcagccaagcccaaccagaggaacagagggctgggctgctcctccctgggccagggccagaggacgcgggcaaggggggcctggctggcgagggcaccaggcccactttgtgcccactggccacctcttgggaccatgctgtgccaataccaaaccgaagatgctgcgttggtggcgtctctgcctcttgggtcaactctgcagtctggctggggggttgggcccaccaggaaaggcagcagcctccccatttggggaacagagagggttcttggggtgccaagccttctctggaggtgacaacaagagcagaggccgggaatgaacaaagggaaagtggagaaccaggagcgggggagaggggaggaggggagaggaagggaggggaggggaagggagggaggagggaaggagggagggagacagagatagggacagagacaccagagggaaaggagagaggagagaggggctgagtgcgagacggggaaggaggggacgggacaaagaggaaccagcgaagggtccaggcctgcgatgatggtgagggaggtggcaggttgacgaggggctggacaagaacggccgacgaaggagaagaacagaggagggcccgggcagggcctggcagagggcatgaggcactccgaggtgggaggcggcgatgggcagaataggcccctgtgcctggggcaggggcaccacagagggctaggggagaccgagaagcgggcagcggctaccaaggtggcctgagggcagaggcggagggaggaagggaaagaggaagggagggagggagggaaggaggcagccacgctgcccatcagcgcgccacagaggtctggctgagccccacgctgctgggctgggagagttttcgctctgacatttttactcttctcggaaggaggaggaggtggaggtggaagagatggaggcgggaggagaagggggctgggggaaacaaaagagaagcagctgctgagagtcctgaagtaggagaggggaaagggagacccacagtcagggagacccacagggatggggacacagggaccaggctgcctgcagggagccggcctgcagaccctcgtgccaggagccgaagggagggaccaggctgcccacagacccctgtgccaggtgccagagggagggaccaggctgcccaagggagccggcccacagactcctgtgccaggggccagaggggccaagacaggcaggcagagggtcacagggacaaggagaacaccagacagagagaagggacaggggaggggtgacagccagcgagagaccgagggccagggcagagcgccaaggaagtgcaggagtgagaggggccaggagaggcaggaaagccaaggagagctgggcacaggggggcaggggtgcgggaggagggcagcagagaggagggccagcaggacaggagcctttgagatgctgctctatccccggggctggggtcaggccaggtcgccgcctgagcagaggctgcagcctgggcagtcccgggcttctgaggaggaactctagcagacagggcctggatacctcttgaggtaggtccctcctgccctggctgggcatggagggcagggcagggtgcccatgctgggctgccacatgcaccgggccactgggcctccccccagcttcggtag

SEQ ID NO: 6462 - DNA, 2300 bp, Homo sapien
tcatcccagcctccccctacccctggccccccataagcctcctcctcctgggcttccaggctctgctggtcagacctccctccctgcccaacgggaatgtgttttcccaggggacgctgctgtccaccaggagctctgtggcctgggatttgaggagtgcctggggtcaatcccccaggctcaccagtgctacttaacaaatgggcccaagagaaggaagtgcagcccccggaggaggggcagagcccctgcctggctgtgcggtggctcacccccttgtcaccaggggctcggccatgagcatccgtccagcgggcccagcaccaactgcagccccaggtgagcaagccgcactcaggaggcactgaaaccgtgtgggcccaggctcggggccagtccctgtggacctggggaggagacactgaagccgcgtgggcccaggctcagggccagtccctgtggacctggggaggaggcactgaagccgcgtgggctcaggctcggggccagtccctgtggacctggggaggagacagtgaggaggggacctcacttgcggtggtcagccagtgggttggtggcataaggacccgtccctttgaactcccttggaacttgtcctgatgggggctgggcagagggcagcaagagtcccttgtccagctaaggggagccaccaaggtgagctacatgaagcaaggctgacacgtgtgcactaatacacaccccctccaggacacagacccagaggccgctgcaccccacccacccaccacacccacacacacacatgcacacacacacgaccacccgggacagtactgcgctcaccaccactgccatgatctcttctctgcagcctccaacagctcggacttccccagtcccagccctgcaggccaggcagactgccccctacccactccctgttggataaaggagtgagccaggctcagagaagctgtgggtgaagagacttcaaggccactcagccgggcatgatgagcccgggtccctgggtccctcctccacccgcatcaccccacccctttcccggggaccccttgggtgtcctgccatgtcaggtgcagggctgggagaggcattgcaggcaaagtgctgtgtcctcagtgatgaaccctgaagggccatgctaggtgcccgcagctgccagggaataaattcaatgcagtttacatccattaaaaatggtgctctgggccagtgggaaaacgtgtcccccctgccccgtcgccccccacccctgccccagcgattctccttgtctacacccagtgcaagcccaggggctctgcatgtagtcccataacaccattttctccaggtctggctgtacccagcccctgccagaatgcggcttctggctggcagggtcaggccctgggctgacctacccccaatgcctccctgccaagtctgcccttccaggcacctgggagtctgccctgtgcctcctgcctgcccctgggcaactcggggctctcccagggccagctcgggcaaggcaagtgttagggatggtcaggggacctcaagaggacttcagcccactcaactccagacgtcacccggactcagccagcggcctggccctgctacctgtggggtcctggctttgtgagagggcaccaggccggctgagagtgccttgtagcctggcccggagtgaagaggggggctggggatcagcctggcagacgttcttatcaagcattgaggtccccggagccccgtgcccacccttagccatggctctttgggcggtgtgagcccctccattccctccatctcgggcacacatctgcccacacatatacagatgtggcagccacaccgtgcttggctctccgcagggctctaaggcccctcaggcagggacccaccctgagcagcctggtccagggacctctggggctcctgatgtggccagtggggcaggaatgggctggcagcctgctgggctggccctgagggggctgggggaagccaggcctccaaccacagtgtccaaaagggtgtggctgccttgggcccatccaggcctgagatcctgagggtggggtagcccccgccctggcagggctggaagtcggtcttcggacagagcccgtcctgcccagaagcccaggcgagccagcagcaggggtgcagggaccgagtggcccagccccctgggcagggtgtcagggccagagcccagaggacggcggttcaggcttcagtcccagccggcgaaccagagctgggcagagcggccagcaagcggcagccagggtgcc

SEQ ID NO: 6463 - DNA, 2300 bp, Homo sapien
ctcaactccagacgtcacccggactcagccagcggcctggccctgctacctgtggggtcctggctttgtgagagggcaccaggccggctgagagtgccttgtagcctggcccggagtgaagaggggggctggggatcagcctggcagacgttcttatcaagcattgaggtccccggagccccgtgcccacccttagccatggctctttgggcggtgtgagcccctccattccctccatctcgggcacacatctgcccacacatatacagatgtggcagccacaccgtgcttggctctccgcagggctctaaggcccctcaggcagggacccaccctgagcagcctggtccagggacctctggggctcctgatgtggccagtggggcaggaatgggctggcagcctgctgggctggccctgagggggctgggggaagccaggcctccaaccacagtgtccaaaagggtgtggctgccttgggcccatccaggcctgagatcctgagggtggggtagcccccgccctggcagggctggaagtcggtcttcggacagagcccgtcctgcccagaagcccaggcgagccagcagcaggggtgcagggaccgagtggcccagccccctgggcagggtgtcagggccagagcccagaggacggcggttcaggcttcagtcccagccggcgaaccagagctgggcagagcggccagcaagcggcagccagggtgccctgggcactcgacccccagatgcccctgctggaaccgtaaaggggaggcaccctgaggccagagggagcatggccccggggactgagcatccggctcagagcggcttggcagaggtcggtggactggggttaaccacagaggtctctggagggcagacaggagccactgcaagtgggagcttgtgggagagaagcccttgggtgacccctggatggggcggggaccattagggagaagggtgaggggcttggcccctgccccaggctccaagtgggctgagacccgggaggcttgagggtcggctgctacccatgacgggttggggaggtattggtgcgagctgaggtggtgcttgcggaggtgagattgagggccgggcctggccagggatgctgggaggggggcaaccctgtgcctggggctgtgagggtctcttgacgagaacaaaccctacctggggagaagtgacagagaaaagaaagaaagaaagcgaaggcacgagaaagaaatgagagaaagggagggaaaaatgctgagagggagggagagcaggggctgccttgaaggaggagggagggggagcagaagcgggtgcagggtggtggcaggatgggaagggcagagggaggggctgaggtgcgaatggaagctgtgtgagggtcccgggcactgccccttgccgccgaccccaggtgtgggaggaggggtctctcccacgtgggccgcacctagcaggtgccggggcagaaggctcagagccgctgtctcacacagcttcttggtgctccaaagacgggcggtaggaggaagatcaaagaagcgagaaatggatgctggaggaacgcagtgaggccaggcgagggctggcgagcttgccaaggagagggcgggcgaggaaaatggggcgccccacagaggagggggcgtggggggggctggttttccccgagactgagaaatgaatttctgcacccggactgggaccccctgggtcaggaccctccactcacattcaggagcagcacctcttctggcctctgtccctgcctggtcttccccacacccggttcttgggggttgaggggttggagccccagccacgtcatcagctccctgggacccctgcgtgagacgtgagaggtgcacctccgagcctccgtttgtgcatctgtaatggggatgataggactgcgcccctggcgaccattgtgaggacggaggcgctggctgcactggtgctcactgtgcctctttaaacggggatgtctggacctctggtgcagaggaccaaggccggtccacttgacctcagccatgaggacatcccaaggccatgtgagtctcccacggcccactgaagctggtccttcataccccattttgcaaacaggaaagctgaggctcagggaggcaccaaagcttactcccatcctggggcttggcagggggtgcccgcagcacccggggacatacaccggggagtctcctgggaaagaagtgccggcccaggggcagactcttttctgctctgccatgtcttccctgcacccccagggatgatgagtctggg

SEQ ID NO: 6464 - DNA, 2300 bp, Homo sapien
gcagggtgtcagggccagagcccagaggacggcggttcaggcttcagtcccagccggcgaaccagagctgggcagagcggccagcaagcggcagccagggtgccctgggcactcgacccccagatgcccctgctggaaccgtaaaggggaggcaccctgaggccagagggagcatggccccggggactgagcatccggctcagagcggcttggcagaggtcggtggactggggttaaccacagaggtctctggagggcagacaggagccactgcaagtgggagcttgtgggagagaagcccttgggtgacccctggatggggcggggaccattagggagaagggtgaggggcttggcccctgccccaggctccaagtgggctgagacccgggaggcttgagggtcggctgctacccatgacgggttggggaggtattggtgcgagctgaggtggtgcttgcggaggtgagattgagggccgggcctggccagggatgctgggaggggggcaaccctgtgcctggggctgtgagggtctcttgacgagaacaaaccctacctggggagaagtgacagagaaaagaaagaaagaaagcgaaggcacgagaaagaaatgagagaaagggagggaaaaatgctgagagggagggagagcaggggctgccttgaaggaggagggagggggagcagaagcgggtgcagggtggtggcaggatgggaagggcagagggaggggctgaggtgcgaatggaagctgtgtgagggtcccgggcactgccccttgccgccgaccccaggtgtgggaggaggggtctctcccacgtgggccgcacctagcaggtgccggggcagaaggctcagagccgctgtctcacacagcttcttggtgctccaaagacgggcggtaggaggaagatcaaagaagcgagaaatggatgctggaggaacgcagtgaggccaggcgagggctggcgagcttgccaaggagagggcgggcgaggaaaatggggcgccccacagaggagggggcgtggggggggctggttttccccgagactgagaaatgaatttctgcacccggactgggaccccctgggtcaggaccctccactcacattcaggagcagcacctcttctggcctctgtccctgcctggtcttccccacacccggttcttgggggttgaggggttggagccccagccacgtcatcagctccctgggacccctgcgtgagacgtgagaggtgcacctccgagcctccgtttgtgcatctgtaatggggatgataggactgcgcccctggcgaccattgtgaggacggaggcgctggctgcactggtgctcactgtgcctctttaaacggggatgtctggacctctggtgcagaggaccaaggccggtccacttgacctcagccatgaggacatcccaaggccatgtgagtctcccacggcccactgaagctggtccttcataccccattttgcaaacaggaaagctgaggctcagggaggcaccaaagcttactcccatcctggggcttggcagggggtgcccgcagcacccggggacatacaccggggagtctcctgggaaagaagtgccggcccaggggcagactcttttctgctctgccatgtcttccctgcacccccagggatgatgagtctgggaggggctggtcagccatgaaagcttcggggaggggccggtggccaggccgggcaccccagagctccacaggcagacatggtgtgggggtgtcaggaagagggcctggctgctgggtgctacggtaggaagatcccggtgctgtgggagtggagcaggtggttgaatgccaggctggcttggtccttctctctgggtgccggctgtggctcccgcccaggtgggcaccacgtctgaataatgtatgaagcctctggttgcgtggaggatgggagcgcttcgggcagcatctgtgggcagagacttcagggatgtgaggtacatctgggcatggctagctgggaaggaaagaggatggcagagcctcgagccgttgccagggactggttgcgtgtcccagaacgtgccaaaagcctgcctcgtgagcacggcaagagctctgccagggcagtcccagctggcccaggcgccgcagcgctcccgagggccgtcgagcaaaggcgggaggcgcagccgggctgtcggtggacctgtaggtatcagggctccttggtcccctcctgcgggaagcaggcaccgagtggggctgcatgtagacgcatgcgagggtgagagctgcggcggagg

SEQ ID NO: 6465 - DNA, 2300 bp, Homo sapien
ggcctggcttttgtctgagaggcttaggggagacctaggagagattagatcacgcgctggcagggctgtctggccaggggactggggcccagtggggatcaggctgcagggtcaggcagcggccactggccgggaagaactgagaccccagtggggagaccccagccctgctccctgttctggcctgggctccctccctgggtctgggataataagccctgtaggagtgtagagaccctggaccccctctcaggctctaggagggcgatgggaggcagggccatgacagctgaggctgcggtgtctgcaggacctggaccatctgagagctgctgggccggggctctgatgcccaggtccaggccagcctgtgcctacctctgtccctgaggggggcgcgtgggaccccaagaagccatggtttcaggctctgagggcagaagcactcccttacctcagtttccccatttttgaaatggctcaatcggctgggtgcggtggctcatccctgtaatcccaccaccttgggaggctgaggcgggcggatcacctgaggtcgggagttcaggaccagcctgaccaacatggagaaaccctgtctctactaaaaaatacaaaattagccgggtatggtggtgcatgcctgtaatcccagctactcaggaggctgaggcaggagaatcgcttgaacccaggaggcggaggttgtggtgagcccagatcacaccattgcactccagcctgggcaacaagagtgaaactccgtctcaaacaaacaaacaaaagaaacagctcagagagactccgcagagggctctgaaataaggatggggtggggttgggtgagccgaccctgtaaggtgcccccagctatggggttaggcccaggcaggacccatgagtctgcggagcttctgtgagcggggctggtggtgggacaggaggtgtcctgcctggacgtgctcaggccctcctttcctcagccttcgacctcccctttctccaacacgccctgcctttggggtgcaggagggagcacccgcaggtggggtggaggtgccgcctggcggtgggctgcggccagtctccctggactccagtatcttcttcctgggccctccagggtcacctgggtctaggtcctggttctacttagggagggaggcaggctgggagagggggacagagggccttttgtcctgtccttgagtttcttcaggcttgaatgggccttggagtcccaccttcatccccacagggcacaggggtgcccagatcctcacagggccccaggaccctcgcctgggccagagggcacctcatgaccacgtgggcagcctctatttaaagatggacaaggtgaggcctgagggccggcctgggactgacctcgtggacagggctgcctgcaccgtgtggccccagcaaggcctgtgtagatgggaggaatgggtgcaaaacagcacctgtgtcggctgtggcgtgactgtccctctgtgtcccccactaggcccactgctcagtggagcgtggaggacgaggaggaggccgtccacgagcaatgccagcatgagagagacaggcagcttcaggcccaggacgaggagggaggcggccatgtccccgagcggccgaagcaggagatgctgtgagcagccccataacgcgtgcctgggctctagcccctatccgtgtaccctggggcctgggcagagggggaggtcaagggcctgggcttgggggttccagtgcaggatgagagcgaggaagggcccccaggagcaggcgtgggagtgggtgagtgctcctggggcgagggtggccacagccctagaggagggtctgccaatacctggctgcctcctgggcgctgacccaggctctgtgtccgtgccctggcccttgctcggaccgcctctgaccccagccacgcagcctggccgagccccccaccagactcccccgccagtgactcacagagccacgtccaacttggcggccaggctggcttgcttcctccttgggcccaggaggcctccgcggctgggctgggctgtttttccaataatgcttcccttccttctggcctcttttgttccattttctccaagtcagcagccttgggcagagtggggttcagcggtcaccatagtcaggcccttggccacccccaccaagggccccagctatccaggggctccccctgccacatgggaggcctgagaagtcggggcttaggaggacctcatgtagggtcctcatgtggggaccagggcagcccttggggagccccaggatga

SEQ ID NO: 6466 - DNA, 2300 bp, Homo sapien
actcaatattgtaggactgtgtgtgtttgtgagttttcagaaacgtcagaaaaaagcaattaactctggaaatgacgtaaaatggtcatggttaaagaagaactgacaaggaattttgattacttctgtggcctacaataacttaactgtaattaagagtgacagcatatacccggatgtatcagaattttaggaaccccatacaattttggagcatatattaatgacgtattcacaaacaatatctcaaataaggttaaacatcatttcttatttggcagtgcttcccatgtaatttaatttatcaaatacttctgtctctctcttttttggatactataggggcccttagtagctctctccactgggaaaggctgttatcgtctttgttttaaactataaactaagtttctcccaaagttagttcagcctactcccaggaataagcaaggacaggaataagcaaggaggttagaagcaagatggaagggccaggcacggtggcttacgcctgtaaccccatcactttgggaggccgaggtgagcagatcacaaggtcaggagttccagaccagcctggccaatatggtgaaacctcatctctactaaaaaaaatacaaaattagtcgggcgttgtggcagatgcctgtaatcccagttacttgggaggctgaggcaggagaatcgcttgaacccaggaggcagaggttgtggtgagccaagtttacgccattgcactccagcctgggcgacaagagcaaaacaccacctctaaaaaaaaaaaaaggcaagatggagtcaattaagttagatgtctctcaccgtctcagtcaaagagacaatgcaaaggtggtttcagctttttcctaaatattatcagatacatgtcatacagagagacatatagtcataacagacacagatagaaacagatcttacagatttcagaaagaattttcatttgccagctttcaaatagttttcttttccccctttagactatcaatcttctaattacttgttttatcatcctaagcaatcgttagctagggaacaatttgccttcaaaaaagataactcttaggtgaaacaaggcagaaaatgtatatatgaaaagctatttaagctgagactttcagcttaaatactgtaccatcatcatttgctcaaccaagaaaaaagcaaggcccagtgaagacaacatggccaggaaaaacacgttaaacaaaggtaagacttgttacgtaaatttaaaacaaagggatgtccctcccagacgttgcaaatggaaatgtcttgtggagatgtaaatttctttcacaaaatggtttcaaggtagccgttgaatgtcagaaaggtgcattttagttattaggctggttgaaaagtaattgcaaaaaccacaattatggccgggcgcggtggctcacgcctgtaatcccagcactttgggaggccgaggcgggtggatcatgaggtcaggagatcgagaccatcctggctaacatggtgagatcccgtctctactaaaaatacaaaaagttagccgggcgtggtggcgggcgcctgtagtcccagctactcgggaggctgaggcaggagaatggtctgaacccgggaggcggagcttgcagtgagcagagatcgcgccactgcactccagcctgggcgacagagtgagactctatctcaaaaaaaaaaaaaaaacacacaattactttcacaccaacctgtggataggtggtccttctaatgtggctactgcttcttagctgaaattactgagtacagggtgggacccattaaggaataaggcaaagaaaggcttccctcggcctgggctcagcgtgggtggatctgaagtaaagcctgctggatctgagagaccttttagacacacttcatctaggatagctttctgtatgggatagtaaccaggccaaaagctcagcagattcattttttcttatcaattggtcacttaagctttttctttgtcttaattaatttatatttatgatcttattttgtctttatcttatttgacagggtgttgctctgtcacccaggctggagtgcagtggtgccatcatagctcactgcaattgttacaggagaggggtcctgatccagaccccaagagagggttcttggatttggatcctgtgcaagaaagaattcagggtgagtccacggcgcaaagcaaaaacaagtttactaagaaagtaaaggaataaagaatggctactccatagaccgagcagccccgagagctgctggttgcccattttttggttatt

SEQ ID NO: 6467 - DNA, 2300 bp, Homo sapien
cccggtccggccagatggcagcagggcatgggttacctggtgcaggccctcgaggccgctggtgcctgctctgtgcagtccctgctacgcctcaggcccagcgcccgagggggaggtcgccgatacccaaaataaaacctgccctatccctctgacctcagctggctgggcggagagcgcctgccaaagctccaggagctgggcgggcagcaccttcccctgctggccacacggggccagtgcagggttatggcacacccaccttcaggtgcgcccctcaggacccctggcctgggtgagggcttgggtgggcacaggcttcctaggcctgcagactgaaccacgtgtaaccagaatggtgggctcagggctccgttagagaagccggcagagcgagcctggaaaaggaggttggccccaccatgggagaggatggggtgggcccgctgacccccagggacccgctcacgtgcctctgagggagcagttctgcagatgtccccagtgggcaggaagctggtcacagatatccaggggccagggctgtttgtggcccccaaagccttgcccatcgaggacatggacagggaggggaaggcgtggaatgcagacgaagccacagacccagagcaggaggacggcgacgttcccagcaaccccagctccaagagccttcccagtgccgggcactcagcgggaggcaggcaggggaccggccctgtcctttgaaatggcagcctggggccagcccgccttgtcgtgtgaccccaggcacaccttgcctgtccctgggctctgcggcctcgctcttccatggaggggtggaatgaggtgccaaccacagccttccggaaggcccccgacccggccccagggcactgtgagcccctgccgggttatcctgttgtccctgactctaagcctggggaggacagggacctcatctgtgcctctcgggactcacccctgtcctgggcgctggccaagaaggaaccaatctgtgcctgaaccgaagagttccgcagacaccaccgcccacgctcagcctgtggggtctgaggggagtgagggggtgggtcagggtgccagactgctctcccccacctggtgcctcagtttccctgatccaagaggcagggttatccaatctggtggcctcactggccagcatacaggccatcagaggccaggaaggatgtctgctagtcggacggtgccacctggagtcctgaggaaagaaaaccagtctccacacgccacaatgagcctgtgggagatgctggcacagatggtaacggccactgcgagtgcccagggtggggccccagggttagaaagggcctagagggaggacccagacccttacccagcaaactccatgtgtagccccctgcaatggcagcagccccggggggaggtatggcagactcggactgcagccagcctggccatgtccctcgcccgcttattgtgtaggccccaacggtgtctagccaggaaagcagagctggcctctaagagggtctcagatagggtgggggcctggcctcagttccatggggggtctccgaggcctcaggctgcttcctccccgggggagacagcgaagggcctggggcattgggccgggcggcgggaggggaccccggctgtgcggacccttttcctggacaaatgtttactcccacagaacatctcagagagaaggggcgggggggtgggaaacccggcagcctggctctggggacccccacactagtttggcccaaagagagcctcggcttggtgccccggggccacccaacaccttcctcctccctcctcagcccatccagaatgtacccgctgctgggagtaaaaatagcagctgacacctcctggaggcggagggaggaccttgcctccttctccaagcacgtcctctgcatcctggcctccttcagcctcctcctctggccattcctatacttggtaaggggcctgcacgggcatagccccccccagcaagactccgcacacaccccggccacccagtcactggccaatgggctcctaggaagatcaaatgtcactataacacgagggtgtgagccgggcgccagtgcctgcagccggtgctgtccacagggagctccagcccttctcacactcgacccgcaggtgggtataggcaggagcggccacccaggactggggccgacggggcctcctgcgtgcgggtggacagcccctcgttccagggacactctggggtcctggggcgctgaggtcccaggtccgtgtggtgccgagcatctcga

SEQ ID NO: 6468 - DNA, 2300 bp, Homo sapien
ctggacacctgctttgcgtctcagctgttgaaatgccatcccctgcccccagcacacccctgcccccagcacacccctgccaccagcccctccccgcaacagaggcaatgacacaggccatactggggggaacagaacagccttgtgttgcttccaggcgctcagcagaaaaccaggtgcctcagtttccccacttggagagtgggcctttccagcgcacgtcggggggcctggaggtcaccctgcctgagggtgttggggcacccatgtgactctggcctggggggacaggagggaaatatgaggagctggggagggcctgggtgcccgagggtgagggggcagctgtgggccaaggagggctgggctgtcacacccgcctcacccacgtcttgggtttctgggcagaaacgtcttgcctatttctggacacctcagctgccactggctccttataaataacccaccccaggcgagggccacgctgcccccatcttgtggcagccgacaggtgtctgccccgccagcgtcgggctgggcacagcagggcggggccaggctccgctccctcccttcactgaccctcctcctccttacagaggatggccctagaggagtctgtggcgtttggggcctgaaccagctgggaggacagcacgaggggctggtgggcagcctgggactgggtcacaccgggggcctggacaacactggctcgtggggctgaggactgaggagagcctggcccagccgtggcagttacaagaggcttaacctgaggggcagcagagtctcaggaagagattctgggataggaaaaagctacccccgttgcctggaagacagctatctgctgggtaattttgcatggagcttaagttgctctgggaaaattaacattcttgacagagggtttggaaaacggttcccacctcagcagtgcaacgtagatgcatttttagctgatgaacgtgtgttttccttatacaacactcccaggggggaccgtagctattgtcttcgagtaatctgtactgtgttgtaatgaactttgttttctaaaaccctggccaacatgccggtgcagctgctcagagcctccccaggcctggccgcccagtgtgcacggtggccagctcacagagagacggtccccagcatgctggcctggcgccaccaccgcacatggacagggcagccagtcctgggcatggagcttcccctagacagggacagatccagagcatccccgggaccagggaaagcggccacagggagggaaatgggggggctgttctgtgggctcctgcagtccaagtatgccttgtacagagcccggcccgggggggtgcacgggaagcggcccagacccaacccaacgtgctctggggctcagcctcaatgttttcagggtacaggggtaacaagaaggaacagcttccctgctctgtgatcttggaggaggggtcctcagaggggtgtggtgggacacactctgggcaccccataggaaaacaggcacagaagggagctttgggctcaaatagggaagaggggttctcatggggaatggtagggtgagcagattactcatcttggggagccagtctcggtcatccaggggctcccagggagaccccacctacacccactgggcagagaacacccagagacaggtttcagctccatcagcgggacctttccagtgtctagagcgggctggacggcacacggcctgcattctggatgaccctcctcaggggacgccacggagaggatgtctgccctgggtgggggtggacgccacgaccttccaacatcccttccagctccaagattccaagctccagtctggagccagggcaggaagaggggacagagtctggggcgccaagagctgggaggggccaggagccctggagaaaggggaggcccaaggaggtggactcacccaaggccagagctggcccccaaaccctgcccgcggtcccccacagcgctgctccaagaccccatcccccatcctacacccaggcagctcgtaactctctttccatcctctctctctctctctctctgaatctctctctgcagaaaccacccaccttcaccatgtctgacgaggaagtgtgagtacccagctggtggctgccccctgcctggctcgggaccctggccccttggcttctgtggggctggagcatgcgctatcttgcacaagtccaagcaaagcccagcctcactacctctctctctttctttctctctctctccctgccccacagtgaacaggtggaggg

SEQ ID NO: 6469 - DNA, 2300 bp, Homo sapien
agtgagactctgtctcaaataaataaacaaataaaaataaaatgacaatttattagttgtttatctgaacttcagatttaactgggcctgtatttatctggcagcctcaaccccgtgcagaccattgatctcaggagaggcaggcagagcggaagccgcgctggcatttgtgttcaatggcaggtgggaaggaggaagaggaggtctccactggctccccaggcatctcagagaccccccatacttagcatgccttccggaggatcccattagcagactatcagagaaacagggatggaaggagtggtgaggggtctgctccattgtgaccccacccctgcctcgccctgaggaaggacctcagctcctagctcaaccgccgccctccagcagccccagtgatctgagcagcacccacccgtgacccacagctcggcctccaatcaccctcctctccacatcggccacccacaactctgaacccaacttccagcagccacatatctctaagcacactgcacaatgtggctgccgaaagaggcagcattgcatgaacataaaaggaagcctgaggacccccggccccaggaccccccttctccagctccatccctgtcctgcggtctgctccttgggcctggccaagggcacctgctgctgggcaaaggcctgtctggtcaccagcctcctgggaccctgccactggcagcctggagcttctccacctcacgcaggcctggacaacagtggggacggctgccaccaccttccctgcccactctggcccacttctcactccatcctgcttcaatgccttcatgctagatagaccccctggagtcatttccactcaaacccacccatcaggaggaactccagccctacccggcccaggccctcggaggggcacagtgccctctcctcctcctgaatttccatcaaccccagtgccctcccgcagccctgttcccacctgcaggcctgggccccctgcccccagcaacaaccaggacccatggccccgcttcttgctctgaagcatgacacccctgcctcttgctctgaagaacacttagggtgctgttgggtgcgggaacaagccaggcttgggggtggggggcacgggcagttaaagagatagatggagaagtggcctgaatccagccaccaggcagaggaaaccaggggaggagggagaggcctggggacaggggagggaggctgctgccctctactcccgaagggtcccagcagccctcctggccagcactacccaaggaaaggagtgaggactgggccttggacgggggtccctgtagagagggccttgccagaggctggagggggctggccagaagggtggagagggggtgagcaaacggcaaggcctgaagaggccagtggccctcttggaggaggcgtggtgggagcaccgaggatggacagcgtggctggtgtggccagcgtgggggctgccaaccgggctggccagaagggcgaggtgaggggccctggggttccgggctcccgggtaaaaacagccagatggagagaggggcttcagaccccaggcccggggacccgccctccccagcactacagccccggttctccacttccagctcccagcagctgcaagcgcagcggtgcggggccaggctgtggcctggagctgccaaagggcaggggcacgggtgtggggggcgtgcaggccggggtcccgggaggcagggcagacaggcccgaaagagtgcgacggcggcgggaggtctctggggctgggaggggtgcgggcgtgggcggggcgcgagcagcaggggcgcgggcccgggcttcaggctgtggggccgggagtgcggggcgggactgctgcggccccgcgtcctgtggagtctgcggcgcggggagtgggggtcggggcggggaggaacgtggggtgcgggacaggaggggggcagggagggagaagaaggcggcgcggggcggggcgggcgcagggctggggacggcacgggcgcgcggcacgggcgctggcgcgtgcggggggggcggcgcggcctccggaagcgagggggcgctgtgccaggcggcggccgtgcggggcgggcgcgctgctccttccgcctcgcggaccccggaagcgcgcgtggccgccatggcgcggaatgtggtgtgagtaggggtcgtcacccccccgtcgcggggcgccccttagtgtcacaagcagacggaccccacagggcgcgcggactccggggagcggggtgggcgtccctgggccgcctcctggcccgggcgag

SEQ ID NO: 6470 - DNA, 2300 bp, Homo sapien
gttttcaggcagggattaggggcagctgggtgtgggaggcaggcacttggtataccaccgaatggagacagaaaatcccaactctacgaaggaagtgaagtcccttcaacagggacaaagcgatgttttgggtctgactacaatgcaccctgggaagtctcaaagaaaacagtcggggactcaaggagggcagccccctctccccgaccccgagctcccaggaagataaatgatttcctcctctctagagatgggggtgggatctgagcactcagagccaagggcgcagtgggtccgggcgggggccctcctcggccctcccaacatgggggccaggaggtcagcccctcaacctggaccccggctgggtctcagggaatggtctcccccagtggcccagcttgcttgtgttttcagatgggtgtgcacgggtgtgtgtgtgtgtgtgtgtgtgtgtgtgtgtgtgtgtgatgcctgacaagccccagagagccaaagacctgagtggagatcttgtgacttctcaaaagggggattggaaggttcgagaaggagctgtggtcagccttgctctcccttaaggctgtggtaaccacactaggcatagcataggcctgcgccccgtccctccttccctcctccgcgcctctcctttctctttctcccccctctaccccgctccctggcctgctcctggtgacaccgttggcccccttccagggctgagggaagccagcgggggccccttcctggaagcccacctgcaggccggcttgctgggaaggggctgctctcgcagaggctcccgcccgccctgcagccgtttcctggaagcagtcgctgtgggtattctgttccttgtcagcactgtgcttgcaaagaaagcagacactgtgctccttgtccttagggagccccgctccatcacccaacacctggctggacacaggcgggaggccgggtccgcggggagcggcgcggggctggggccggaccagtaaacacacacgggcgccaggcactgcaggctcctcctcctcctcctgcccagcgcctctgctcacaggcacgtgccaagcccctaggccaggaggcccagcagtgggtgcagagcaagctcctgggaagggggtgcagggcggacccccggggagaagggctggcagggctgtgggggacgctgaccgtgggccccacgttgcagaaaactggctgcctggctggaagatgggggagatgccaagcctctgaggcagcacgagcagggtgcatggaggccggggcgcggggaggctgcactgcagcatgcaccccaaagcccagagggagtggagaccaggccctggaatcgagaagtagaaaggcggcttggaggcctcggaaccggctgacctccaacagagtggggccggccctggaggcaaagaggtgcccggggtccggccctgcctgggggagctatgtgtcatgggcagccacaggatatgtagccagctctgagcatatggacccagggcagggctgcaaggcagggcaggggagacagacgggggagcaaggagcagagagggggcctcaggctctcccaggaggaacattctcccgacaggaggaagagacggcccaggggtgactgtggggagccatggtggcagctggggtcgtggcagatgggagagaggctggcgaggtgaaggtgcaggggtcagggctctggggcccacatgcctgtgggagcgggcaggcccagggctctccgccactccccactcccgcttggctcataggctgggcccaagggtggggtgggatgagcaggagatggggcccagggggcaagcagggccccaaagacatttagaaaaaccggtttatgcaggcagcattcagagcaggcggcgtgcgtggcgggggccctgggagcacagagaggcacacgtagggcccccgagggtctccccattggccggcagtgacatcacccctgtgtcaacagtgatgtctgcagctccggccagccagggtttatggagcgagacccagcccggcctgggccctcactccccaggcccacacactagcccactgttcagggtccggggtggcagcatggcctgggggtcctggcaccgctgctcctctgcccaccctaacttcccggcatggcggctgccccctctgagcgtccccaaccagtaagtgtggggccagcaggcctgccgtcctcctcctcttccctctagagagaaacgtggaggtcctggggctgggggcgctcatagccctgtgacacaggtgca

SEQ ID NO: 6471 - DNA, 2300 bp, Homo sapien
ttccagagtcctcgagacaaattgctgtaacagtgtttattgatgatgagtccagggctcctgctgaagccctggtggggaggggcacagagcgagatggggcgtaatggaatgcttgaaggctgctccgtgatgtcggtcggagcttccagactaggcgagggcagggtgaggcctcgggcacacagccggcgcccagtcacccggcccagatggagggcggccgggccctgcacaggcacttgccaaggtggctcacactcacgcacactcgtactgagactcaaggccgtctccacaactccaaccagtgcaaatgacttagtgcaaattaaattcagaagggacgggggaaacagagtcgtggaggctttgaatctctcagaaaaaaggaaagacaggaaagctcagaaacaaagagacagaaggatgaaaaagaagaagagggaggtggtggggacggcgtcatcccgctggaggagctcagctctgggatgatgtggtggctggtggtcaaccgtccgccgcagggggtggccatgaagatggagtcgccggtgcggggtgggtgctgcgggcgctgctgttccgatggtgtctttgatgttgggctgatgaggtctggttcctctagcttcacctagagatagcgacacgtgggtgggatgggggcagggtgctcgggggcctggaggcttccggaaggagcgctggtgctcaccttccagagccgattcctgagtcaggtagtgcagtggttgtaaagtgcagcatattcatttccaagctagagggttttgtgtccggattcaaaggcccaggcttgagctgggtagcaccatttctgtggatggggaaggagtgaggtcccactcagctcctctcgcgtgccccccaccccaagtgtggcaggaagcccctcacctttcatgttgtgggttctgggagcccagagggcagccatagtgtgccgactccgtggaggaagtaaagaaacagacccgcttcttgccgcagccccaccagcctaaggtgttctgtagaagacagaggtcggggcagtgagatggtggcccggcggggcggtctgggcagggccgcgtcctgacgcagggagggcagacacgctcaccaggaaggccggacgcgcctcctctgtcctcgccgtcacaccggaccatgtcatgtcctgcttgtcacgtccaccggacctggcgtcttggccttcggcagctggtgggcacgtccaccccagctggagacctggctgtggggagaacgagagagtcgtgtggggagaacgtgttggttgtgtggggaggggcgggtgggggctgagggtggcagagggggaaaaactcaccctcgtctccagcccgaacgctgaggcaccgatcccggctccgtcgccgcccgcgaggcccgccttggccacgggctctggaggccagtgcctcccgctcgccgcccgctgcgctcctcacccctgcctgcaccatcctccctcctgagagctcattcactccgccccgcccgcctcgcctagtctggtctcgccccatgcccttgactcccctggatgctgtactgtctgccaagccagccccaggggctgagcggtgagggcatacagcgtcaccaagtccactgtgggccctctccgcaccagaccctgggccgcagtgcctcgtgggaccggcgcccgcaggccgagcccctgcagcctccttgctgcgcaatgtcccggggcccccctcccgtggccgcttcgccctcctggtgacgtcctgctgcaactccccgagcactgcctgtcttcccgctctccagccctcgaggctccggcataggcctgagaaagccgtgccggagctgcccctgtgcctgctactaaatgaattgcggtgggtgaggtggcagctggggacccctctgtcctgtgtcccctgccatgtccctgtctgacccaggcctggggtaccaccccacgtgctggaccctacgctggccacccctgtgctccctccctgccctcttgctctttctgcctggaacgggcccataaccccccagccttgcgcagtctcggctccccccgagaagatgtcacctttgctaactctcctgcccccatcctgcccctctgctgggagggtgtctgcttctccccgccagccctcgatcccctaaacctccttctttcagaaggctggggaagcgaggcctggggagggaagggactcacctgcccggcagatggggtcctcacctgcccgctgctgccagctacacctccgttg

SEQ ID NO: 6472 - DNA, 2300 bp, Homo sapien
aaggcgcggccagcccttccacatcccagagggcctgctgggtgattggacccgtgaactctgggtcccttggccctggtgctccccttcacggctttgacactcgagacttgaggtgaaccccagggactgcagggccccaacaaccctcaccaaaggccaaggtggtgaccgacggacccacagcggggtggctgggggagtcgaaactcgccagtctccactccactcccaaccgtggtgccccacgcgggcctgggagagtctgtgaggccgcccaccgcttgtcagtagagtgcgcccgcgagccgtaagcacagcccggcaacatgcggtcttcagacaggaaagtggccgcgaatgggaccggggtgcccagcggctgtggggactctgtcctgcggaaaccgcggtgaccagcacaagctcggtcaactggatgggaatcggcctggggggctggcaccgcgcccaccagggggtttgcggcacttccctctgcccctcagcaccccacccctactctccaggaacgtgaggtctgagccgtgatggtggcaggaaggggccctctgtgccatccgagtccccagggacccgcagctggcccccagccatgtgcaaagtatgtgcagggcgctggcaggcagggagcagcaggcatggtgtcccctgaggggagacagtggtctgggagggagaagtcctggaccctgagggaggtgatggggcaatgctcagccctgtctccggatgccaaaggaggggtgcggggaggccgtctttggagaattccaggatgggtgctgggtgagagagacgtgtgctggaactgtccagggcggaggtgggccctgcgggggccctcgggagggccctgctctgattggccggcagggcaggggcgggaattctgggcggggccaccccagttagaaaaagcccgggctaggaccgaggagcagggtgagggagggggtgggatgggtggggggtaacgggggaaactggggaagtggggaaccgaggggcaaccaggggaagatggggtgctggaggagagcttgtgggagccaaggagcaccttggacatctggagtctggcaggagtgatgacgggtggaggggctagctcgaggcagggctggtggggcctgaggccagtgaggagtgtggagtaggcgcccaggcatcgtgcagacagggcgacatcagctggggacgatgggcctgagctagggctggaaagaagggggagccaggcattcatcccggtcacttttggttacaggacgtggcagctggttggacgaggggagctggtgggcagggtttgatcccagggcctgggcaacggaggtgtagctggcagcagcgggcaggtgaggaccccatctgccgggcaggtgagtcccttccctccccaggcctcgcttccccagccttctgaaagaaggaggtttaggggatcgagggctggcggggagaagcagacaccctcccagcagaggggcaggatgggggcaggagagttagcaaaggtgacatcttctcggggggagccgagactgcgcaaggctggggggttatgggcccgttccaggcagaaagagcaagagggcagggagggagcacaggggtggccagcgtagggtccagcacgtggggtggtaccccaggcctgggtcagacagggacatggcaggggacacaggacagaggggtccccagctgccacctcacccaccgcaattcatttagtagcaggcacaggggcagctccggcacggctttctcaggcctatgccggagcctcgagggctggagagcgggaagacaggcagtgctcggggagttgcagcaggacgtcaccaggagggcgaagcggccacgggaggggggccccgggacattgcgcagcaaggaggctgcaggggctcggcctgcgggcgccggtcccacgaggcactgcggcccagggtctggtgcggagagggcccacagtggacttggtgacgctgtatgccctcaccgctcagcccctggggctggcttggcagacagtacagcatccaggggagtcaagggcatggggcgagaccagactaggcgaggcgggcggggcggagtgaatgagctctcaggagggaggatggtgcaggcaggggtgaggagcgcagcgggcggcgagcgggaggcactggcctccagagcccgtggccaaggcgggcctcgcgggcggcgacggagccgggatcggtgcctcagcgttcgggctggagacgagggtgagtttttcc

SEQ ID NO: 6473 - DNA, 2300 bp, Homo sapien
gctcgggtgtgctccacgctcagggatcatcacgtccggccggcggtagttggcacgtggagaggtgaatttgcccacaggtgttccccgtgcctgcgcattgctggcagcacgaccggatcctgtgctagcccctcccacaatgcctggagcaggagcgaggggcctggggagccgccttgcctggagcatttgtatttccggagtatttcctgagtctccccttgggtcttgggtgctgtccccagtgagcccatctcccagcgatggcacagaatcggttgtggctgtggagacggaaatggccgagaggcggcagtggtgactcacatcacagtctgaaggtgacccaaggctggactccacttttagcaaaatgtgggggtctgccttggtctcctaacttgggggtccactcatggaaaagcctgagaattttcatgccatggaaattcccccatgtcgtggggttcacgcacgacaaagcccggcggtcagtgctcagcaggcaagcactcagccctttccggtggggccatgggaacagagggtttgccgaaggcgcggccagcccttccacatcccagagggcctgctgggtgattggacccgtgaactctgggtcccttggccctggtgctccccttcacggctttgacactcgagacttgaggtgaaccccagggactgcagggccccaacaaccctcaccaaaggccaaggtggtgaccgacggacccacagcggggtggctgggggagtcgaaactcgccagtctccactccactcccaaccgtggtgccccacgcgggcctgggagagtctgtgaggccgcccaccgcttgtcagtagagtgcgcccgcgagccgtaagcacagcccggcaacatgcggtcttcagacaggaaagtggccgcgaatgggaccggggtgcccagcggctgtggggactctgtcctgcggaaaccgcggtgaccagcacaagctcggtcaactggatgggaatcggcctggggggctggcaccgcgcccaccagggggtttgcggcacttccctctgcccctcagcaccccacccctactctccaggaacgtgaggtctgagccgtgatggtggcaggaaggggccctctgtgccatccgagtccccagggacccgcagctggcccccagccatgtgcaaagtatgtgcagggcgctggcaggcagggagcagcaggcatggtgtcccctgaggggagacagtggtctgggagggagaagtcctggaccctgagggaggtgatggggcaatgctcagccctgtctccggatgccaaaggaggggtgcggggaggccgtctttggagaattccaggatgggtgctgggtgagagagacgtgtgctggaactgtccagggcggaggtgggccctgcgggggccctcgggagggccctgctctgattggccggcagggcaggggcgggaattctgggcggggccaccccagttagaaaaagcccgggctaggaccgaggagcagggtgagggagggggtgggatgggtggggggtaacgggggaaactggggaagtggggaaccgaggggcaaccaggggaagatggggtgctggaggagagcttgtgggagccaaggagcaccttggacatctggagtctggcaggagtgatgacgggtggaggggctagctcgaggcagggctggtggggcctgaggccagtgaggagtgtggagtaggcgcccaggcatcgtgcagacagggcgacatcagctggggacgatgggcctgagctagggctggaaagaagggggagccaggcattcatcccggtcacttttggttacaggacgtggcagctggttggacgaggggagctggtgggcagggtttgatcccagggcctgggcaacggaggtgtagctggcagcagcgggcaggtgaggaccccatctgccgggcaggtgagtcccttccctccccaggcctcgcttccccagccttctgaaagaaggaggtttaggggatcgagggctggcggggagaagcagacaccctcccagcagaggggcaggatgggggcaggagagttagcaaaggtgacatcttctcggggggagccgagactgcgcaaggctggggggttatgggcccgttccaggcagaaagagcaagagggcagggagggagcacaggggtggccagcgtagggtccagcacgtggggtggtaccccaggcctgggtcagacagggacatggcaggggacacaggacagaggggtccccagctgccacctca

SEQ ID NO: 6474 - DNA, 2300 bp, Homo sapien
gcccgccccaactggggttcgcccgtggaaacgtcccgggtcacccaagccacgcgtcgcagggttcacgggggtcatctgggaataggacactcatgggagccgcaccagatcttcaggtcgggcattatccacagccccgtggccccgggtcacactccgagggcttcagtgtcatggcctgggactcaagtcacgcctacttatgtgatgatcacagtgtgttccaccaaaatcttacattttccacatctatcccagagcacagctccgactccgtctaaggacagcccccaaatccccagccttttactgaactgacaattgcctccccagtgaacactctgatctcctcagccctaagtggccagacattaacattctcattcaatgcaggtttgaggtgctaattcaggagcttaagatgctaaagagctgggagcgccactgctgctttattctctggtccaggatccttgtgttgctggagataatccattatcgtgggtgcagcagacaccctgcggcttgtggactcggtacggggtggggatcctgatggggttaggatgttcgatggctcgggtgtgctccacgctcagggatcatcacgtccggccggcggtagttggcacgtggagaggtgaatttgcccacaggtgttccccgtgcctgcgcattgctggcagcacgaccggatcctgtgctagcccctcccacaatgcctggagcaggagcgaggggcctggggagccgccttgcctggagcatttgtatttccggagtatttcctgagtctccccttgggtcttgggtgctgtccccagtgagcccatctcccagcgatggcacagaatcggttgtggctgtggagacggaaatggccgagaggcggcagtggtgactcacatcacagtctgaaggtgacccaaggctggactccacttttagcaaaatgtgggggtctgccttggtctcctaacttgggggtccactcatggaaaagcctgagaattttcatgccatggaaattcccccatgtcgtggggttcacgcacgacaaagcccggcggtcagtgctcagcaggcaagcactcagccctttccggtggggccatgggaacagagggtttgccgaaggcgcggccagcccttccacatcccagagggcctgctgggtgattggacccgtgaactctgggtcccttggccctggtgctccccttcacggctttgacactcgagacttgaggtgaaccccagggactgcagggccccaacaaccctcaccaaaggccaaggtggtgaccgacggacccacagcggggtggctgggggagtcgaaactcgccagtctccactccactcccaaccgtggtgccccacgcgggcctgggagagtctgtgaggccgcccaccgcttgtcagtagagtgcgcccgcgagccgtaagcacagcccggcaacatgcggtcttcagacaggaaagtggccgcgaatgggaccggggtgcccagcggctgtggggactctgtcctgcggaaaccgcggtgaccagcacaagctcggtcaactggatgggaatcggcctggggggctggcaccgcgcccaccagggggtttgcggcacttccctctgcccctcagcaccccacccctactctccaggaacgtgaggtctgagccgtgatggtggcaggaaggggccctctgtgccatccgagtccccagggacccgcagctggcccccagccatgtgcaaagtatgtgcagggcgctggcaggcagggagcagcaggcatggtgtcccctgaggggagacagtggtctgggagggagaagtcctggaccctgagggaggtgatggggcaatgctcagccctgtctccggatgccaaaggaggggtgcggggaggccgtctttggagaattccaggatgggtgctgggtgagagagacgtgtgctggaactgtccagggcggaggtgggccctgcgggggccctcgggagggccctgctctgattggccggcagggcaggggcgggaattctgggcggggccaccccagttagaaaaagcccgggctaggaccgaggagcagggtgagggagggggtgggatgggtggggggtaacgggggaaactggggaagtggggaaccgaggggcaaccaggggaagatggggtgctggaggagagcttgtgggagccaaggagcaccttggacatctggagtctggcaggagtgatgacgggtggaggggctagctcgaggcagggctggtggggcctgaggcca

SEQ ID NO: 6475 - DNA, 2300 bp, Homo sapien
cgtcaccaggacccagaagcctcaggcctctagactgctagtcgggctgcgtgcaggggggctgagctgggggcacaagtgggggcgaggtaaacctcccagaggccgagtccctgccgcagccctaggcgccgcggtggtggctgctatggcatcaccagacccgtgggctccggggcccaagcaacctggtcgatgggcagacctggcagctctcctgctctgtgggctcagacccgcctgacctccctactccccggcctcaccccaccttgcccccaagaggtcccacagagcttcggacctcctggagacaaggcagggtgctgaggggcgggcaagatgtcaccgagggagaggggagggttcctcaagtgtgcggaaggcggccaccctgccccagcctgatggaaccctctgtttacacacctgctagccccttcccctccggccagcctcaggccagccaggagccccctcctgtggcctccgagcaccctcctgacacctgaggagaccctgcccaacccccccctccgccctcaggacttctggggaccagccactgtccccagaagccaggccggacagtggccttctccactcccctctgacttctccaagggggctcagtggccagtgccccccaggaggctccaccctcaactcaacccaagcaacagggacagatgaaaaacaaaatccaatcagggcgataaatggcggggggcaggacgtggtggtctccaggctggcttcgtgcgttcttgcttttgtcactgcccccctgttacatggggggggggtttaatttggtttctgagcgcataaagctaaggaggggtaaaaaaaaaacaaaaaaaaaaaaaaaaggaaaaatgccccaagaaacaaagagggggaatagatcaattgacatgaaatttgggggttcctaatttctctatgtaattctgcaagtctgctgtcaatcctcctgacttttccatccaaaatctcccgggaccacttcctaccccagaactccccccgcccagcccccactgccccccacccacccctccaaccgccagacttcccacactccccgcatcagtgcacggcccccgaggactccacatttcttggggggtccccaggagacgggcaaagatgatccctaggtgtgctccggtgggggggtccccaagatcttccttccaggagcacaccagggagtcaggctactcgtgggggcatgtctgctcagctaccgccatctccaatgtggccaaactccttcctcactctggctgggccaacacacagtaagtaaggtgtatcgggaatgggtggggtatggggagcatcgtggctcacgctgcgggggccgtggggacaggcgccaaggaggccagcctcacaagggcatctctgtcatggtggaaagatggaattaggcctgggacacaccccgcccaccctacgggtgtatcccaaatgccgccggccgcacactcaggccgcaccatctgagccccctcctctgagaggcagggcacagacagggccgaggggcagtggagatgggaacaggagcggggctcagaccatgaaaacattggagaatcttagcgggactttggcctgatccatacagatatcgtagttgcttagatatgcttattgttttcatccaattttgtgggggtgtgcgtgtgtgtgcgcatgtgtgtgtgcaggtgggtgcttgcgtgtgcaacgtgtgtgctgcgtgtttgtgtgctgtgagctgtgttcatgtatgtgctgcgcatgagtgtgtgtgctgtgtgtgcatgtgtgtgctgtgtgtttgtgtgtgtgctgtgttcatgtgtgctgtgcatgcgtgtgtgctgtgtgtgcatgtgtgtgctgtgtgctgtgttcatgtgtgtgctgtgtgtgcgtgtgctgtgtgcatgtgtgtgctgtgtttgtgtgtgtgctgtgtgtgctgtgttcgtgtgtgctgtgttcgcgtgtgtgtgctgtgtgtgcatgtgtgtgctgtgtctttgtgtgtgtgctgtgtgctagtgtgtgtgctgtgtgtgcatgtgtgtgcgtgtgctgtgcgtttgtgtgctgtgtgctcgtgtgtgtgctgtgtgtgcgtgtgtgctgtgcgtttgtgtgtgctgtgcgtttgtgtgtgtgctgtgtgtgcatgtgtgtgcgtgtgtgtgccgtgcgtttgtgtgctgtgtgtgcatgtgtgtgcgtgtgtgtgctgtgcgtttgtgtgtgtgctgtgtgctcatctgtgtgctgtgtgt

SEQ ID NO: 6476 - DNA, 2300 bp, Homo sapien
aaactggccatccgaaaatagcaacaacccagactggctcctcactcccttttccatcactaaaaatcacagagcagtcagagggacccagtaagaccaaaggaggggaggacagagcatgaaaaccaaaatccatgcaaatgaaatgtaattggcacgaccctcacccccaaatcttacatctcaattcccatcctaaaaagcactcatactttatgcatccccgcagctacacacacacaacacacagcacacgcatgaacacagcacacacacgagcacagcacacacacaaacgcacagcacacacagcacacagatgagcacacagcacacacacaaacgcacagcacacacacgcacacacatgcacacacagcacacaaacgcacggcacacacacgcacacacatgcacacacagcacacacacaaacgcacagcacacacaaacgcacagcacacacgcacacacagcacacacacgagcacacagcacacaaacgcacagcacacgcacacacatgcacacacagcacacacactagcacacagcacacacacaaagacacagcacacacatgcacacacagcacacacacgcgaacacagcacacacgaacacagcacacacagcacacacacaaacacagcacacacatgcacacagcacacgcacacacagcacacacatgaacacagcacacagcacacacatgcacacacagcacacacgcatgcacagcacacatgaacacagcacacacacaaacacacagcacacacatgcacacacagcacacacactcatgcgcagcacatacatgaacacagctcacagcacacaaacacgcagcacacacgttgcacacgcaagcacccacctgcacacacacatgcgcacacacacgcacacccccacaaaattggatgaaaacaataagcatatctaagcaactacgatatctgtatggatcaggccaaagtcccgctaagattctccaatgttttcatggtctgagccccgctcctgttcccatctccactgcccctcggccctgtctgtgccctgcctctcagaggagggggctcagatggtgcggcctgagtgtgcggccggcggcatttgggatacacccgtagggtgggcggggtgtgtcccaggcctaattccatctttccaccatgacagagatgcccttgtgaggctggcctccttggcgcctgtccccacggcccccgcagcgtgagccacgatgctccccataccccacccattcccgatacaccttacttactgtgtgttggcccagccagagtgaggaaggagtttggccacattggagatggcggtagctgagcagacatgcccccacgagtagcctgactccctggtgtgctcctggaaggaagatcttggggacccccccaccggagcacacctagggatcatctttgcccgtctcctggggaccccccaagaaatgtggagtcctcgggggccgtgcactgatgcggggagtgtgggaagtctggcggttggaggggtgggtggggggcagtgggggctgggcggggggagttctggggtaggaagtggtcccgggagattttggatggaaaagtcaggaggattgacagcagacttgcagaattacatagagaaattaggaacccccaaatttcatgtcaattgatctattccccctctttgtttcttggggcatttttccttttttttttttttttgttttttttttacccctccttagctttatgcgctcagaaaccaaattaaaccccccccccatgtaacaggggggcagtgacaaaagcaagaacgcacgaagccagcctggagaccaccacgtcctgccccccgccatttatcgccctgattggattttgtttttcatctgtccctgttgcttgggttgagttgagggtggagcctcctggggggcactggccactgagcccccttggagaagtcagaggggagtggagaaggccactgtccggcctggcttctggggacagtggctggtccccagaagtcctgagggcggaggggggggttgggcagggtctcctcaggtgtcaggagggtgctcggaggccacaggagggggctcctggctggcctgaggctggccggaggggaaggggctagcaggtgtgtaaacagagggttccatcaggctggggcagggtggccgccttccgcacacttgaggaaccctcccctctccctcggtgacatcttgcccgcccctcagcaccctgccttgtctccaggag

SEQ ID NO: 6477 - DNA, 2300 bp, Homo sapien
actgggctcacatcccacacattttccaaaccactcccattgtgagcctttggtcctggtggtgtccctctggttgtgggaccaagagcttgtgcccatttttcatctgaggaaggaggcagcagaggccacgggctggtctgggtcccactcacctcccctctcacctctcttcttcctgggacgcctctgcctgccagctctcacttccctcccctgacccgcagggtggctgcgtccttccagggcctggcctgagggcaggggtggtttgctcccccttcagcctccgggggctggggtcagtgcggtgctaacacggctctctctgtgctgtgggacttccaggcaggcccgcaagccgtgtgagccgtcgcagccgtggcatcgttgaggagtgctgtttccgcagctgtgacctggccctcctggagacgtactgtgctacccccgccaagtccgagagggacgtgtcgacccctccgaccgtgcttccggtgagggtcctgggcccctttcccactctctagagacagagaaatagggcttcgggcgcccagcgtttcctgtggcctctgggacctcttggccagggacaaggacccgtgacttccttgcttgctgtgtggcccgggagcagctcagacgctggctccttctgtccctctgcccgtggacattagctcaagtcactgatcagtcacaggggtggcctgtcaggtcaggcgggcggctcaggcggaagagcgtggagagcaggcacctgctgaccagccccttcccctcccaggacaacttccccagataccccgtgggcaagttcttccaatatgacacctggaagcagtccacccagcgcctgcgcaggggcctgcctgccctcctgcgtgcccgccggggtcacgtgctcgccaaggagctcgaggcgttcagggaggccaaacgtcaccgtcccctgattgctctacccacccaagaccccgcccacgggggcgcccccccagagatggccagcaatcggaagtgagcaaaactgccgcaagtctgcagcccggcgccaccatcctgcagcctcctcctgaccacggacgtttccatcaggttccatcccgaaaatctctcggttccacgtccccctggggcttctcctgacccagtccccgtgccccgcctccccgaaacaggctactctcctcggccccctccatcgggctgaggaagcacagcagcatcttcaaacatgtacaaaatcgattggctttaaacacccttcacataccctccccccaaattatccccaattatccccacacataaaaaatcaaaacattaaactaacccccttcccccccccccacaacaaccctcttaaaactaattggctttttagaaacaccccacaaaagctcagaaattggctttaaaaaaaacaaccaccaaaaaaaatcaattggctaaaaaaaaaaagtattaaaaacgaattggctgagaaacaattggcaaaataaaggaatttggcactccccacccccctctttctcttctcccttggactttgagtcaaattggcctggacttgagtccctgaaccagcaaagagaaaagaaggaccccagaaatcacaggtgggcacgtcgctgctaccgccatctcccttctcacgggaattttcagggtaaactggccatccgaaaatagcaacaacccagactggctcctcactcccttttccatcactaaaaatcacagagcagtcagagggacccagtaagaccaaaggaggggaggacagagcatgaaaaccaaaatccatgcaaatgaaatgtaattggcacgaccctcacccccaaatcttacatctcaattcccatcctaaaaagcactcatactttatgcatccccgcagctacacacacacaacacacagcacacgcatgaacacagcacacacacgagcacagcacacacacaaacgcacagcacacacagcacacagatgagcacacagcacacacacaaacgcacagcacacacacgcacacacatgcacacacagcacacaaacgcacggcacacacacgcacacacatgcacacacagcacacacacaaacgcacagcacacacaaacgcacagcacacacgcacacacagcacacacacgagcacacagcacacaaacgcacagcacacgcacacacatgcacacacagcacacacactagcacacagcacacacacaaagacacagcacacacatgcacacacagcacacacacgcgaacacagcacacacgaaca

SEQ ID NO: 6478 - DNA, 2300 bp, Homo sapien
gctgcgtgaggcccggccggccccggccccccccttccggccgcccccgcctcctggcccacgcctgcccgcgctctgcccaccagcgcctccatcgggcaaggcggccccgcgtcgacgccgcccgctgcctcgctgctgactcccgtcccgggcgccgtccgcggggtcgcgctccgccgggcctgcggattccccgccgcctcctcttcatctacctcaactccccccatccccgcttcgcccgaggaggcggttccccccgcaggcagtccggctcgcaggccgccggcgttgtcacccccccccgcgctccccctccagccctccccccggcgcgcagcctcgggccgctcccctttccgcgctgcgtcccggagcggccccggtgccgccaccgcctgtccccctcccgaggcccgggctcgcgacggcagagggctccgtcggcccaaaccgagctgggcgcccgcggtccgggtgcagcctccactccgccccccagtcaccgcctcccccggcccctcgacgtggcgcccttccctccgcttctctgtgctccccgcgcccctcttggcgtctggccccggcccccgctctttctcccgcaaccttcccttcgctccctcccgtcccccccagctcctagcctccgactccctccccccctcacgcccgccctctcgccttcgccgaaccaaagtggattaattacacgctttctgtttctctccgtgctgttctctcccgctgtgcgcctgcccgcctctcgctgtcctctctccccctcgccctctcttcggcccccccctttcacgttcactctgtctctcccactatctctgcccccctctatccttgatacaacagctgacctcatttcccgataccttttcccccccgaaaagtacaacatctggcccgccccagcccgaagacagcccgtcctccctggacaatcagacgaattctccccccccccccaaaaaaaagccatccccccgctctgccccgtcgcacattcggcccccgcgactcggccagagcggcgctggcagaggagtgtccggcaggagggccaacgcccgctgttcggtttgcgacacgcagcagggaggtgggcggcagcgtcgccggcttccaggtaagcggcgtgtgcgggccgggccggggccggggctggggcggcgcgggcttgcgccggacgcccggcccttcctccgcccgctcccggcccggggcctgcggggctcggcggggcggctgagcccgggggggaggaggaggaggaggaggaggacggacggctgcgggtcccgttccctgcgcggagccccgcgctcaccctggcggcggagctgggggtggggtgggggcgtcgggaagggccgagggaggtgtgaggtgtctgcaggggcgacttcccggtcggtctgtgggtgcagggggtgccgcctcacatgtgtgattcgtgccttgcgggccctggcctccggggtgctgggtaacgaggaggggcgcggagccgcagaagcccaccctggtatgttgacgcggtgccagcgagaccgcgagaggaagacgggggtgggcggggccaggatggagaggggccgagttggcaggagtcatggcagacgccacattcgcgacatctcccccacaccccctctggctctgtccgcaacatttccaaacaggagtcccgggagagggggagaggggctgctggtctgaggctaagaagggcagagccttcgacccggagagaggccgcggcccctgcccagtgggcagcgtggaagtttccatacaaggaggtgggaaggagacccccccccccttcactgccctgtgcagagatgagccgggggtgcaggatgggagcccatggcacttcgctacgggatggtccagggctcccggttgggggtgcaggagagaagagactggctgggaggagggagagggcgggagcaaaggcgcgggggagtggtcagcagggagaggggtggggggtagggtggagcccgggctgggaggagtcggctcacacataaaagctgaggcactgaccagcctgcaaactggacattagcttctcctgtgaaagagacttccagcttcctcctcctcctcttcctcctcctcctcctgccccagcgagccttctgctgagctgtaggtaaccagggctgtggagtgaggacccccgctgccatcccactccagcctgaggcagggcagcagggggcacggcccacgcctgggcctcgggccctgcagccgccagcccgctg

SEQ ID NO: 6479 - DNA, 2300 bp, Homo sapien
agaattcgtctgattgtccagggaggacgggctgtcttcgggctggggcgggccagatgttgtacttttcgggggggaaaaggtatcgggaaatgaggtcagctgttgtatcaaggatagaggggggcagagatagtgggagagacagagtgaacgtgaaaggggggggccgaagagagggcgagggggagagaggacagcgagaggcgggcaggcgcacagcgggagagaacagcacggagagaaacagaaagcgtgtaattaatccactttggttcggcgaaggcgagagggcgggcgtgagggggggagggagtcggaggctaggagctgggggggacgggagggagcgaagggaaggttgcgggagaaagagcgggggccggggccagacgccaagaggggcgcggggagcacagagaagcggagggaagggcgccacgtcgaggggccgggggaggcggtgactggggggcggagtggaggctgcacccggaccgcgggcgcccagctcggtttgggccgacggagccctctgccgtcgcgagcccgggcctcgggagggggacaggcggtggcggcaccggggccgctccgggacgcagcgcggaaaggggagcggcccgaggctgcgcgccggggggagggctggagggggagcgcgggggggggtgacaacgccggcggcctgcgagccggactgcctgcggggggaaccgcctcctcgggcgaagcggggatggggggagttgaggtagatgaagaggaggcggcggggaatccgcaggcccggcggagcgcgaccccgcggacggcgcccgggacgggagtcagcagcgaggcagcgggcggcgtcgacgcggggccgccttgcccgatggaggcgctggtgggcagagcgcgggcaggcgtgggccaggaggcgggggcggccggaaggggggggccggggccggccgggcctcacgcagctccgccggagagcaggcgaactgcgggcgcccacgcccggctcttatagtcgcgccagcccgcggcccagggcccgcgcgggcctcgctggcctcgcgcccgcgccaatgggcgcccgcggagccctcgccccgcccccggcccgcccccgcaacccgagccaagagcggggcggggggtgcgggctgggggccctggggccccggggggggggcggcggtcgcaggggctggggggtgcgcgggggcgaggctgggtggggggcagggagccgcagagcgccaaggccatgctgaatgcccgttctagagaattcaggggccccatcccgggtttctggggtgcccgggcggcctgtgctcgtgagctggggtctccgggcaggcaggggcaggcgggctcccagcgccccaccaggaggctgcactgcgggtgcgccccgtctgagtgcagatgcaggtggcttggggctgagtcggggggtccttgctggttgttgcggctgagggggcccctgggctcgggcggggcgcgcagccgccacctgccccagcaggaggagccggccacgcggcgcttggagcctcagccagatcccgagcgccccccggtgccgcgccggagccccggagcccccgccaggtgcgggacgcgcggaaggccggctgcgccgggccgaatctgggccaggcttggagcctacggaggctccggccgccagaggagagaggatcagggcgggaaacacagctcaaatcctacctgcatggccgagctcaccggggtgcgtctaagtagctcgcctttgcggcccacccaaaatatctggataatggttaccccgtcctcagtgcgttggacttgcatagacgcgagttcggtctcgggggccaccacgataatttgggggtctggggaaaccatctcctggagagtttgaacgatgtaagaaagcactgtgatttttaccaagtcaaaaaccacgcacaaaatcccgcaccccgccagccccccgccgcctaagcctagccaaggggaaggggccgccggcggaatctcgcgcccccctggcccccctcgcccccctcgctccgccatcaatcacttcgcccgcgctccgcgcgcgcctcccggcggagtcctaggcccgcgggctagaggcactttaccgcccggcgggagcgcctctcctccgcgtccctcgccccagccccctgcccgccccactttgggaccctccagccgctttccccacaaatgagatctttgcaatgagcaaacgaaagtggcgcggatttcggggcgcccagcaggagcgagcgcagccg

SEQ ID NO: 6480 - DNA, 2300 bp, Homo sapien
cccgtgtccaggaaagcgaccgggcattgcccccagtctcccccaaatttgggcattgtccccgggtcttccaacggactgggcgttgctcccggacactgaggactggccccggggtctcgctcaccttcagcagcgtccaccgcctgccacagagcgttcgatcgctcgctgcctgagctcctggtgcgcccgcggacgcagcctccagcttcgcggtgagctccccgccgcgccgatcccctccgcctctgcgcccctgaccggctctcggcccgcatctgctgctgtcccgccggtgctggcgctcgtctccggctgccgccggggaggccggcgtggggcgcgggacacggctgcggacttgcggctggcggctgcgctcgctcctgctgggcgccccgaaatccgcgccactttcgtttgctcattgcaaagatctcatttgtggggaaagcggctggagggtcccaaagtggggcgggcagggggctggggcgagggacgcggaggagaggcgctcccgccgggcggtaaagtgcctctagcccgcgggcctaggactccgccgggaggcgcgcgcggagcgcgggcgaagtgattgatggcggagcgaggggggcgaggggggccaggggggcgcgagattccgccggcggccccttccccttggctaggcttaggcggcggggggctggcggggtgcgggattttgtgcgtggtttttgacttggtaaaaatcacagtgctttcttacatcgttcaaactctccaggagatggtttccccagacccccaaattatcgtggtggcccccgagaccgaactcgcgtctatgcaagtccaacgcactgaggacggggtaaccattatccagatattttgggtgggccgcaaaggcgagctacttagacgcaccccggtgagctcggccatgcaggtaggatttgagctgtgtttcccgccctgatcctctctcctctggcggccggagcctccgtaggctccaagcctggcccagattcggcccggcgcagccggccttccgcgcgtcccgcacctggcgggggctccggggctccggcgcggcaccggggggcgctcgggatctggctgaggctccaagcgccgcgtggccggctcctcctgctggggcaggtggcggctgcgcgccccgcccgagcccaggggccccctcagccgcaacaaccagcaaggaccccccgactcagccccaagccacctgcatctgcactcagacggggcgcacccgcagtgcagcctcctggtggggcgctgggagcccgcctgcccctgcctgcccggagaccccagctcacgagcacaggccgcccgggcaccccagaaacccgggatggggcccctgaattctctagaacgggcattcagcatggccttggcgctctgcggctccctgccccccacccagcctcgcccccgcgcaccccccagcccctgcgaccgccgccccccccccggggccccagggcccccagcccgcaccccccgccccgctcttggctcgggttgcgggggcgggccgggggcggggcgagggctccgcgggcgcccattggcgcgggcgcgaggccagcgaggcccgcgcgggccctgggccgcgggctggcgcgactataagagccgggcgtgggcgcccgcagttcgcctgctctccggcggagctgcgtgaggcccggccggccccggccccccccttccggccgcccccgcctcctggcccacgcctgcccgcgctctgcccaccagcgcctccatcgggcaaggcggccccgcgtcgacgccgcccgctgcctcgctgctgactcccgtcccgggcgccgtccgcggggtcgcgctccgccgggcctgcggattccccgccgcctcctcttcatctacctcaactccccccatccccgcttcgcccgaggaggcggttccccccgcaggcagtccggctcgcaggccgccggcgttgtcacccccccccgcgctccccctccagccctccccccggcgcgcagcctcgggccgctcccctttccgcgctgcgtcccggagcggccccggtgccgccaccgcctgtccccctcccgaggcccgggctcgcgacggcagagggctccgtcggcccaaaccgagctgggcgcccgcggtccgggtgcagcctccactccgccccccagtcaccgcctcccccggcccctcgacgtggcgcccttccctccgcttctctgtgctccccgcgcccctcttggcgtctggccccggcccccgct

SEQ ID NO: 6481 - DNA, 2300 bp, Homo sapien
tggaagatggaaggacataactgcacagtacataactgtaccgggagcacctaaaatccaatttttctgctgattcttgaaccctgctttgtcccccttattccccccccccccgccattttaccagtgccacgtccaccaacattccagggtgtcaagtaactgccaagtgtcactctaagtaaagctacacccactccccaccacctccacatagcccccacctcctagctggcagggagcttctggcttatgcccacgcccacaggcgcctttctgccaggtcaggggtgggccaaacctccacccgctaatgtaccatgccctggtgctggaaagtgcctgagccagctgccccagcggcctcagcactaccaagttggcacaaagctccccaaattcggaggggctcagggaaacgagtggaggggatgaggaggtgaggggtaaacccatcatttcagttggcatttgagcaggtgccatgctcagcggagatgaggctctcccatctgtaggggccgtattaacatgcacactctaaaagtgcccttcgtttctccagcctcagctttgtccctctcctcctccacgtcaacctggccagagggtctggacgccacagccagggcaccccctgctttggtggtgactgctaatattggccaggccggcggatcatcgtccaggcagtttcggcagagagccttgggcaccagtgactccccggtcctctttatccactgtccaggagctgcggggactgcgcagggactagagtacaggtaactgggctcccatcccttgagtgtgagagaaaagctgcactttaagtgttcaggcgtgggtgggccgggagcttggggcagctgccaggatcctggtttctgaaggaggggaagaacttctgctgctggagggtgcagggaagcctcctgagagcagcctcaacttcagggatggggtgtgcaggaaaggccattgtggagagggttctcctttagggctgcacaaagccactgaggcttttgcaaggaaaataggttttccttgactaattcaccaagcaaaatgggaggggtaggggaggagggctaggccgctcttcccagcgggaacacacagctgtcttcacaagtgtgaaaggaagagtctttctgtgtgaaaagtttcctcccgttgcatcccccatcccattcccagagacaaacaggagactttgcagaggagccaggggcccgagattctggcgcagagattttatttatacatatatacaccattttacaggtaaagcttccttccctcctgcctccctatgcctcctgaccaccagcaagaaattggacaggagactgaggagaaatgccgggagaggcaacaaccgccctccatgtcccccctaggtttagcttctctcctcctgatggcgcacctggtcccccttgctgctctcccagcctccctggcacagagaggcgccctggggccaaggcagtttccctgggaatgctcattcatgcatgaagtttttctctgttgcaccctggacccagactcctcgatccacccagggtggtgtctgtggggagggggttcatttccccaggaagcacagccacgccgtccctcactggcctcgtcaagcagagctgtgtgtccagtggcttttgctggggccccctccttatctccttccaaggtgggggtgtttggaggtggaggaggctttcatattccgtgccatgacccctcaaggcgggccattcgtgtgcaccctccacccccagtgccaggcagaagcccatcctcacccaggaacagggcagcctgtccaacagaagggtctcggcctctccatcagcaccgggaagccctttctaggcaaacttctcaccacttcttccctcccttatactttgaaagagggagctctaggcaggggaggggctagagggggaagccgctgcccagatcctgacaaggtgacctgaaggaacccggggagggggatgggacagggctcaggcttggggtgtatggggaggggggctttgcttttaaaagaggtcatctcagcaatatctttttgtttttccccaggggccgaagagtcaccaccgagcttgtgtgggaggaggtggattccagcccccagccccagggctctgaatcgctgccagctcagccccctgcccagcctgccccacagcctgagccccagcaggccagagagcccagtcctgaggtgagctgctgtggcctgtggcccaggcgaccccagcgctcccagaactgag

SEQ ID NO: 6482 - DNA, 2300 bp, Homo sapien
ctcgaggggcctggacattgccctccagagagagcacccaacaccctccaggcttgaccggccagggtgtccccttcctaccttggagagagcagccccagggcatcctgcagggggtgctgggacaccagctggccttcaaggtctctgcctccctccagccaccccactacacgctgctgggatcctggatctcagctccccggccgacaacactggcaaactcctactcatccacgaaggccctcctgggcatggtggtccttcccagcctggcagtctgttcctcacacaccttgttagtgcccagcccctgaggttgcagctgggggtgtctctgaagggctgtgagcccccaggaagccctggggaagtgcctgccttgcctccccccggccctgccagcgcctggctctgccctcctacctgggctccccccatccagcctccctccctacacactcctctcaaggaggcacccatgtcctctccagctgccgggcctcagagcactgtggcgtcctggggcagccaccgcatgtcctgctgtggcatggctcagggtggaaagggcggaagggaggggtcctgcagatagctggtgcccactaccaaacccgctcggggcaggagagccaaaggctgggtgtgtgcagagcggccccgagaggttccgaggctgaggccagggtgggacatagggatgcgaggggccggggcacaggatactccaacctgcctgcccccatggtctcatcctcctgcttctgggacctcctgatcctgcccctggtgctaagaggcaggtaggggctgcaggcagcagggctcggagcccatgccccctcaccatgggtcaggctggacctccaggtgcctgttctggggagctgggagggccggaggggtgtaccccaggggctcagcccagatgacactatgggggtgatggtgtcatgggacctggccaggagaggggagatgggctcccagaagaggagtgggggctgagagggtgcctggggggccaggacggagctgggccagtgcacagcttcccacacctgcccacccccagagtcctgccgccacccccagatcacacggaagatgaggtccgagtggcctgctgaggacttgctgcttgtccccaggtccccaggtcatgccctccttctgccaccctggggagctgagggcctcagctggggctgctgtcctaaggcagggtgggaactaggcagccagcagggaggggacccctccctcactcccactctcccacccccaccaccttggcccatccatggcggcatcttgggccatccgggactggggacaggggtcctggggacaggggtgtggggacaggggtcctggggacaggggtctggggacaggggtcctggggacaggggtgtggggacaggggtgtggggacaggggtgtggggacaggggtcctggggacaggggtctggggacaggggtctgaggacaggggtgtggggacaggggtgtggggacaggggtgtggggacaggggtgtggggacaggggtctggggacaggggtccgggggacaggggtgtggggacaggggtgtggggacaggggtgtggggacaggggtctggggacaggggtgtggggacaggggtcctggggacaggggtgtggggataggggtgtggggacaggggtgtggggacaggggtgtggggacaggggtctggggacagcagcgcaaagagccccgccctgcagcctccagctctcctggtctaatgtggaaagtggcccaggtgagggctttgctctcctggagacatttgcccccagctgtgagcagggacaggtctggccaccgggcccctggttaagactctaatgacccgctggtcctgaggaagaggtgctgacgaccaaggagatcttcccacagacccagcaccagggaaatggtccggaaattgcagcctcagcccccagccatctgccgacccccccaccccaggccctaatgggccaggcggcaggggttgagaggtaggggagatgggctctgagactataaagccagcgggggcccagcagccctcagccctccaggacaggctgcatcagaagaggccatcaagcaggtctgttccaagggcctttgcgtcaggtgggctcaggattccagggtggctggaccccaggccccagctctgcagcagggaggacgtggctgggctcgtgaagcatgtgggggtgagcccaggggccccaaggcagggcacctggccttcagcctgcc

SEQ ID NO: 6483 - DNA, 2300 bp, Homo sapien
acactgggcatggaggctgggccacccaagggccatcaccagggactcaggtgggtgggcctcagccctgggtgacagaagctcacgggccgcagggcgaggccagaggctgagccttcaggctgaggtcttggaggcaaatccctccaacgcccttctgagcaggcacccagacctactgtgggcaggacccacaggaggtggaggcctttggggaacactgtggaggggcatagcatctccgagagaggacagggtctgcactgggtgctgagagacagcaggggccgagcggtaggcttccctgcccccagggatgttccagaggagcgcaagggaggggcattaatatcgtggcaagaaagggcaggcattgcagagtgagcagcgacggaactgggttttgtgggatgcataggagttcacccggataagaggtgggtgaggaatgacactgcaaaccggggatcacggagccccaaatccttctgggccaggaagtgggaagggttggggggtcttccctttgctttgactgagcactcagcctgcctgcagagggcagcgaggagccacggaggggtgtgggacagggatgccatggctgaagcagttttaggaaaggtcccaggggctattgttgaagagagaacggggagcggggagtcccacagctgacaggagcagagtgggccctgagagatgccagctctggctgccacagtgaccagccggggtaggccttcgagaagtcagggagcgtctagggcttctggctcctgctgggcccagggtgtcatcttgggctgccaacaccagaaagcccagcagatacaggaagccccaagccctgtcggaaacggttcttctccaggagggacagcggtggcagcgttcagccgcaggccatgcactctggggccacgtccttccctctgtacagtccagcattgtcaaggcaggctctggccatctctgctgaccccagagggatggggaggcctccccttccaccagaagggccagaagccaccctgggcaggggcatcactctccctgggtggggcagcggctgggagcaggaggtgccagtgggcgtgggctggatgcgggtgcctgcggggcggacatggaacttgggggaggctctaggctggggttgtcctcaagggagttctcaggtcaccccagggtcaccctcaacccggggcctggtggggtagaggagaaactgcaaaggtctctccaaggggaaggcatcagggccctcagcactgagggacgtgcgtgctctttaaagaaggggccacaggaccccgagggaagccaggagctagcagtgggccatagaggggctgagtggggtgggtggaagccgtccctggccctggtcgccctggcaaccctggtggggactgtgatgcaggaggtggcagccatttggaaacgcgtggcgtctccttagagatgtcttcttcagcctcccagggtcctccacactggacaggtgggccctcctgggacattctggaccccacggggcgagcttgggaagccgctgcaagggccacacctgcagggcccgggggctgtgggcagatggcactcctaggaaccacgtctatgagacacacggcctggaatcttctggagaagcaaacaaattgcctcctgacatctgaggctggaggctggattccccgtcttggggctttctgggtcggtctgccacgaggttctggtgttcattaaaagtgtgcccctgggctgccagaaagcccctccctgtgtgctctcttgagggctgtggggccaaggggaccctggctgtctcagccccccgcagagcacgagcccctggtccccgcaagcccgcgggctgaggatgattcagacagggctggggagtgaaggcaattagattccacggacgagccctttctcctgcgcctccctccttcctcacccacccccgcctccatcaggcacagcaggcaggggtgggggatgtaaggaggggaaggtgggggacccagagggggctttgacgtcagctcagcttataagaggctgctgggccagggctgtggagacggagcccggacctccacactgagccatgcccacccccgacgccaccacgccacaggccaagggcttccgcagggccgtgtctgagctggacgccaagcaggcagaggccatcatggtaagagggcaggtaggtgcccggcggccgcagtggaccggagcccagggctggtgccagctgcctctgctactccccagcctggctggca

SEQ ID NO: 6484 - DNA, 2300 bp, Homo sapien
ctaaagcaaccactaaaataatgaaacaaatggctatagatcataagccaacaaaggaaagaaaatgatatcatgaaaaatactcaatctgaagaaaaaaacagatgaagcaaatataaaacaaattacaaaataatggacttaattccaattatatcaacaattacattaaatataaatgatctaaacaccttcattaatatacatagattgttgggttgcatagaaaaagcaagacccataaatatatatatgctgcctaccaaaaatacactttaattataaagacataagtaggttagaagtaaaagaattttaaaaagcataagcaaaactagcaccaatcaaagccagaatagctatggtaatataagggaagcagatttaaaagcaaagaatattactgggacaaaaaaggtcatttcataatgatataagagtcagtccatcaagaggatttagtaatcaaaatgtttatacacccagtaacagagccttaaaacaaataaagcagaaaactgaccaaattactaggagaaatagacaaattcacattataacaggaaattcaatattcctctttcaataatagaacaagtagacagagaattggtaaggatataagagacttgaacaaaacaatcaacttgatttagctgacactaataggacgctccacctgataacaacacaatacataatcttctcaagtgcacaaggagcatttactgagacagatcttactatgggccataaaacaagtctcagtaatttcaaaaggattcaagcaacacaaagtatgctctctgaccaaaaagaaattgaattacaattcaaaattaaattcaaagttaacagaaagaaggaaacaataaaaatcgagaagtaaatcaaggaaacaaagcacagggaaaaatgagaaaaaaatcaataaaccaaaaatggattctttttgagaaaatcaatcaaattgctgaacttctaccaagattaatcaggaaaaaaaagacagaaactgccagtattaggaagtaagagagatgacatcatttacagattctacagatatccaaaggataatacgggctattacaaataactttattctgataaattgacatcttaaacaaaatgaacaaattcaatgaaagactgaaattaccaaaactcatacaagaaaaaatagataacctaaatacactcacaaacacaaattaaatttctagtaaaaattctattcacaaagaaaacatcacagcatcactggtaaattttaccaaacatttaaagaaaaaggataccaattctagaaacactctttctaaaaattaaagaagagggaatactccttcaccatttctatgagaccaggattattaccctgataccaaaagtaggcaaagacattacaagaagagaaaactaaggctaaaacctgtcataaaaatagatgcaagaattctaaacaaaattttatcaaatcaagcctgaaaatatgtaaaaaggataatatctcatgatcaagtgtggtttcagaatacaaggttggtttaacactcaaaaatcaatcaatataaattttcatattaatgaaactagaaaaggaaaagcatattattatcaatatacatatgtgcactggttagggttctccagagaaacagaaccaacaggggtgtgtgcgtgtgtgtgtgtgtgtgtgtgtgtgtgtgtggagagagagagacacacagagagagagaaaaagagagagaaaatccaaaatcggcagggtaagtggcagactggagccccaggaaaaagctgcagcccaaatccaaaagcagtctgctggcagaattccttctggcttagagaaagtcaatctttgttttgttaaggccttcgtcaactgcttagatgaggactatggttcaagcttgtccaacctgtggcccatgggccacatgcagccaggcactgctttcaatgcagcccaacacaaattagtaaactttcttaaaacatgagacttttttgcaaaattttttttagctcatcagctatcattcgtgttagtatattttatgtgtagcccaagacaattcttcttttcccagtgtggcccaggaaagccaaaagattggacacccctggtttagatgtttgtcccctccaaacttcatactgaagcttgatccccgatgttagaggtgaggcctaatgggaggtgttttggtgatgaggccagatccctcctgaatagatcctccctcaaggatgagtcagttctttactggttgctgtttattaaaagagcc

SEQ ID NO: 6485 - DNA, 2300 bp, Homo sapien
atagagagaggtgttggtggtggggggggactggcctggacatggcacagcagacgcaggtgggtgcaggactgtgcctgagggcagggtagcaagaagccatgcctgggcagtgagaggcttcagtttttagacaggaagttctggggtgatctgaagagggcttgcaggtcctgctccggagatcttaccagctgtggaggggcttggacgaagaccgggtagagagcaacccagccgctgtaccgctcgtccctgttgacccccggggtgtatgcagccacacccagagcagcagagggcccacccatcaagtcacagaatcctgagaaataatacatcgttgttcagaccgctaaaatcctggtggctccttacacagcaacagatgaccgaggggctcccagcccgggaggtggaaatccagcagggatttccaaggcctagtttgcagggctccaggatcgttcctagatcctggtcttgcagccttgacaaggggaaggagggaggcagcagaaggagggcagaacaatccatgccaggctgtgatttgccaagtgaccatctgggaagaatgggctctcagaccagggacagggagcagaggcaagcccgcatctgccctggttgcagaacccggattcagactcagggccccgatttctgcctggatcgctccactgggcggaggagtgactgtggacacatccagggttctctccaagtcggcttcctcatctgccaaatagagaccgcagaccaccagctcccaggcaggtgctactcttccggcccctcccaaggcaggagggccaggcgtactcgagacacaggtgtgctgggggcccaggtgggccagccagcagcatcctgcagggtaatgggagcaggtgggcaccccgaggctggcagtaaacactggctatctgcccccaggctcccaggaggggtcttgggcctcacctcctccggccggaacaggaaagcagctccaggcagctgggtccacaaaaatctccgttccctgaggtctcagaggcagtggcccaggagcatctggtcaccttcgggaaaaaccggcttggcaaaggctcccccgagggcacgcgtttcccggacagtgaggcaggacctaaactcttccgttaacactacatttttcgcatttctgcagtgtttgcactctcaggccccaccatttccccgcatctcttagggagaagttctcgacgtcccacctcccctggaagggtgctgctcccagagaccttcaggccaatggcccaatctcagtgccctcaggggagaggggggtgcagaaaaacagcctgggtcacaaaagaggtgcgagggctgtgagatcccggaggcaccgacgggaagcgagacggagaacaggagggcaggacgggctggaggtgggggatactgcagatggagggagccacggtgggggagggcgtggacctgaccgtcctggcacaaggcggtcgggtgcagacctccaggccctccgggttaaggtgccgcccagagccctcaggccgggggcgcacggaaaccacaggcagggtgcgcgtggagggacggggaaagcggggcgggttggggaaggcgccccgggaacctgaacctcccaccccgcctcagtctcgaccactccttaagccccaccccgccccaggtaaggcgcagtccacccccattcccagtagattaacgcacaggtgggggcgcgctcgggacatagctgcgctaggggacagcgcgcccagcccagtcgcgggggcgaggagcagggcggggcccagcaggaacccagctttgttagcgatgctccccgtgagccacgcgccacgcgtacgcgcttcctcaatggggccgggcgtggagccgcgccctgcgcgattggccaaacgggtggcccacgattggctgagaccctggcccccgcctcctcggccccaggagggtggggcgtgggtgtgggctgcgcggcgcgtgctgcccccggggatcttgcgcgcctcccgaacagccgtgttgtcgccagggccgcgccttccctcccacagcgcgcgctgcgcgtgcgaaggtctggcggctcttgggactggcggggctgcgcgcggggttagggtgggggtacgggaaggctcaacccaggacctgcgtaccttgctttgggggcgcactaagcacctgccgggagcagggggcgcaccgggaactcgcagatttcgccagttgggcgcactggggatctgtggactgcgtccgggggatgggctaggggg

SEQ ID NO: 6486 - DNA, 2300 bp, Homo sapien
ggcccttaggccagcttgcagtggggcccagcccttaggacaggctccttggtggggtaggggtgggggcagctgtcctcctgggccagctccttggggctgaacccgctgctcgaggggtcttccaggctcccagcggccggcaccacctctagagcaggtgggcaggggtgtgtggggtgggcaggggtttgtgagggtgggcaggggtgtgtggggtgggcaggggtgtgtggggtgggcaggggcatgtggggtgggcaggggtgtgtgaggttgggcaggggcgtgtggggtgggcaggggtgtgtgagggtgggcaggggtgtgtggggtgggcaggggtgtgtaaggttgggtaggggtgtgtggggtgggcagggatgtgtggggtgggcagcggtgtgcggggtgggcaggggtgtgcggggtgggcaggagggtgtggggtgggcagcagcctgcacagtggcttcccctcaacaagccacttcctcttgcagagggaatgttggggtgggagggtgtggctcagcaaagggcgtgggggttccaccggctccctgcccccgctggtggggcacagtgaggggggctgtggtcagacctggtctctggagggccagccgggggttcccgtccacctgtcagggggttcgacgccactttgagatgacaagtgaggccacctgggcacagcgctggtgtgagaaggaggccatcaggacaggtcaagaacccaggcccgccctgctccgaaattcttcagacctgatgaagaggtgtcccagaagcgggtggtgctccaggcccgcctcaccagctccagggaggtcaaggttggagagagacaattctaggggcgaaccagacatagccaagagcagctcatcttccctggagaggacgggctgcccacttgcacagcccgggggcctcctgcccctagacctggtaccttcactcttgttgccacccctacattcatacctgcgccccagtctgagccacacctaggcccccagctgaagtgacactgtgggtgccaggcatctgaggtctccacaagcccccacagactcagggtgggaattcctgggggccagagctgcagagggtgctgcctgggggtgctgggctggacgggggtcctggttgtccctcctggttctcctggttctccctccgcagagggagggaggcggtggcctcagcagttcctccagcagcgttcctgagcgggcggcagctgggccctcttcccacagccacgctggggttgccatgcctgcaggtcttggggccccctcccccttgatgaggtcctgaccaaatgcaggaggagcaattccagcaccgaggggcgagcagagccgcctgttagcactcctgggagggcccggagtggtccctgaatgatggattcacctggaacattttcaccctcttcaggcccaccctgccccagaggcccacggaaaccctgcctgtactggggccgcagcgctgcccccacccatacgtaattacacggctcggtgtaattgcaaattcgaggtttacaaagcctccccctggaggccccacgtgagtgtgagcgaggccccagcccacccctgtggccccaagaaggctctgcgacaaaatatccatgagtgccgcccacgaaggcattaaaaccaacgaccttctcaaaacttaagctgtcacaggacatttcaaagggtgtttcctaagaacacctcaataatgatgttccaaggagaccccatccaaattcctccaaggattacgcccccaaggcccagtccacacttgctcactcccaggacggggagctcacctcctcctccccgggcgccgtctcctccacatcccacaccaggtcctgcccatgactttccccctctcagcgccgtcctcagtggccacaccaagaacgaggccatgtcttcctgggaagggcctcagatgtcagcaaatgccctggtgtcttgggctgggctgggggcaccagggtgaggtggtggggggagccaacctcactgcccctccccttcctgcctgcccttcttccggggcacccagcagctcggtcctagggcgatgttgacagacagacagaggggcggatgcagcctacctcctgggcagtgagctgcggtctgaggcccctgcccagctggaaaccacagggaggggaagggaggggaggagaggagaggagaggaaccgtcatggggccttggagtcgagtcagggttgccaaatgccagatgctggtcacctgcttctttatc

SEQ ID NO: 6487 - DNA, 2300 bp, Homo sapien
acagcgctggtgtgagaaggaggccatcaggacaggtcaagaacccaggcccgccctgctccgaaattcttcagacctgatgaagaggtgtcccagaagcgggtggtgctccaggcccgcctcaccagctccagggaggtcaaggttggagagagacaattctaggggcgaaccagacatagccaagagcagctcatcttccctggagaggacgggctgcccacttgcacagcccgggggcctcctgcccctagacctggtaccttcactcttgttgccacccctacattcatacctgcgccccagtctgagccacacctaggcccccagctgaagtgacactgtgggtgccaggcatctgaggtctccacaagcccccacagactcagggtgggaattcctgggggccagagctgcagagggtgctgcctgggggtgctgggctggacgggggtcctggttgtccctcctggttctcctggttctccctccgcagagggagggaggcggtggcctcagcagttcctccagcagcgttcctgagcgggcggcagctgggccctcttcccacagccacgctggggttgccatgcctgcaggtcttggggccccctcccccttgatgaggtcctgaccaaatgcaggaggagcaattccagcaccgaggggcgagcagagccgcctgttagcactcctgggagggcccggagtggtccctgaatgatggattcacctggaacattttcaccctcttcaggcccaccctgccccagaggcccacggaaaccctgcctgtactggggccgcagcgctgcccccacccatacgtaattacacggctcggtgtaattgcaaattcgaggtttacaaagcctccccctggaggccccacgtgagtgtgagcgaggccccagcccacccctgtggccccaagaaggctctgcgacaaaatatccatgagtgccgcccacgaaggcattaaaaccaacgaccttctcaaaacttaagctgtcacaggacatttcaaagggtgtttcctaagaacacctcaataatgatgttccaaggagaccccatccaaattcctccaaggattacgcccccaaggcccagtccacacttgctcactcccaggacggggagctcacctcctcctccccgggcgccgtctcctccacatcccacaccaggtcctgcccatgactttccccctctcagcgccgtcctcagtggccacaccaagaacgaggccatgtcttcctgggaagggcctcagatgtcagcaaatgccctggtgtcttgggctgggctgggggcaccagggtgaggtggtggggggagccaacctcactgcccctccccttcctgcctgcccttcttccggggcacccagcagctcggtcctagggcgatgttgacagacagacagaggggcggatgcagcctacctcctgggcagtgagctgcggtctgaggcccctgcccagctggaaaccacagggaggggaagggaggggaggagaggagaggagaggaaccgtcatggggccttggagtcgagtcagggttgccaaatgccagatgctggtcacctgcttctttatcttggtaacaggcaggtcgggcaggagtgggtggtgggtgggggtgagcaggggtgaggggtggcagggcctcagcacagggattatccctcccctgacacacacaccagccctactgtccctgtcctgcccttgcagacatgtgtcctgcccttgcagacagccgcaggcaggcagggaccaccatgagcaaccccgtctctcctcctgaggggcagcacagagcctggaggaggcctgagtggggctgaggcctggggcgagctggggtggaggggcactggctgccgggctccagggatcttctccccttcctgccccggagggtgctggcacaggggtggggctcactcccactccgtagacacaatgatcagaggtcctgggtgtctggggaagctgggctgtgcgtgtatgcgtctaccatgtgggggtgcctgtgagtgtgctggggcgtctgcagtgaaggcctcctgagaccactccacggaaacaccgggaatccctgcagctgagcctgtctctcacgggaccgggaagctggagagagccccaaccctgcccgctggggccgagctccctgctcctgcagcagtcccatgccccacactctgagtctgccctatccacagctgctgggcctctctgtggccaccatggtgactcttacctacttcggggcccactttgctgtca

SEQ ID NO: 6488 - DNA, 2300 bp, Homo sapien
tcagcacggctcccagagtcaggaggcccaccaggctcaaccccgcagagaaggctggttgggaggagagaggaggagggttaggggtgcccaggacaggtcctgagtgcacacagcctgggtgtgaaatctaacttgggagtcaggggccgtgagggactcctggggggctctgaatgggcctgtctctccatcagacggccctgagggaaggaggagggaggtgggactcgttcagcctgggggactgcccctccttccctcttttcctccctgccctccatgcctgtggggctatcttggaagccacatgctccctgccatgccctagtgacaagtggccggactggagctgtaatcttatcagtctggacctggacctgggccccaggcatcctcctgccatgtcctagtgacaagtggccggactggagctgtaatcttatcagtccggacctggacctgggccccaggcgtcctcctccagggaggccctggtcctaggacttggggaaaagcattgggttctaaggcagtatccctgacctcctgggcctcagtttccctacatctgcccaccgggctgcagccttcctgggccccctgagctcctgcctgagagtcccctgcagatctggctctgacatcccctcattaaaggggccttcctcagccttacccctgagtggccccagcaggctctggccctcgctcccgctctctggatgttggataagtcgctgctgagtccctgcagggaggcgtctggctagagcagcccccaccccctccccacccacatcccaggtcctgagtggaacatcagccatgtggagccctcatggacctgctgtgcccagccccaggccagtcccaggcctgcctgggactgagccctgactgcacagagccaggtcctgaccgcacagagccacttcctgaccctgcccgacatatacccacactgtgcccacgctcctgtggggcacgagaaccaggcaggaacactggctgtcacccagacccgaggccctgcccaggggagctaggactccagggcagcccctccctgcccctgaccacctctggctcctgcctagggcctggcaccattctggctgtgaggcgtccagctgggctcgtgccagccacccttgcacccgaggcccctcccgatgcagccaggcctggacctcacttaccccattggtgcacagcctggtacgggttcttctccagggacgctcggcggatgacagcaaagtgggccccgaagtaggtaagagtcaccatggtggccacagagaggcccagcagctgtggatagggcagactcagagtgtggggcatgggactgctgcaggagcagggagctcggccccagcgggcagggttggggctctctccagcttcccggtcccgtgagagacaggctcagctgcagggattcccggtgtttccgtggagtggtctcaggaggccttcactgcagacgccccagcacactcacaggcacccccacatggtagacgcatacacgcacagcccagcttccccagacacccaggacctctgatcattgtgtctacggagtgggagtgagccccacccctgtgccagcaccctccggggcaggaaggggagaagatccctggagcccggcagccagtgcccctccaccccagctcgccccaggcctcagccccactcaggcctcctccaggctctgtgctgcccctcaggaggagagacggggttgctcatggtggtccctgcctgcctgcggctgtctgcaagggcaggacacatgtctgcaagggcaggacagggacagtagggctggtgtgtgtgtcaggggagggataatccctgtgctgaggccctgccacccctcacccctgctcacccccacccaccacccactcctgcccgacctgcctgttaccaagataaagaagcaggtgaccagcatctggcatttggcaaccctgactcgactccaaggccccatgacggttcctctcctctcctctcctcccctcccttcccctccctgtggtttccagctgggcaggggcctcagaccgcagctcactgcccaggaggtaggctgcatccgcccctctgtctgtctgtcaacatcgccctaggaccgagctgctgggtgccccggaagaagggcaggcaggaaggggaggggcagtgaggttggctccccccaccacctcaccctggtgcccccagcccagcccaagacaccagggcatttgctgacatctgaggcccttcccaggaagaca

SEQ ID NO: 6489 - DNA, 2300 bp, Homo sapien
aaggccagcccccctgcctcccaggctcacacctgcccctaacctgtgtccagcccctttcccctggctctgtctcctgcttcccttgtgttcctccaacctcacctgtctgtctggagtgctcctccccggctctgcctagctggctccttctcaggcatcagggcctggatccactgtggctcttccaagcctctgcacttggagtgcctcagccccgtggttgaggagtgccccaaccctgtgaccctctagcaagcatcctaggaattccgtccctccccagcactgatatgaccatcgtgctgtgacacgtgtcatctccgccagagttgcagatcctccaggggaggggtctgctgcctggctcccacagccagggcctggaacagtgcctgacacacagcaggcacccactaaatatttgatgcatggctgaagaggacaggcaggctggctgctggctgggcatggcctgcttctgaggctggtggtcaaggacacagtgtgcatggatctgccccctcctcccacttcctgagagtggagccagtgtctccctccacctaccaccccctgctgaggacacagctcacacctttaacgggaaatgtccccatcactggggacagcagggagctgatgggagagcaggtgtccaggacatccagagaaatgtttcctcacactggaacccttttctattcccttctaaacaaaaagaatcctcgaagactctcaagtgaccatatagtgtcttttcttataatgtcacttcgacaggcacaaaatgtaaaaccaggcataaactactagtgcttgcagttcttacgcaggcatgaagccaaaaccagtttacaaattaaccaccaagaaaaccggtagagcacagatgatgacgatagagctgttttgtccaatgtgagcgctactggccacccagggccatgtgaatttaaattacgatgaaacacaatgaaaaatttggttccttgtggccacatttccagtacccagtagtcatctgtgccagggggttatccaggtacagaacattcccatcgttgcagaaggttctatcagctagcactgggttggacgacacttgccaagacgagctggctagaggatggttctccggacctggtcccacgtggttcccaggtaagcccccgcccaggatgcagccccgttgtccatcagttttcttggagagggcatgggaaaccttcgtcagtgtgtcatctcctgcaaaggccttcgctccttcctctggggagaaagcacccttcactctctgaatcattagcccaaagcagtaagtgcagcaggcctggccccacaccttccggaagagccacggtgtgaggctggcatccctggggcacgacacaaccaggatgtagacgaaatagatgcaatatctggaggttctcctataggtgtctctggcctcctggacacttcacactgttctgggagctgccctctcaggccccagtgaccttttcagatgcagactcccacagcatgggtcagcaattctccccttccgtgagacagggattggttacctgtactaggaccttgaggccaacactgactagggggcctcatgcctgcccaggttccagccccggagagcaatgtgagcaaagcttgctgtctttgcaaagccaaccactgtggcatcaactccttcaggaagccctcccggattgtccaaggtgctcacctcctttggggagccctcccagattgtccaaggtgcttgagggagggaggaatgggttgttctcccggcaccggggctgcactcctgggcagacgctgcatgcctgtcctcaggcgcggccctgctgccacccccttgggggctcggagcgcgacagcagcttggggacgcctcccgcgcccagcacggtgcacctgggccctgaggtcctggccgaaacgcgccaagttgggggtaggtgcagcgaccccatacccctcggctgcgcgccctggcggcaggaggcggggccgggggcggggcgtgagctggccggggcggggcctatggaggggcgggaccgcggcgccctataagtactgcggagcgaggcgcgcgcccggccagagagcgagcgcgcaacggcggcgacggcggcgaccccaccgcgcatcctgccaggcctccggcgcccagcgccccacgcgcccccgcgcccccgcgcccccgcgcccctttcttcgcgcccccgcccctcggcccgccaggcccccttgccggccacccgccaggccccgcgccggcc

SEQ ID NO: 6490 - DNA, 2300 bp, Homo sapien
ccccctgtcaacactcaggcatgtcagcaaatccaccaacaccaccaggaggtaggctcactgtgggcccccactgcagacggggaaggccgaggcccaggaccagagcagtgtgttggggactccaccaaggaggcccaagcccatggcactgtgctctcagccacacaccctgcgacaccagggtggaggggggtccaccagggtggtgcccaccaaccccacctcacccagcctggcattgctggctaccactgagccccagtggatgggtgggtccacagtgactgtggacggactcagttctcaatgctttgcagggagcaggccctggggagaggagcggtgaggcctcagagacatttccttgagccttaataacaagcacccttgggatgtgtcaggtctccaccccagctgcctgggaaacttccaggcccgccctggcgacactcccagggggctgccagggagacctctcagcctgggcaggcaggaggggctcacccagtgctgacacaccgtccagagagcaaaaatccacctccggagaagtcccctcccgtgactccccttcagcctctgcccctaggtccacactctccctcagcccctgcccccaggtccacaccctccctcaacccccacccccaggtccacactctccctcagcccctacccccaggtccacactctccctcagcccccacccccaggcctacaccctccctcagcccctactcccaggtccacactctccctcagcccctactacccccaggcctacaccctccctcggcccctgcccccaggtccacaccctccctcagcccccacccccaggtccacagtctccctcagcccccacccccaggtccacactcgcctcgtcaggggacggggcttcaggggctggcagagggacatcctgtgtctggtgcctctcccacatgcctgggctgaagcaggccaccactaagcaacggctgaggtcccagggccgggcctggggaaggcgagcccctcccaaatggcctagctgcccccactgccagggcagtgccgaaggccacagtgactcccaccagcgtcccaagcaggctgtgcagaacagcccggcttggggaaggtgggatgtgactgccccactcatctcccagctgagagttcagttcagcctccgtccttccccctccaaataatcatccgcactgggatcctcagccgtccagatgggaaacagatgtctctggtcccacacactggctccaggggccatttaaaaagtttgccctccctgcctcaacttgagaaacactcggtccactgggacatcagccgagtcttccacgagaagggggtgacagcctggggggcacggggaggggcttgcagtctatgcccaggggcgtggccacggggaggccgcggccatggacacccactccagtccttccaggccaagaagggatttccaccccctccccaattctaacaccgacaggaaatggaaacaaaaggcgaaagcccatcagtcacttcccagcagcaaagactgcggtcaggagaaagccattctcagcaaaagaccctcctccacccacgctggcacccaaagatgcccagcgtgggggcccctcttgcaaagcagcggccccactcccggaccctgccatccactccaggcccctggtgccactctcttccttgtgccaactcagaaccgcgggatccccactcctgcgaggcctccagagcccttctgggaggaggcctccgctggaacgtgtctgggtgaggagagggagatcggctcccaggcagggacggccagggtgcgcgcaccccagcttctgggccatcccggcgggagtctgcgctccttttaggcgcgacccccaggaaggtctcgggtggtgaccgcagattggagagtgagctgggctggggaaagagtgaggcggatcgcccccaacctccggcaaagtgtgcgcccccgccccaccatccaggggcggcggctcttgatgagctcatgggggcggggcgccaggagtcccgcccgcgagcccccccctcgtccccgcgaagcagcagtccggaatccgcggccagggacccgcgcaggcccctccttagctgaggggcggccgggtactcgggtcccgacccgcgaccaccgcacccatcaccaccacagcgggaactgcccggcggcccccagaagccccggcccggccgcagaggtgggcccccgagcacagaggccccgaaactcggctcgcagccctcagccccaa

SEQ ID NO: 6491 - DNA, 2300 bp, Homo sapien
tgcccgggcagcgcctgctgccttttgctccctttcagctgcttcttggaaacagcggacaggctgggcaggaacccagtgtgcttggcagccccccttttaaagtcgattctgttatttattaattcccaggaaggagaaagaaagaaacaatccttcatagagtacaaacactgcttttagtagccttgcaaggagccctccaggaaccccacaggttacctgggctccatcctgagagccaccctccatccccaatccccagcagagcatcttgtggggtggggcggcttgtggggcggggcgccttgggaggcggggtgtctcgggaagcggggcgtctcgggaggtggggtggcttgtggggtggggcatttcctggggtggggcgtctcgtggggtgggacagcttggggggtggggcatctcgggaggcggggcgtcttgtggggtagggcggcttgtggggtggggcatcttgtggggtagggcggcttgtggggtggggcatcttgtggggtgggacggcttgtggggtggggcatctcgggaggtggggcatctctggggcccggccacttgggaggcggggcatcctgggggcggggcatctcagagggcgcctccggaggctggagtatcttgggaggtgggagcaggtggcagagaggcttcccacaggtgagctttgagcagggaggtgcctgtatggatggctctgtggggagaggggtgacaggagttccagattccggcacttatgaaacctcacagtgatggagagccgagtgctgctgtgcaggctaagttgtgtgcatgtcagcttctgcacttttatttccttgtttgtagacaaggcagagagaagctgagatgggcctgaggtcgccttggtgaaaggcactcagcagccagggccttgggctgccctccctcatcaccgtgaaagcgggactctcttttaactgacatcgggctccatagttactccagtcctaactttgatggatcctaaaagtgcacttctaaggacgcggcttcggtgtttcccatgccgctgcttgcccctgggaagcgttggctctgcctcggaagaagttagcgccaagatggcagcctggggtctttggggcccagaagaaacactggccccggggagttcagtcatcagggacttaggatgtgggggcttttcaaacagctttatttagacgtgattgacacacagtaaatacagatgtttaagggtacaacttggtaagttttgacaaatttatacccccgtgaaaccatcaccaactccccaggtgcccctggggcccttgggatctctgcttcctgcccctcctccccgtcccagggcaaccacgggccgtcgctgtgggtgcacacagcatgcatttcttcaacaagcggactcagaaggcacttgcacatcgttgctgttctgcctctttgcttcagcatgattacccagaggcgcacccgtgccgtggcctgcccgtcgtctatgcacccgtgctgtggcgtgcccgtcgtctgtgtggcatgcctgtctgtgcacccgtgctgtggcgtgcccgtcgtctgtgtggcatgcctgtctgtgcacccgtgctgtggcgtgcccgtcgtctgtgcacccgtgctgtggtgtgcccgtcgtctgtgcacccgtgccgtggcgtgcccgtcgtctgtgcacccgtgctgtggtgtgcccttcgtctgttccttttattgccgggcagggttgcacccacatgtgcaagccagcgacggaccccaggttcacccgttcaccggtcagtgggcatatgggttgtttcagtttggggcatttacaagaaacgtgctagaacatttgtgtacaagtcttgtgtgaacctaagttcatttctcttgggtaaatacctgtgcgtggagcagctgggtcatgtggtgaatgtgggtttcactgcttaagcagcagttttacataactgccaaactgttattcaaggtggctggaccgttttacagcccccgttgtatgcgtcccagttgcctcccccagcagcatgtggtgtggttggtctttttcgtggcagccagtccactgggtgcgctcggcatgtggctgcagcttgacctgggtttcctggtccctggcaaggtggagcatctcttcatgtgcttttttgctgtgtgtggatcttgcggggaagggtctgttcctgttttttgcccatctttcaaagattgggttgccagttttcttgctgttgagtttggaaagctctgcatacgttcagggcaca

SEQ ID NO: 6492 - DNA, 2300 bp, Homo sapien
cgtgacacaccaggttttgggattacaggtgtgagccaccacaccggactaaggtctctgttttaatgtgaatgctggtcagctgtgcctatgaggcatgttcggccacccacagtcatcatggcctcaacgagcttttcaggtttactttagaatgcatttggccaagaggtgcccattcagttggttggggttgcttagaattttactttgggtttaaaccagggagcaactccaggtagcaagggccctttttgggagcgttctctctattctcttttgggagaggccctgtgttgcctgcagccacttccaccctgccccttgggcacacaaggggcacacagtgtaagcaggtgggcaggaggggtcgggcagccagggaatgcagtgagatgggcttggggtaggggctgggtgcgctgcaggactcctcttcctcctgagggatggtaaaggatggacacactgccccctcccgagcatttgagggtctctgccctgcccatctgttacctgtaaatgttcctttgaggagctgatggctcaggcctgagccacatctcagagggtctggaggggaagaaagacctcatcctactagggagcccccccagcccaccagcgagcggtggttgggggcagacaggctgtggggctaaggagcccctgcactcccccgtccttttccctttgtctgagcacctccagccagtgggcttggtctagactctcctatctttccccacatcgtggggtggggcttgctctgggttaggctacttttccctagttgtggggaggggggtgctggcacatttcactgttccctggaggaaatgagtgcctgggaattcatatctagggctcccagcagcctctttgcaggccaatttggaaactgtccccagccctgcattttagggggttacagagtctctcagcaggccctcctcccctgctgctcccaacttgcaagcctgcactggttgggagaacataatggtccaaggagccccctctctactttccgctgtgttccctgtggggagggaagagcagtttaagaaataaggaatcccaaaggcgcacagcagaccgggggccgaggagtgggtcctgcttcccctccttttttctaggctgagccacagcaggtccttgaatcctatttcccagcggatgccaggacagcaggccctgggggagttctctctcgagcctttcagagggaccagaggtctagcagccaaggagaactcagaatccttgagtgtgtggggcaggaactctcccagctgagaaggggcacaaggtgccaaccatctagggcccagtggccaaggaagacgcggcttgtcgcagggagaatctgggccctggtcctccctttcagggcgggcagctgacctgccccctgctgcggacaggcgaggccaggctgctggctcgcaagcatggcggagcccaaaccttccctgctgccgcccgcccagccacggctgacttggaagcttgaggagcgttcagcagcctccatcctgcccgggaggaccggggacctggaagggcctggccctcgcttccctgcagcgccctagggggacgtctcagtgcctcccggagcccggaccaatgcaccagagctgagggcccaagggtgtgagggtggccgggcagtggccccgaggacggcgccccacaagtttgcggccagggcccagcaaacccctaggggtgggaaagcgtcggcccagctagcgggtccagcagggctgcccccttcaccgtggcccagcggtcacgaccccacgtcctcatcgcgggctgggactgcctctgcgtctggcctgagcgggaccgtgggatcctggggagccccgcctcggtgcactgacagagcccagaaggagtgacggttaccgcttccggtcaggaccggaagtgccgggaacggcattcgtcctccgtgcgagatgacgcacttcctgcctgaggcggccgctgttctcgcggcttccggcaggtggcgctgagaccacgggaagccagcctggctgtcggttagccctcgagcattctgggaattgcaggcctggcccctcctcttcctgttcttggtcaattccggtcttgtttccccaacaaatgccgtcgtttccggggctgcttccgagccggacccaagggccggggcgtggaggagtagaggggcgagcgcatgcgcacaggactacacgtcccgacaggcgtcgggagcggcggcccagttccttgtgggagctgtagttctgcaggcg

SEQ ID NO: 6493 - DNA, 2300 bp, Homo sapien
gaccccacgtcctcatcgcgggctgggactgcctctgcgtctggcctgagcgggaccgtgggatcctggggagccccgcctcggtgcactgacagagcccagaaggagtgacggttaccgcttccggtcaggaccggaagtgccgggaacggcattcgtcctccgtgcgagatgacgcacttcctgcctgaggcggccgctgttctcgcggcttccggcaggtggcgctgagaccacgggaagccagcctggctgtcggttagccctcgagcattctgggaattgcaggcctggcccctcctcttcctgttcttggtcaattccggtcttgtttccccaacaaatgccgtcgtttccggggctgcttccgagccggacccaagggccggggcgtggaggagtagaggggcgagcgcatgcgcacaggactacacgtcccgacaggcgtcgggagcggcggcccagttccttgtgggagctgtagttctgcaggcgcggaagccgtggtgctcggccggcagagcactcggtttcccagagggctgagcgcgccgcacggaggtgcggcgccgaccaagatggagactgccgagcagccttgagccggtaggtttgtggtgagggaggacgggccgcgcgggccggccgagcctccgggaggtcaccgagcgcagctttaatacctgagctcgaaggccccgctgtgctcgccgacccccgtacctcgcggccgggcccttgggacccacagcatccttgtgaggcccggaggcctgtccagcccgactggacagtgccgaggggcaccgagagccagcttggcaccgagagttcgtttgttctctggcggggaggtcttgctggcacatatagtggagaaaggccgggctctgcgttcatgtggagaaagagacggcttccttcagcctacggacatgaaggagtcaactctaccttccactcgttgccggctttcgccgagaaccccgagaaacggactaccggagtccctatcttgcagcccgatccccgctacccgtcggagtgccccgctgaccaggctgcttctggccgcggcggcgttccgctgcagaggacgggagtgcgaatctgggaagcagggttctggttgaactccagcttcgtctgcaacatactgtgtgacttgggcaaattatttcccccgccccgttcctgccagctttaaaacggtcatcagtggggggtgctgcgtatcccctttcactggggtggcttcttcactgaggagagtcgcgcctcagaggaactgaggtcctgcctgtgttcgacctggtggggggcactaagagcccctgatagtacccctgaccccatccttattgggtgcacaagacacaggtcactctgggcgggcaaggagttttggtagcaggagaggagtcggtggatggatggctgaggacagtgcagaagggtgtggctgggccgtctttttttgcctggaaattcaagttctgaggcacccagtcactccagcactaaatgggtgcaggaggcagcacttgtctgcccagctggaaaggcagggtatgtgctgagtgttacaggtggaaggccactggaggtcgctccaggagccgcggggatttacctctgcctaacagggctgctcaaggtgatggtcgacaccccactttcctgagagcttgaccctcagatgccagggccttggctgcagattccttgggagctcccggggatcttccagcaaataggagcaaatcttttccccgtggatcaggaaggtgcacgctctttgtggaatacgactgctcaccccgcacagcaagcagcttataagtggccctcctgcctgatttcagccctgggttcaagccctgggtggctgcttactaccaaaatcgctcagtagctccaagcctgcctgcagagggttggcaccattaaatgaggtaacgagtcaaaagtccctaccctgggtcctagcctgtcaggggctccgaaaacccaggctcaggtcggtcctgcccggcacctgtttcacacatgtacactccggtctgaggttggtcctctcccccaccccacccacctgcagttgagcagctgaacagaggccatgccggggcactccgaggcctgagacgaccacgcctgtgccgctgaggaccttcatcagggctccgtccacttggcccgcttggctgtccaatcacactccagtgtcaaccactggcacccagcagccaagagaggtgagaggagggcttggagggggaggcgggactccaccctgt

SEQ ID NO: 6494 - DNA, 2300 bp, Homo sapien
tcccagcctccagcccccacctggggcctggccacagacaccagctcccaacacagaaaaccaccaggcgtctccaccagcgcgggaggccgtattcaaatcctgcctctctgcggtccgcgggctggttcctgctctggaggcagaagtgcgggaggatttgcatcaccctgcagggacagctgaggcccacgtggtgctgagggcatcagggcgcctccacaggcctggccggaggagggggctgaggcccgtgggtgggtcctgcctggggctggcagtcaccagaagtcgtgccggggttgacttgggcctcacaggggggccctgggcagccaagacaaccagcctgagctgggcatcttaaaacaatggcaattgattctctcatggttctggaggccaccagtgctgagtcctaagtcaaactgtcggcaaggccaagccctcgagggggatccttcctgcctcttccagcttcggggctccaggtgtcccttggcttgtggccacatcacccaaccactgccttcacccctcccctgtgtcttaaagggtgtttttccctgcgcgtctgtctctacgtccaaatgtcccctttctctatcagaacctgggaatcagggctccccctgctccagcatggcctcatctttacttacatcttaatacatctgcaaagggcctgtttccaaaggtcacattcccaggtcctggggtttgggacttggacatacctgtttggggatgcagtaactgtgctggctccagaggcctaatggggagggccttggccttagcctctgccccaaagccagccccaggggtcccaggacacactccctctcatctctgaagttccccccaactcctgtatcccctcctggggtcacaggtgggcccctctctaggaaatgaaggtttttacagaacggtccattgtcttctcacaaagggcttctgtggtggacacagcccagagcgcctgggtacaaggtgggcacaggagaaccaagggacagccctgtgggatcaggagctgccaggtagccccaggtcggacagggtagggtggctgggggcccacggagacctctgcccagcggcctgtgacccgacgcgtggttccaggagggcagacagaggagcaggtgccctcggcctgccagggcttgtcctcaagcaccagcttccaatattgagttttcagaggagcaatcggagggaggtgggaccaagccagaccgaggtcagccaggctggggctgggcagctgacagatgaggctgtgggcaggggcggagccagggcgctgaggggccagtgccgatccttggatccctgccacatagagaggggctgagatgcccgacctcaccgggcagctgggagacatgagccccatgagggttgagggaatagggctgaggcgcacgcggcctcttctacccccgcttgctgatgtgggagcgccacgggaatagctctgctgctgatgctgtgtgggccggggcaaggcctcctctctctgtgtgtcctgggcctcctggacctcctgggcaaggaaggtggtctctcgtccacaccgcctcctgcacttgagctgagggcacctgtctcaccttttcacctctacccaggtgcacccagggtctccacatccctgtcctgggagcgggtgggctgtgtggccaggggactgcaaggcctctgctgagtctttcggagtttccaggtcatccccacaaaaggcctctggagaaatgtctgcaggtgtggccaacctgaggtgccctgagtggggtgagtagaggaaccaggcgctgacagcggagccccacacatcccatcctcacctgggaaggagcttggttggggcggtgctacagcgagtgtcggagctgcagggggtcgctgggcagggcctggctggagagaaggtccctggggcagagatgcctgggggcagtccccaggtctccttgtgcatgttggctggagaggggcttcccaggggaaagcagagccagccccctgaggggagggaggtggggatgggccttctcagccctcaagggccagggtatccctgcagctctagaggccaccatgcaggatgtccaaggcccccgtcccggaagccccggggatgctgaagaccggcgggagctgggcttgcacaggggcgaggtcaactttggagggtctgggaagaagcgaggcaaggtaagggcaggccccaggcctcaggtgatgtccgccttgacctggaacccatgaggccccatttccttccctgg

SEQ ID NO: 6495 - DNA, 2300 bp, Homo sapien
tcccttttctataggactgtctggcaggttcctcacctcagttttgatgttctttatgtatcagtgatattaatcctttgtgatcgaaactgcaaatacttttcccatttggtcatttgtctcctttactttgctaatggtgcttctattttaatttttcttattttatctgttgcttttggatttcaagtcatagttggaaatgttttcccgattcacaggttcttgaggaattgacctgtacattcttgtagaatttgcatggcttcatctcaccctttacacttgagcctctgattcatttgagatttattctcgtgtgcggtgagatggacccaaggtatgctttttctttctttatgactgtccagttgtccaaacgctgcttattcaaagctcaccttcctcctgctgaggtgggaggggaaggcagagactccatgcaggtgtatgtatgttcacccggaaagtaactgctgaatgcgtgctgtgtgccctgcagagctgactgactgcccccatcttctgacccgctgcccttctgcaccttcactgatatgcttcccaggaaggtaccctctcctcggcctcccttgtgttatcacagcgcccagcacaagctgggacccactccatccactcttgctgcaaatacagactgtgcactcctgtgtggcacctcactagggtggggagtcaggcgtcaagggcctgggctggactccgtccacgataaaagagcagacttttggcagggggtggtagatacatcaaattgacccagggtgctcagggacgacctggaagtgtcacatgagttatgggtctcctggcggggcggagagtcaccgctgagctccacctttagtccctgcctcagggctgtgtgcagtatcctgaaaaaagccggtctcttctgttggctgccccccaccccccccccaagcctgagacgtgctgagacccaaatgccagtagcgggcgggaggcagtgcagagacctgtgaaaatcttccgatgtgaccaacccacccccacccaggggaatccacggggcgcagcggcagcgcggtctcgacggtggggaggacaaggcgcccattctccaagttactagggtggcgcaagcgcctctccctttaactgcccaggcagccccgcctgctatgcccggcagtcaaaccaggtccagaccccggctgtgccgcccccaccccccagcagccctgccggctccccacccacacagctcccactgggaggtacctgacagtggtggtcccatctcaccctcccggtccaagggccctggtgggaagcgacccgagcgtattcgccgcccgcagctcgcgcgcctgggcacccgggggcgctcacagtgatcgcggggccagcacaccctcacccaggacatccctttcctccccccaaccccaactccggagtggctcagagggagggaaagtagatgccggcaccctaccccgcccctcctgcccccgctgtgccgttctcggtcgtggtatcggccaggccttaccccttcctccctggcgcagctggggtcctcctccgggccaggcagagcaggcgggcatcagaagtgggggccaagcaggtgggtgagggcagggcaggagcaagcaggggagatgcagacggggcggggccaagcaggtgggtgagggcggggccaagcaggtgggcggggagggggcggggccaggcggggtaaatgcacactggaacggggccaaacaggtgggcgaggagggggcggggccaagcgggatagatgacacgagcggggctaagcaggtgggctcgggcgggggtgggggtgggggcgggggcgcaggcgggggcgggggcgcggacaggccaagccagggggtgaggcggaggcagggccaggccggtccgtggggagagggcgggccaagccggtgggcgcgggcagggacgccctgtgcgcgccggaccggcgggggcggggcgtgcaggcgggggcggggcacgccgtcccatgggaccggccctcggccactgccccctccggccccgccccgagcgcccgggctgggccggcagcggccccccgcggcggggctggcagcagtggctgcccgcactgcgcccgggcgctcgccttcgctgcagctcccggtgccgccgctcgggccggccccccggcaggccctcctcgttatggccgcggcctcctccccgcccagggccgagaggaagcgctggggttggggccgcctgccaggcgcccggcggggcagcgcgggcctggc

SEQ ID NO: 6496 - DNA, 2300 bp, Homo sapien
aggggcaggggtggggggcaatcagggttcctagaggacaaccccatgtagttcctcactgcagggcttggagggagcaggtgaaggcttacctgtcttaggtaatgaggagctgtgcgggtctgagacagctctggttcctttaagggtatgtaggggtcactgccagtctgtagctccctctgtgggggcaggctgtggcactgtggcgactggcagtactgacttcctctaagccaaccgggcagggacaagtcagcttgttgttccgtccacagtagagggcggccctgggggtgaacggctgaccgtgagggcgtggtccctccccccagaccaccccggaggccccctccgccctcctgcctacaaagagttccccctttgtgttgagaggcctgggtctcagaggtagatgaatggagtcgtgaaatcaggcagggattcccttctgcttaaaacccactctccttcccatgcagcacaggtggccaaaacctgcggctgggtcagaggactggtttagtaagaatttttttttttttaaatgtggttatctgctagccagaaaaggtgtgtggtttcgcagtctttcagacaaactgaatttaatagtagctgacgtgaacccctgtttctcctctaggctccagagccgcaccccagtgcaggtgtggaagctcagttcctccaaaacccagacaggccttggtgtcctgactgccacccccagggggcccctcactcgagtccttgcttgcagtgcccatgggcagcagaggtgtccggagatgcaacagggcccagacccctaccagcctgtggcccagctgggggcaggactccggggcagggtgagtccctgcgtgacctgattctctgtgggcaggccgggcagggtggctgcagggcggcggagcctgtgctgctggcctgcatttctctggctggacagatactgcgcccatatccctggtctttcaaagggctctgtggctggtggagggcagcaatgccccaagggaggagcaggtgcccaagcccccaggtggccctgcgggtacaggtacttgtttactctgtggcatcagtcctgcttcccagctcaaggccctggcctccacaggcctcctccctccctccctccctccctccttcccttttttcctgtggctccaaggcccacagtagaaaggctccagtctgtgtccatgtgttttggaggcctctcaggtacagggactgtcagcccagctgtaagtggaccttggaccgcaaatttgcatgggcccctttgccaaagccctgtgcccactgctggggaacgctggggactccgctcttgtggggcagtggggctgggtgggagcaaccccccatccgggtggctgtggccgaggcccttatgagagggtggtaggtgtgtctccacagtgggggaccagatctctctctggccccaaagactgcttcaagcctctggaggagcactttgccccaggctggggcgtgactgcttctggttgagggttgctgcctgtgcaggtggccctcttgtcggtcttgtctgctgcatgggggtgtggcctcctgtggatggcccctgtcctgggtggtactgctgcaggacctgggtttccgggggtgtccgggagtcggatgggcctcactctcctggcctccactgggtccaggagtggcgatctgtgagccaatggccgtggctgggggcagcctggggtgttgagaggccctgggcagccaccttgcctctctgagtttgtcctcatgtgtctctggggctggaactcggtgtccgacctggtgatgggtcaggtgtgatcaggtgtgtggggctcggtctgcatgtgcagggctgtttgaaggcctgtggggccatctgatgccccccttttcttcagccttggagaggatggcttctcaggccgcctcgcagcagatttgtagtctggttgctgtcgttcctgaaatagcctctgaagctctgtccgggaagggaaccttgagtgtggaggagataagcctgctgactgggtgagccggccggggcgggggtggcccctcttcccttcctcccctgcagcttccatggcctggggctgtgagaggcccgggaaggcactgtctttgcgcctgcacatgtgtgtgtctggagtgtaggatggcactggtgccgggcctggatttactcagcccagatcacggctgcttttgtttacgtggcccctgctctcacccacaactccaggtttctggctctcgggaatttgaggcctgtg

SEQ ID NO: 6497 - DNA, 2300 bp, Homo sapien
tcatgacccctaccagatggagtcccctaaggactggggaaccccaaggccagcagggggtgactgcccaggacccagcacaggagcattggcagccctcagcagcctctgcactcagacgctgatcatggtgttgggggtagggggttggtccctcacagattcccatgagcctcacagcccagcatagcttcatggtgggccagtcaccctcggcagcctgagaaccatggtccaggcctgaggccctgccctttctggccacttgcagggctcagcacagggcccagcctaggccgggggctccacatggccaggacagaggttgggtctctccgtttagatgctgcctgcctccctatccgaggtgtctccatgtccccggtcatcagggcgtgacccgtctgaccagcaagccccttccccagacgagagcagggtgtatgctcttccctggggccctggctgtggcgatcacgaaaagctccccctctcctgcactccacagacctcatcgtggtcgtggcctccatggtggtcctctgcgtgggctccaaggggcaggtgtttgccacgtcggccatcaggtgcgtctgtgccacaagctccccccgccatgccgccccaccccgagcacccctcctgagccgcgggtggtctcacgccccatccaccttgctcagatgcaaggtgccttggtgcccactgcccccgggggcactgagccatgtgctgggatgggtggagcagggtgggtgcaggcaagtgtggagggcacggctcaacccaagatgcctcaggcagccctaggctctggcccagcactagcgcctctgaacttccaggacttgggtggtaacctgaccatctgggcacacagcctgcccatctgcaaactggggtgacccaaggagccccccagaaggcagtctggggactgagggaatctggaggtacctggccgacccccagctcagccctgtgtgggcagattcagagcaggctctggggggctgcgcctgagagggagattcccaggcccctgtcgggatggacatatacccagcctccccacccagagtggacgcctgggaggggcaggggcagggacacccatgccatcggccagccctaggcccggcgtgaacagctgagcccagcctggctccctcagccccacaccatctccttcgcaggggcatccgcttcctgcagatcctgaggatgctacacgtcgaccgccagggaggcacctggaggctcctgggctccgtggtcttcatccaccgccaggtgggtggcccgggttaggggtgcggggcccaggttggggacaggacggagggagcagagcagcccacactaggacagcttgagatgcgctgaggccccgggggccggtgggtgcctgggcgcaggggtacctgaacggggcccaggatctcagagcaagcccaagcttgagcccagcctggatgctccaccccagcctggtgccagtgaccctggcctgccaggctgatggtgtgctcaccttcctctgagctgggggcaaatgaagacagaaagtcagaaatgaaaaacccaggcaaatcaaggacccggtcaaggcagggccaccagactccctcccgagggctgcactcagatgggttcaggctgcactggcccctggctctgtggggtgaggggacccttcctctccctgaggatctcctgggtcctggtccattcttggttctgtcacgtggcaggaaagagagctgggcaatcagtggagcccgcgccggcccagacagtgggcctagggcgaccccagggctgagcctcattctgggggtaacccccacccgccacttaccggagttgtgaggagtgggctatattgaagccggccctgtgcatgtgaaccgcgctggagcggcgtaggacgcccagtgatcgctgggactcgctgccttaggcgtctgcacaggaggctcccagcctgcggttcctggagcccgacactgtgtgttttctggcctaggagctgataaccaccctgtacatcggcttcctgggcctcatcttctcctcgtactttgtgtacctggctgagaaggacgcggtgaacgagtcaggccgcgtggagttcggcagctacgcagatgcgctgtggtggggggtggtaagtcggaaacttccaggcatggggacaggggcagctcaggctgaggagtgggcaggacatctgggcactggtgtcttgagacttcgggccttggcaggggcttctcacctgcacgctcacaggcctc

SEQ ID NO: 6498 - DNA, 2300 bp, Homo sapien
cccgctccctaccctgaggacagtggcggctgcagccagtgagcatgtcaagggtcagtctggggcccaggtaggtagtgggcatgcagagctgtgcctcctggtcagtgcctggcactgtgctgctccttgaccccttgggggggccagctcttcctgaagccattgagaaccagaactggtagcctggggtggtggggggtggaagggaggagacagcaggcccctgccggtgagtagacaggaagctgggacccagagaggccgagctgatggcccaggactacccagagacccatggccaagctgatggggacaagcttcgctactgtgcacgcttggaaccaggcttatgccatcaccacataggcgagctcccaggtcttcacaagcctcccgagggcagacactgtcactgcctgcactttgagccacatggctggggcacagggaggagaagtgatgcgtgtctttttgtcccgcagcaagcgcggaagccttacgatgtgcgggacgtcattgagcagtactcgcagggccacctcaacctcatggtgcgcatcaaggagctgcagaggaggtgggcacggccaaacggcagcggggagggtgcccaggtcctgcccagcccggccccagctgcatgatcagcggtgccggaggagggaggggctgagaccctgagttcttgcctctcaaccacccccttctcctcaccacccccagccctgcagagggagggcagctggccacggccacggttcacagccagcccaccaggcagctctaccttgttccccgcccggatctgagatgatgggggaattggggtaggggaggcgcgtaggggaggcaaacacccgcctccgtccctgctcaggtagcaacaccagcttcacactccccacaacttcaggacactcggcagccagcccacccgccttccctgtcacctctgagcaaggggccaggcccagccctgggaagacactgcctggtgccaggccccaccgcacgggtctcccccagactggcctggagctggagaccctgactgtggggagctaatgtgttcccatggagctagcaccatcctcccgggcctgcacagactcagagcagctgtgcctccgagatgggctcgcctgggaactagctccgtgtgttacagggcatggctgggagcccgtgtccatcctggccacaggcgaggggtcaggctgccttgcccatggctgatccactgcctcccactcctacccccagggaggaagtctgagaggcagcccaccgactccccctttccgagatccctgctcagccccctcgggagcatggccctctggggggttgggagtgacctggcaggccttagggtcgggggtgtccccagagtgggtggacagtccactgtcttgccgggcacgtcaagctgtctgtcccacagacgacagtgcatctgcgcagtgccagggccaggtgtgaactggtgtctgtgtccttctctccaggctggaccagtccattgggaagccctcactgttcatctccgtctcaggtgggtttctgtgtcagttactctgggcccagcagcctgcaatggactctcccgcacctctgccctcctggctctccccatgatgtcagaatgggccattgcacctccaaagtgcatgacatgaaatgaaagccagggagtaaggggaggtagaccccacccttagcaaagtggctccaaagtacattttacaaaggaatattcaggtttcataagaacctacctgggtccctttaaattccagggcgttgaggttaggctctaggtgtggaaacatgaacccagggcaactttgcagaagggggtgatcctggggtggggtttgggtggggtgagctgccagcccagaattcaagagactatgggtgggggccttgcagggctcaagttgagagggacagaagcacctggctgcagcctgggggctggttttctggctccttgaccaaattccttgggtcccctggacacggggctgtgagtcattccggggaatgacagggaaaaggcacattccctggggtttccctagcccagatgcaaacagcagccacggctcatagtgtgggctggtgtaacggagcagcggaatggctgtgcccccagcctggagtcaggcctgtgtcgccctgggagtggaatggcatgggcttgcacagctggcagtgtggccagcttaggcagccccctagggctctcagaggtcagaggtggagagcgtggagcaggatggagcccaggt

SEQ ID NO: 6499 - DNA, 2300 bp, Homo sapien
ctttctcttcctttctttttcttctttctttcctttcttcctccctcctccctcctcctcctcctcctcctccttcttctctctttctttctctttctcttttttttctttcttttttgagatagggtcttactctgtcacctgggctggagtatagtggcacagtcatggctctatgtagcctccacctcccaggctcaagtgatccttcctgggactacaggcgcgccgctacgcctggctaaaaaaatcagaagattttttgtagagatgcgacctcgccaggttgtgcaggctggactggaactcctgcgctcaagcagtcctcccgcctcggcctcccagagtgttgggattacgggcgtgagccaccgcgcccggcacccttttctttttaaaggtctgtggctgagttttgtattgggagtattcttacttacccagaacgtggctctgtctctgtttcatcgctggtggtggagcaagtgaatcacccaccaatgtataggttttctaagtttgtggttgaaattttgctagtaaagtggacacatcacaaagaaactgcctccctccctcactctgcccagcctgccccagccctaggcttcgaggcaggcctgggctcccggaggatgctccctggcgctgtggggccagaggcctgggccaggctcctgctggggctggagatgggcggggtggcggaggccggccctggcctgcctcatttctgcgctccgaccagcctgggaatctgtttctgtcatgaaaggcgagggtgacctggcgggcttctgctcctggttggtcagaaagtccggggatccttggctccggttaaaggggcccccacgtctgccgtcttgcccggccgcctccaagtgccgccggcccagggctgaggaaggcgggccgcggggagaaggcgcgagggccgggccgggcagggggtcccggagccaaccccaccgcccgggccgccccgggcccgcgcccgccgcccccaccgcgccgcgcgtctgtttggagaagaaagcgggccaatttgttttcattcagaatcacttaagatcccattttggagaaatgaaaagagagaagcgcgcttcccgggcccgggccgctgggtgcccgcccgtgcccggcggcgcgtcgagtggagggacagcggccccctccctgccctcggccccagcacgcccggccgcggctcccggaggtccgaggaaggcggcgaggccgcgctcatctgcatgaagcgcacactcgcggcccatctgcaaaggcgcaattaaacgcgggggtgggggggcaggggcgcccgaaattagcatttccgcggccatctggcgcgaggagcgggcgcggccggacaaagggcgccgggcgaggggagaggcgagtgtgccgcggcattgacctgcaaatgaggctttgtgcgcgcattaaagctcgccggacccccgaccccggcccccgccccgcccgccaggcccgcggcccctagcggcccaggctcggactgggcaccccgaaggtctgggggtcgggccgggcagtgccgcgactgggcagggggccgggccgggccgggcctggccgggccaggacaggctgtggagcgtcggagccccccacccaggctgggttcctctgcagcctccaggagagcccctgggaccctggccccttgaaccctacccctgcccccatccggtcctcgcccctctgggccggtattccccagcctactcctggaaaggatttctcaggacgcaggggtcctggctagaatccctcggggtgggtaagtggagggggcgtggacaggtgggggctgcgtggtgggggcaattttgtattgggagctactaaaaactggccacctggacaggtttttgtttttgccatggtcattaatgccctcaatgtttgaaaaaggccatttcacagtgttttatgggccttaaaaatcagggactctttgaaaatggttgtggggcagcttagtgacagccagatgattagcaagagctcagtatcaggtctttaggggaccaagtgtgtggggtggtggtacaggaaatctgggactccccagctggtacaactgaggctgcagccagggccaatgggccggggagcaggaggccgggactgggagccctggggccagctgggctctgccagatacctgggtcacttggaggcccctggaaggccccctggactttctgccacattgctcaggctctgggtgcctacaaactgccccccatgccgttgggctgctcatt

SEQ ID NO: 6500 - DNA, 2300 bp, Homo sapien
cgcacatgttcaattcaattttgcttttgtgccagagaggcctctgatgtgagtgtttctggggagtttttccatgtttctttatgtcctcgaaaccaaagtcagtcaccaactttcagaaaacaccctcctggattgaagcgggtaagaggaaagaaaaacacacaacacaaaacaaaagcaaaagaaaacaaaagagaaagcactggctgcctttctacagaatcctcctgcgaggagacaattcatttcaattgaaacgtttccattgtgcggcattcggaacgcgctcctcgcgttgggcagaaatgcaaatccccctttttcctttgattcaaatatttaaattttcaaatatatatgctgcgacaattgaatggcagctgacctcacttattttcatagaagcaatgcggaagccacaggctgcagttaatctcgccagcagcgccccgcctgctgacagcggtacggtcagtcctgggggggcgcagggaataatccttttattcagacatttggcttaaaagaataacaaggaggaaaagctggaacataattgcattgcatggaaaacagagaaagatttttttctctctctctaacaagctttctccttttccttcctcaaagaatcggaggctcacggccagaggctgttttcttggtaaagaaatcgggagtgttttccttccactattgtccccactcccgcccaccccccgagggattttcatagttgggttggctgccacactggctcatccattcattcattcattcactcactcactcattctgcaaactcggaaggaagacctactgtctgtccagctcagctgggctgggggcagggcgagccagacactccccaggcagccttcctctcctggactgggacgcccccacagagccacaccgtgaccctcggaggcaccctgaagcataactgggccaaccgtgcctgcaggaagcccctttgttcctccttggggccccagagcacctgagtgaaagagtctgagaccggaggggcagccagagggggccctggagggaggcggagggaccccctccctgggccagccaggccagcgtctgccagagtcgctgttgctaagtcctcttcttgcagcctggggatcccagaggaccccggcccagtccatcagctgggctgggtctttaatatttaaagagctctcccggacatttcaagaactccccgacacgattttctgtgatgcgtgggctgtcgggacatctgtcttctatacctaataaagtcgcccgacgcagaatgaactcctcggcatcgctttgaatccgggctcacatatggttgctaattagctggctatctcttggagttaaatgattttttttctcgccccgttcgcatccataatagacgcgaacagagtcgtgattgttccctgttgcgggacattctgcgcctgaatgagcgggggctgctgtgtcgacgcggatttgccatatggttgcgcggagccaggaagaatgggcccctgtgtgtgcgaccgggacgcagcggcgcgggccgtgccagccgggcggagccgggtgcccgacggcgcaggacgagcgggcgcaggacgagcgagcgcagcgggcgcgggcgcaccgtcggggcgcggggaccccgagggccagcggagccgtgctgcgcgcagggatggacgctgggcgcccaaggcccgttcccgtggacaggcgcgcggagggcagcaggaccgatgcaccgacggacgcaccgacggacgcgcggacagatgcgccgaccgcaggctctcccgccgtcccggggccgtcgtgcccgtgcaggccgcgagcagcggcggggccggctctgcggctgcagcagccccattgtgaggccggcgagacaatgggcggcccgaggaggcacctgctcgcctgaaaggcccataaatcgccgccgcgtccagctgccttcccgcccctccccgcggacccgctagcgggaagcgcggccgcggccgggagggggaggctcggtccgacagtcgggcagggccgcctgggccaccgccgcgcgctccctcccgcctgggcgcagctgcccgcacgccccgacgggagctgcgcccagcctcccctctggagtcggcgctccaggctgctgcccggccggtggccaaggccccagcaccaccgtccctcctgcagggcatccagcacctacccttccactgggcggctcctggttctggtcccggctggctcactcaggctgcctttggaccagattcttgaac

SEQ ID NO: 6501 - DNA, 2300 bp, Homo sapien
ccaagacggaggaatccccacagcactgggtttgactctgtaattaagctggtaaagtggaaaaataaaagtaggaaacctaagtggaaaccaaaccagaaagccaggcagcccgggagttctgagccctgcttccttccagctgtgcggcctcagcggctgacgcggtctctgctgctcttctataacacaggatgatggcagctacaccctctgagtggtgtcaccaaggccaatgagtcctgatggttggagtgtgggtatccgggggcctctaggtcactacccactctagccctttgctcctagtctctggggaggtggcagcataggggcatggagcagactagactttgcctctttctgcccccaggccagttgatatgagccctgcttgaggggttcgcagggcctggggagccttcttcagcttctctttgttttcctaagatgaaaattgtgacatctgggcttgttgcgggaaatttgtaaattgtgcacagagaagaatatgaaattgcacataaatcatggcttttggttccaccatcaagagccaagaatggccctggcccctctcctgggttaacgccctgtcccatccagttcacccccctcacttcagatctcgcttccctgagacccagaagacccgccctgctcccccagctgcagctgcacactgccacagcattccatgggggtgggggtgtcttgggactcaaaggcaggctggttggggttcaggggaccgcaccttccctccctcccagaggtctctctgctggctcacaggctcacctgagataggggcttagatctcatgggctgctggaccctccaacaggtgtctgacagtccccatcccgatctgggaggctcctggtttgaggagggggctccctgcctcatggtaggtgggccaaaagggaggcagcaggaaataatggtctcttttggtctggcctggctggggtgaagcaccgtgtgtgtgcgtgcgtgtgtgtgtgtgtgtgtgtgtgcgtgcgcgcacgaccgaggtctgtaccaggaagggctgcaggcgggggaggggcatggtccttcacagccccttcccctatgacctcgggcagatctttcacttttacccagtacaacagcttccagccagcctggacaggcagatcccggggctggagtggtctggcccaaggctgagaagggctgggacccccgacagtgacatgatgggctcagcccctgttccatctactgggcagggtgggcctccgcagatagcggcttcagactccagctccagggggctggtgggagtctctcaaggtgtcccacacatggtccctcggggaaagagtggagctgacccctgtcccccctcccgactcgagggccttagggccagcaggtgtgtgagggctccaggcgcgcggagccctcgaagggacaccagcccagcagcagcaggccgcgcgggggcagccgaagaccccatccggcgcaggccagggccgagctggcagcggcgggtccaagcctcgtcagctggcgcaggaggcccacgggcgagcgcgggacggagctgggcgccggggtccggaccgggccggggtcgagttgggcctggccggacaccggacccgccaggagccggcccctgccgcgctgggctgaggcccccgcctgcagacaaaggagccggcggggggcgggagccgggggggtgggggagtgttgcaggggggatggggcgagggggcgggcgtcgcggtgtcacgttaccgcccgcagcgccctttaactcccgcccccgccccgctcaccgcccccttcccctgctacagcgcgctcgccccgcggccgccaatcagccgcgcgccccggccgcgcgccccgccccgcccccggtgggtgtgcgcgcggccaatgggcggtgcgcgggggccgggccgcggcggggcggggcagcggggcggccgccaatcgccgtggtgttgttgaaactgaaaatactacattatgctaatcgcggccgggcccgcgcgcacgggggtggggcccgcgcgtataaagggggcgcaggcgggctgggcgttccacaggccaagtgcgctgtgctcgaggggtgccggccaggcctgagcgagcgagctagccagcaggcatcgagggggcgcggctgccgtccggacgagacaggcgaacccgacgcagaagagtccaccaccggacagccaggtagccgccgcgtccctcgcacacgcagagtcgggcggcgcggggtctcccttgcgcccggc

SEQ ID NO: 6502 - DNA, 2300 bp, Homo sapien
caaggtctgcaaccgcacctcacctggctgagaaggtgtaaggtgggcgggaaccgaggttcgggcgggcaggagtcacatccaaccctgcctccgctctagtcccgccccaggcaaaaccttgttggctttattgagacaggtccttggagaatcataggagtaagagtacaaagcctcaaggagaacacgttcacttcacccatggagtaatggcgaaggccagagccctccccgctccttccagatcacccttctgtcctctgcagcatcatggagtaatggtgaaggccagagccctccccgctccttccaggtcacccttcagtcctctgcagaatcatggagggatggtgaaggccagaccctccccgctccctccacatcacccttccgttctctgcagcatcactcttttaaatcttaaaattgtaaacaaaggttctctctcttcatcccacttcccctccagccacagtcccatttctcagcccccttttggtgcaaaacccttcagaagggtgtccagcccattcctcctgcttgaatcccgagggtcagcccccatgctcatgacgctcttgccaaagccaccagtgactccagctctcggccccagggaagctcccaggccttcactcgcttacctgcctctctctccagacccagctcctttatttttccctccctttccctggtcagaaccctgggcacctcctcctcatgctggggtccagccttggcccttggcccctctcctctctagccccatccactcctggtcatctcatccagggtgggagctctaaacaggacatgagtgtcaatgacaccctcacgtccagctcagaccacatgccgcaaactgcacactgcacactctgccctctctgctggcccacaggcccctcccgtggatggacctgcagggttgcctcccctcatgtcgcccccagccgcacctgaaggccccctcagttggccctctcagcccaggccccaaccagcaggaagcctgtcaggcctccttccagggaggttccaaacctgcccctcaaatccccccatgccccatccaagtccacaccacctctcatctggaccacagcagagacctcctgcactgcccctcccctcaacccctcatcagcacatcagccagaggctccttggagaacagaaggggctcagaaccctgcagcggcgtccactgcacacacaggaagaactcaagtgctcataggcagtgagtcatttccttaggcattgtggtgacccgggatcatgtgcctccccgaagcctgcacatgcactctaatgatgcaagctaccaccaggcggtcagctttgccagctgacgtcccaaacagctggcatggggcatgcacacagtaggtgcttaataaatgtgtgtcgggttaagataggcccaaagccatttcaaatgtccaggcagtggtgtaggcaggggtcagctctgaagctggcctcctctcattcgggagacccctcagaggtcccagcctccaggatgcagtgttcagagcaatacttctcagtgcacgtctggctgtgtccctgcccagcgctcccagggtcacccctctctctagactcactttctgccccgtcaccccactgtacacccttggtcccagccccttccagtggctcagcttcctgaacactccaagcctgggctcacctctaagccgttatctatgctattctctcagccaggatgcccttcccatacccaaacaatccgtgctcacctttaagactggctgaggcatcacctcctctgagaagccacctctcccaaacctgagcccagatgagccaaagcccttccttcctccagtcagcctggatcctctcatccggcagaactgtcgccttgcttctctgaagcggtgaatgccctggggctggggacgcacaggctcgctggcccacaaccaaagccgcttcctctggaggaggaagtccaggggtgccagggttccacttgctttcttcttcacccagcctaaagggcaattttcccacattccctcagaaccaggaagttcccccattcacactgagcctgttcatgacaaaaaaaaaggtctctccgatttcctctgctcaaccagttccctggctacctgaggccctgcttcacctggaggaagacagtggtaagtttccagcatctccaccacacctcagcgccagaggaccctcagcctccctcgcacacctctgggcagtttggtaactcatcccatctcctcctgccgcttcatcctcta

SEQ ID NO: 6503 - DNA, 2300 bp, Homo sapien
cttgaaaacgagcttggcagaggatctggggacacgcactccagatgcaaacacgtttgcactctttgggctggaatcccctcgagcggtacactgcacccgtgggcttgctaagaaaccacctcacagagggcagattgattggacaaaaggcatttggtccccaaattgattgacgtgtgtgaatgggagttttcagaacaaagacccaaagatatgggggaaacaggctgggcgcggtggctcacgcctgtaatcccagcactttgggaggccgagggggggcggatcacgaggtcaggagatcgagaccatcctggctaacacggtgaaactccgtctctactaaaaatacaaaaaaattagcgggggctgtggcgggcgcctgtagtcccagctactcgggaggctgaggcaggagaatggcgtgaacccgggaggcggagcttgcagcgagccgagatcgcgccactgcacttcagcctgggtgacagagcaagactccgtctcaaaaaaaaaaaaaaaaaaaaaaaaagatatgggggaaattgccatttctgatgcttaggctcaacaaagtatggacatccatgcgggaacacagatgaaccaagggacctgcactaatgctcctggaccgcaaggggaagcgcagcgagggctgttggtctagatttcttgaactttctgagcagcattccttccttctgggcatggagcaggaccctcctggaatggggtcttatgccctacagtcaaacaagagaggtcagataatttatggccagcttctaaacacaaaggtggagggaaagttagagcaatatttttaggtttgatgtctggctgtgtggaaaggcggggttctgatttctatgacctgccctggggaaaatggattccagtttctaaggccagcttcggggaaaatggcactgagagacaggagagcaagagaaggtcagagaaacactttttcttccgaagctgcttctgaggccttcattttggggtattgttttctgatgcccaacatatctgagctgctgaacgaagggtagctgctgaaccactcccacggtgacttggaatggcttagccagccggccttgggccacctggctctggcccccctgcccaccaggactttggccggctctcgctcgcctctgcgatgtccgtcccaccctgtctcacccctgcagttttctgctctgtggagcgatgattgacacatggcagggggacactggttttgacatttgagcctgtgcccagcccttgcctggggaggaggtggggcaggagtcctgaatgagcatctccctacttagtgacagtcaggggcacggagaatggtgcccaggccaagggcagggcttgggccaagtgtgcgcagcgtggggtgtgtgtgctccagcggctcctgctgcggagggcggcatgaggcttgtttacctgtgtgctggcatctctggtggcccctgcaagggtggggaagtggcaggcagggtgaaatggggaaaagtgggctctcaactgctcctagcagcctccgggtctggggagggaagtgaggaggggcccagagctgtctcctggtcactcttctggggctctgtgcagacctttggcagggccaggctacaccacaccctctacaacctcccctgacttcttcccctaacccctcaccaccattcctccgcttttctctccccgcccctgcctcccctccattctctccttccctccacctcccggtcccatcccctgcccacactgcccctcctcaggcccaaagtggacaccggtgctgcctgagggtcagagtgtccacctccagcagcccgggcaccgggcaggattcaagctggagggggctggggcgggcgaagccgggcacggggcgagcccgctggtgggcggggcaggggcgggtccttcgaggggaggggcgggctcggccagtgagagcgcagaaaccgtggcacgggcgctcccggaactggcgattgcaaagcgcgagggctggaactcagacccagaggggcggtccctgttgcaagtcatctcccgaaagggcggggccggggctcatcccggaaggaccggtgtctaggtcaccctggagcgctcaccccaccggcacccgtgcccaagcccgcccctgcaaaggcaggtactcgagcacactccggagagggcggcctctgagccccgaaccccgaactccggcgcagcgtcgcacctctgcccaatgaggtgcccctgacgtgcctgctgcggctgccctgctc

SEQ ID NO: 6504 - DNA, 2300 bp, Homo sapien
ttgattggacaaaaggcatttggtccccaaattgattgacgtgtgtgaatgggagttttcagaacaaagacccaaagatatgggggaaacaggctgggcgcggtggctcacgcctgtaatcccagcactttgggaggccgagggggggcggatcacgaggtcaggagatcgagaccatcctggctaacacggtgaaactccgtctctactaaaaatacaaaaaaattagcgggggctgtggcgggcgcctgtagtcccagctactcgggaggctgaggcaggagaatggcgtgaacccgggaggcggagcttgcagcgagccgagatcgcgccactgcacttcagcctgggtgacagagcaagactccgtctcaaaaaaaaaaaaaaaaaaaaaaaaagatatgggggaaattgccatttctgatgcttaggctcaacaaagtatggacatccatgcgggaacacagatgaaccaagggacctgcactaatgctcctggaccgcaaggggaagcgcagcgagggctgttggtctagatttcttgaactttctgagcagcattccttccttctgggcatggagcaggaccctcctggaatggggtcttatgccctacagtcaaacaagagaggtcagataatttatggccagcttctaaacacaaaggtggagggaaagttagagcaatatttttaggtttgatgtctggctgtgtggaaaggcggggttctgatttctatgacctgccctggggaaaatggattccagtttctaaggccagcttcggggaaaatggcactgagagacaggagagcaagagaaggtcagagaaacactttttcttccgaagctgcttctgaggccttcattttggggtattgttttctgatgcccaacatatctgagctgctgaacgaagggtagctgctgaaccactcccacggtgacttggaatggcttagccagccggccttgggccacctggctctggcccccctgcccaccaggactttggccggctctcgctcgcctctgcgatgtccgtcccaccctgtctcacccctgcagttttctgctctgtggagcgatgattgacacatggcagggggacactggttttgacatttgagcctgtgcccagcccttgcctggggaggaggtggggcaggagtcctgaatgagcatctccctacttagtgacagtcaggggcacggagaatggtgcccaggccaagggcagggcttgggccaagtgtgcgcagcgtggggtgtgtgtgctccagcggctcctgctgcggagggcggcatgaggcttgtttacctgtgtgctggcatctctggtggcccctgcaagggtggggaagtggcaggcagggtgaaatggggaaaagtgggctctcaactgctcctagcagcctccgggtctggggagggaagtgaggaggggcccagagctgtctcctggtcactcttctggggctctgtgcagacctttggcagggccaggctacaccacaccctctacaacctcccctgacttcttcccctaacccctcaccaccattcctccgcttttctctccccgcccctgcctcccctccattctctccttccctccacctcccggtcccatcccctgcccacactgcccctcctcaggcccaaagtggacaccggtgctgcctgagggtcagagtgtccacctccagcagcccgggcaccgggcaggattcaagctggagggggctggggcgggcgaagccgggcacggggcgagcccgctggtgggcggggcaggggcgggtccttcgaggggaggggcgggctcggccagtgagagcgcagaaaccgtggcacgggcgctcccggaactggcgattgcaaagcgcgagggctggaactcagacccagaggggcggtccctgttgcaagtcatctcccgaaagggcggggccggggctcatcccggaaggaccggtgtctaggtcaccctggagcgctcaccccaccggcacccgtgcccaagcccgcccctgcaaaggcaggtactcgagcacactccggagagggcggcctctgagccccgaaccccgaactccggcgcagcgtcgcacctctgcccaatgaggtgcccctgacgtgcctgctgcggctgccctgctccccccagcctccctgcatcccgggatgggggagggcgccaggcgcagctcccggaccctcaggggtctccccgccctaccccaccagcctgggttcggtacctcggggctcagatgtgcagtcagctgttaatgtgg

SEQ ID NO: 6505 - DNA, 2300 bp, Homo sapien
gggggtggcaatggagcatgctcacatcctgttacttctcttgcgttctcttgaccctcccctacagctactcccacatatttgagggcggagctctgagcagctgcctcaccttgcagcctcctctctttccatctctttccttctctcccagccctcggagcaggccccaggggactatactataaagacacatgcacacgtatttttatcgcggcactgtttacaatagcaaagacttggaaccaacccaaatgtccatcaatgacagactggattaagaaaatgtggcacatataaaccatggaatactatgcagccataaaaaaggatgagttcatgtgctttgtacatggatgaagctggaaaccttcattctgagcaaactattgcaaggacaaaaaacctcctgctgtctcccctctccctgaggtccccattgaccccacactgctgcctccagtggtccgctttggcaggcctcccactggagtgacagttgccttcgtggcttcttccctcctccacgatggtctgctgctctgggctgtgctgggtcctttgcccctcctccatcaccactgccagttcccccagctcatccgacctccagcctccctgccctctgggggagcccagcccatgaccgtctccatgctgcagggccccagagcctctgtgctgaactgccttgtgtccagctcccttcggctctccactggggtcgaaaatcgtctcaaactcaacccgtccccaactgggctcccatctttccctctcctcctgtccatgcctccttccttatgggctcaggcccagatcttcagtgctccctgagccctgctttctctcacacccactacagtccattgacaacacatgcaaaatccagccacctctcacctcctccacagccatcaccagcccggagttctttgagcagcaggtggggtgtggtcccattctggcctcaaccggtccactctagccactctgctctctccactgccccggggcctctcctgcttccttccagccctgctccaaggttgccttctctatgaggaagacctcgcccccttcccactgcagcccctgtgcgtgtggacccccagctccgagggagtgggctgttgaggatttttacactctgcaatatttcaggttctgacatcagggtcagctcctgggcactcagcacggagttactccccatgagagtcgatgggtggctgaagccactccacctgtgctctgtgcccagctgtgggaagggttctgacttctcattcactcttccccgcaccaatcctacagggagggactgttattacccattttatgatgagaaaagcaaggctcctgcccagccttccccacgggtagggaggagattcagggcttggccccagccatttagcaggagtgggcggggcgcctgaggcacggcggggagggatccttaggctcaccctcgggctgggagcctctgccaggcccggaatggtgccaaaggcccatccccactcccgcctagatgcccaggtccaggctctgagggctgagaggaggagggcagctgtctgagcccacgcacgccgggcttcccagaagcaaacacaggaagggccgaggttggccctgactctgcctgagcttcttggtgatgtgagactttgttcccaagcctctccagacttggtgaatataatttaatcattactattacagcttccagagccacacactgtggtatagactactgaatgatacactaaactaacatgaatttgccaatgaaatgtttccgcatttggcaacagagataataaaataagacagcattctatctcttgcaagaaaaagcttgagatcaatttgccgccacagatcatttagtggacaacaaggacccaagaagatggaggggagagatagaagctgcgggcaggtgcaaggagagcctctctgaggggtgatccgcccagagccacaccggattgaacagcccttggggcagggactccagagggcaaaggctgccgggtgagaggcaggaggaacagcgctaggaaggtttgaggaggtgctgcccccaggagggaagtggggtggctccccatggcttctcccggggctggcactgaagctggagcacaggatgtgctgacgggggtccagaggcagagtccttaacttactcagcttaagcgtggcatgagtcccaactgggaggggccctggcagcatgaaacccccacccccactctctgcgacggcccagatggagggcaggagga

SEQ ID NO: 6506 - DNA, 2300 bp, Homo sapien
cgagggcacgccctccccacagagtcctccaagctgtcctcctggcctccagtacccccgacccctatccccatcctcatgtacctgctgtgcccctggggtttagagggattcctctcccctcctctggggtcccagcaccagccaggcctgcaggcacacagtaggtgcttaagcaaccacgagtgtcgggggatttgcctggagccgaagttccactggctggcccctcaatggggtaggcaggctggtgggcctggaggtgttccaggcacctgtgggctggcgcagtgacagagcgctctgcccccggccgcttctcctggtctcccactgcccagaggtgcctcttgcccaggtcccactgtccggcagcccagggccctctggaagcaaaagaagggacaccagagtccgaatccttcctgcagcctctccggaacaatgctcgaatcccctctccccgccaaaggctgacctcccctcacccacccaccctacctgctgctccctcaccacaggatcccagccctgctgcaaggacaggtgtcaggtagggggcagtgttgacccgccggccccaggcaggtgtctcactcccaggccagaaccctggcacagcccaaccctgccctctgccggcactgcccctccacaccacatccctgcccactgccaggtcctctggccacaccggtgggaccaccgggcagctgctacctgcatgccattcacagaaccgggtctggggcgctcctctgagccggacgtctctttatcctttacagtgaccctgaagggcaggtggaggtagggctggtcccaggtctgggttttacgctctgctgccactgtcttgacattttaaatacattttgaatcaggggactctcgttttcattttgcgtgagccccgtcattgaggccaattctgaccccagagttgggacttcctgctgtaaccaccccagggcgcagctagggggcaggggtgcgggaaggtgggagacgtggagtagtagccggggtctctggggtcctctcggccggctccacccccacccctgggaacccgggaagagccggctttcgcttcctgtctattaaaccctttaaaggaagagggtaaataaaaccgcccgtctgcccagctggaaagcgatgactcagccgcccccgccgaccctcgcccccaggctgatcccagagagcgggcgtcgcggcccagcccgaacccctcagctcctgggacctctctccggtccgggtcgtgggggcgcggtcggagcagtccgtaccccagttcgggacactacgagggcgcagggaggagaacgggcttcctcttccccttccattttctgagctctatgggttgctggtctagccctttccacgtgttccctaatccagcaaaggttactgttcccatttcacagaagcgaaaaccgaggctaagagaggtggtcgttcttggcgcagcccgtgggtggcaagataggagctcggtccgctagggcagggccactttcggagagggtctctgggcggccctgggaaaggcccccgaacaggacggaacggccagggctcgggagtaaggaagggggcctcgaccctccttctgccccgggagcccgagagcggcagggctggacttggggcgcctggagggtgaaggtctggtcccggctgtctccccacggtgggccggccccgggcccgcgggtgcttcccggggctccccggcgtgagtcatcgcgggcagggctggctgcagcgcattcttccgcggggccggcctgcgagacggtgcgggcgagcgcccgggcggggcgggacctcgagtcaccccacggggccggacagctggggcacggggggcaagaggagcgcgggcttctgagatgggaggggacggccggggaccgaccagagcgcggacgcgacggtgcgggcccggacggctgggcttggggagggtatggcccggggcgcgcggggctcaggcgggcggggtggcccgagggccggggcggggcggggaggggcggggcggggaggggcagctataaaggccgcgccggggccacgaggagcagagccggcgccgtcaccgcccgcattgccgctcccagtcccgcgctcggcacgacatgaaatcccccgacgaggtgctacgcgagggcgagttggagaagcgcagcgacagcctcttccagctatggaagaagaagcgcggggtgctcacctccgaccgcctgagcctgttccccgccagcccccgcgcgcgccccaag

SEQ ID NO: 6507 - DNA, 2300 bp, Homo sapien
tctatctaattaggtaaaaaggaaaaaaaagaaacccgtgctcccgaagaaaacaacaagattgcatgtcactttcctttctgggcttgagggaagccagctcttccacagtcagaacttgcgggtgcacagcccaagtaccgcttagaaactcccatcctcaccaaggctcaagcagcttcaagtcttcttgatctgtggaaaataaagttttgttttatagactgttactggaagtatgttctagatgatactctctttcttgtggagctcttaggtttcttttcttagaaggtctggtctgttggggcttcagacagggcggcaagagcttaggtgggttcaagggccttagccccctgtggcagtaaaggccaacatctcctcacacctctcccattgtactgagttccaccagtggggagaataggccagcgtgctctttatcagctgttaggtcttagactgttcatttaacttctaaaactcaacttgctggctcatccctaggttgggaggtgattgcaggtcagggaacatggacagtcaggtagctgccaagacatagttttacaaattctagaccagcactttccagtagaactttctctgttgatggaactgtcctctgcctgcttggtccagtgcagtaggactgaccacttgaggacttgaaatatggctgctgagactgaagaactgaacatttcatttaccttagtttaaatttaaatagtgagctaagggctagtggctacacattggaaagcttatctgaaactgttttgatcatacacccgtcagtttaaaggacttgaatatgcatgtgtgctatttgcttacttatatgcggtatctgtactgctggtgagcactgtgccacatttgcttatagtacatgtgcgtttcattcacaatacgttcagcacaggtactactgatgagcagtgtcagttagaggctagaagtgccagctcagattagactgctcagactcgcatccccattctccctttagtagctccaccacctccttgagcttcagtttcctcagctgtaagtagagctcatggtaaagactctggttacttgttaagcccttaacatagcacctggcacagagcaatgactcagtaagtgttggcataaagtgttttactaatgttactttctagaccgtaccccaacactagaaagttgttggaggaggaggtgaatgtgggaaccctggtcttgtcttctctgcacgtggcagctcctgctctgcccaggtgggtgatgcatctggagcagcccctgtgcacagccccttaagggcaaaatgctgtccttagagccttggaataggccctggagcctgctggaggctcgttggatctgacgtgaaatggaagaatattgagaagcctttccctgcctgatgccagttagggtccttagagcggaagggcgctgcaccgtggccacatctcatcctggctgctgcgtggcgccaggaggctgtgcacactgtgtgaactccacaccagcacagtagggcccttctaagttccaccgaagttggctctaagcaaatacatggtgtgagctcaacaaaatgggaaatgttgataaatgaagctgcattttcatgcactacccttgttatgcaaccagtagtgataaggtggttttgcttttggtgtaagtctcatgtttgaaacttgatttttagtctgaccaatgatgtatttggatgtaggagaaactgattcaagacaattgactaatggtggaggttcacctttgagcaccttattgatcactttaaagattaaacaccaaagttttaatatatttctactaaggtttcttttccctttgtatgagatgtaaaatgatacccagattcctgtatccaataacattatgctgctggttcgatcagccttgtagaaaatttaaggaaaacaaattcatcggtttacaaaaatcttttcctgtgtgcctgctcctcggtgtgagaacagccagggcagagctgtggtgccaggttcccagctgtgtccagggtacaccctggctgaccagcttcctatcctattccttgttttgcgtgactttcaatttcctggcatgcttttaaaatgcgctgcacacaagcaaatggctcctcaggcaagcgaggcccagcaggcagcgtggctggactttctgctcctcttaggcttggtcagtgagtcacttgatgggactggtgtcttgggcaggctgctgtcatgttttgtaaacctaaaaatgtttttctgtgtttctccagt

SEQ ID NO: 6508 - DNA, 2300 bp, Homo sapien
acttcccactttctctgccattttgcttcagtagctctttaaagctacttaaagttgttttaaaggggctttgagtgtctagtggctgtcccccagcagtgcaggagtttggtgttttaagttaagtaaatcaaaagtgaggggctgaggtttggctgagggtggtgaagtgaatgtttttatcccattaaaatgagttaacacgtaggtttttcctcctcaggatgaagattctgaattcacattagcctctgattttgaaattggacactttttccgtgagcggatagtcccgcgggctgtgctgtacttcactggggaggccatagaagatgatgacaatgtatgaggctcggggaaggggggcttccacctgggtgcttatctctgttggtgcagagtggccctgaattgtggcttaggaaacccccatgcctaatctttttattacatcatcagccagatatgtagtccaagctgctgtccttgttgtggggggaatacgcttgaagaggagaagtctgaggaacagagcaggaaaagcaggtgtctgtgaagcagtttcagaggtgattgccagtttcctatgtgagccctgcctagtgactcaacaatattctctcaaaacctaagcttcagggaacttgtgaacacagggaatatctcttttatggaggtctggccacaacaaacatttattgacagtggacttatgctagcctgtggttcatcaacccaaaagaaatagaaattcctgaacttctatctaattaggtaaaaaggaaaaaaaagaaacccgtgctcccgaagaaaacaacaagattgcatgtcactttcctttctgggcttgagggaagccagctcttccacagtcagaacttgcgggtgcacagcccaagtaccgcttagaaactcccatcctcaccaaggctcaagcagcttcaagtcttcttgatctgtggaaaataaagttttgttttatagactgttactggaagtatgttctagatgatactctctttcttgtggagctcttaggtttcttttcttagaaggtctggtctgttggggcttcagacagggcggcaagagcttaggtgggttcaagggccttagccccctgtggcagtaaaggccaacatctcctcacacctctcccattgtactgagttccaccagtggggagaataggccagcgtgctctttatcagctgttaggtcttagactgttcatttaacttctaaaactcaacttgctggctcatccctaggttgggaggtgattgcaggtcagggaacatggacagtcaggtagctgccaagacatagttttacaaattctagaccagcactttccagtagaactttctctgttgatggaactgtcctctgcctgcttggtccagtgcagtaggactgaccacttgaggacttgaaatatggctgctgagactgaagaactgaacatttcatttaccttagtttaaatttaaatagtgagctaagggctagtggctacacattggaaagcttatctgaaactgttttgatcatacacccgtcagtttaaaggacttgaatatgcatgtgtgctatttgcttacttatatgcggtatctgtactgctggtgagcactgtgccacatttgcttatagtacatgtgcgtttcattcacaatacgttcagcacaggtactactgatgagcagtgtcagttagaggctagaagtgccagctcagattagactgctcagactcgcatccccattctccctttagtagctccaccacctccttgagcttcagtttcctcagctgtaagtagagctcatggtaaagactctggttacttgttaagcccttaacatagcacctggcacagagcaatgactcagtaagtgttggcataaagtgttttactaatgttactttctagaccgtaccccaacactagaaagttgttggaggaggaggtgaatgtgggaaccctggtcttgtcttctctgcacgtggcagctcctgctctgcccaggtgggtgatgcatctggagcagcccctgtgcacagccccttaagggcaaaatgctgtccttagagccttggaataggccctggagcctgctggaggctcgttggatctgacgtgaaatggaagaatattgagaagcctttccctgcctgatgccagttagggtccttagagcggaagggcgctgcaccgtggccacatctcatcctggctgctgcgtggcgccaggaggctgtgcacactgtgtgaactccacaccagcacagtaggg

SEQ ID NO: 6509 - DNA, 2300 bp, Homo sapien
caggagcagggggatcccattactgcaaatggtcttgagactttattagatgggaggaaggaccctccaaacttcaaatgcccaggttcttgtgtcatttctatcattgtttatgcttccgcaaagcataaagcatgacctttgtagaaaagtctgaaagtctaaataagtaaaataggaattgagagcacacacaccctctcctaaaacacagatggccagacaggactgagcacgctgtgtgggtcaggcctcagccatgcaccggtcacctctgaggggtttttatgttttttgttttaattagttttttttttattttttattttttgagatggagtctcgctctgtcgcccaggctggagtgcagtggtgcgatctcggctcacactgtaagctccgcctcccgggttcacgccattctcctgcctcagcctcccgagtagctgggactagggcgtccgccacaatgcacggctaatttttttgtatttttagtagagacggggtttcaccgtgttagccaggatggtctcgatctcctgacatcgtgatcggcccacctcggcctcccaaagtgctgggattacaggcttgagccaccgcgcccggccttttttttgtctttttgagacaatgtccccctctggttacccaggctggagtgcagtggcccaatctctgctcactgcagccttgacctcacgggctcaggtaattctcccacctcagcctcccaagtagctggtattacaggcctgagccaccacgcctgggtaattttttgttgttgttgtttttggagcaggggaagggtgctctatgttgcccaggctggacttgttgcctctgcctcccagagtgctgggtttacaggcctgagccacggcgctccgcattaatttctttttagagatgaggtttcactatgttgcccaggctggacttgaatttctgggctcaaggaatcctcctgcctcagcctcccagcttacctctgaggtttataaccgacgctatgttcttaatccctcaaccaggagcctttaaatggtttcaaattttccccattacaggaataacttgctaataataataataattagcaattgtttcaaaagtaacgtcatcccaaaagagaacgtttctgaaaaaaatgcacattagacttgaagacccccaatggcacggttgaacatggaaatgaaccagcctcaaaagtcccagcgtaggggttattttccaatcaaattggatgcctttctacaaaatgtgatgtgcacaggctggggctggtaccttcaccccagcccagagggcaccatgagagggagaacagggcgggcgaaacaggccagctcctccccagccctctgccctgctctgcttcagggggctgatctgagggcccagtgcgcactgcttttcctccttgtccgacagggtctcccgcaggccagaactaggctgctgggacactgcggggctcagggcgtgggggaagagatgcaggcagtggctagtcccgtcctgtccgcggaggtgacccagccccgacctcttcgcagaggaagtgttctccaacctgggacctgggggatgagcgggggttaggcttacgtcccaaccactaacggggctggttgaaaacggctcccaggcggaggggccctccgcgatgttctcaaggagtagcgcgaggggacgacatgggaggtggggttctcacatcagcgggcgcacggagtgctggaggcaccgacccgccgcggacgggattgaactagggaactgggagggcgcaggagataaagacggctggggccggggcccacggagaggggtggtgcccagtgtcccgcgaggatgtggtgccacccggggaaggtcccgggagcggggacccgggaccccccggaaccacacacgcggtctccaccttgccccgccccatttaaagaggcggaggaacgcagggcgcgcgccgcgcggaggaatatttgcatatggcgcggcgtttcttcggaggcttgtgattggttgctgactgcggcgcgaagcgcagttgacttgcgccgcgctcggcgaatcgcagcctgtcttgctcgcggagagaggagctaggagcctcggccaatgggagccggcgttgttggaggccacggcggcgcagccccaaagcgagcgaagctagggtcgccgccactgccgcaggaggcgtgaggtgcggagacacgggtgctgggccggtaacggcgcgctggggagggcggccgggcccggacgggcgggtggggccg

SEQ ID NO: 6510 - DNA, 2300 bp, Homo sapien
tgtgctaattctccctccccagggggcctctgtgtggtgggaagtctgacctaggatccacctggtccccatctgtgcagagcccattatggagggtcacagtggggcagcatccaggcagggcatgctgaagacagagcagacagagacccagcaagcctctaggagaagctgcaccttgaggaaggatcaggaagcctgggtgggtggaggggccgagaggcggaggagccgaatctgggcctgtttcgggcaggggacagtggagcaggaggcaggagggcaggaaagagtttcgggagctcggggctccacaggctgcaggagagtgcaggacactgggtgagaggagaggctggccgggctgctgggctgctgggctgccacaagtgctctggagaggggcctgggcctgactgagcccctaacaggcagcggtgggcgcacttgccctgaccacataagcaccatcgcccctttccaacacctgatgccctcagcatttcaaagcactggaatcaaactgaaccaagcctggaccagcctattcaggaccagcgcagggctctccagcaatcttggcagcactaacttagcggcatcgctggggtcgtgggcttgggaagaccattcctggaggtcgcctgggcatttccacctgccttctgggggacatcgaaggccgagcccgggccccagctccctggggtcatacaagactgtgcacgtggccttggcttccctggcatgccacagccccgggagggcgctaaagggggactggccaggcacaagctcccgctcggtggcactgaccaggacaggacttgctcaggcctggagagtggcaccagccagccagcattggaagtagttcggttttgctttctgtttgcttttcacttttgttttgtggcttggagcaggtagatgggtgatgtggccccaggttaagatggtggtgatccctaccctgtacatcatcccatatgtgccttgtgagccagagaccctggggatccaggggcctcagaccttccgacggggcagcgtgttagaggtggctctggtgcaatcaccctgtctccccagcagcagcaaatagtgactgttttgttattcactgttaacatctcatggctggccaaagagaaagtgagtgtataacaagctcaggggtggccctcagatcagctgggatctgcttggcccaggccagatgctccacagacagacgaaaaagaaactgtttcccctggaaatacccccatggtccagtcagctagagagcacaggcctggcaaggagggcaatgggttcagggtttgaccaggagagaggcactgaagtgagaaagccaggggctgggccagggccctctgcactggggagatgatgccatttccccatcgccacggttttgttttcattatgttaaaatacacagctcagtgccattagggacatttacagtgttgtgcagccgccaccgtccatctccagaactcttcccttttcccaaactggaactctgtccccatggaacagcaactccacatcccctccctcagcccctggtgctcaccctctacttctgtctctttggattttactactccagggaccctacatgagtggagtcacacagtgtttgtcctgtgtctggcttatttcgctgatcacggtgtcctcaggtctatccatgttgcagcctgtgtcaggacctcctgcctttttaatggccaaatcatattccatggatggatgggccctgatctgtctattcttccatggaagaattctcatcacctttgcgttatctttgtagcccacatttctcttcagtaaatccctgatgatgatgtcattgtctgctcctctgccccagctctgctaacagaagccacagaggcttcttcctcagctcctcagaatccagacccagaggtcggtgtgggcctgaggggtacggcgtgtgtccctttcccccagggagtgtggcccgggaggctttcttggtgcctgctctgatgatcacccatggcgggtgggctggggtgctggccttgtggcctcccatgacacccgtgacagtgaccacaggtgctggcttgccttccttctaatgagggtgctatccaggggtggctttcaaagagtgaagggcaggcacctacctcagctcatgccccagtcagctgctcctcaggtggctgaggagggcctgttcccaggaatgatactgcagacaaatataaaggccattgttcccctaggtctctgcctggggaggttgaaac

SEQ ID NO: 6511 - DNA, 2300 bp, Homo sapien
ttttgtttgtttgtttgtttgagatggagtctcactctgtctcccaggctggagtgcagtggcgcgatctcggctcactgcaagctccgcctcccgggttcacgccattcttctgcctcagcctcctgagtagctgggactacaggcgcctgccaccgcgcccggctaattttttgtattttttttttttttagcagagatggggtttcaccgtgttggccaggatggtctcgatctcctgacctcgtgatccacccgcctcggcctcccaaagtgctgggagtacaggcgtgagccaccgcgcctggccattccttcatcttttgaaatttctgagatgtgtgtggtttaagacttagaaagtgctgaatctgagcattcgttttgactgccagttttaagaaagtgttaaacacagcaaaaagcagcatcaggcaggcctttgcttcttcctgtgagtggttctgaattggtgagtaacagcacagctgggaacacacactgaggacttaggatgtgctgggccctgcccactgctttctgcacattgcctcatttaccaccatgatcctccaaaagaggaaaggagagccctggccgggtcacactgacctcgagtgctactccatcacctgctgtgctaattctccctccccagggggcctctgtgtggtgggaagtctgacctaggatccacctggtccccatctgtgcagagcccattatggagggtcacagtggggcagcatccaggcagggcatgctgaagacagagcagacagagacccagcaagcctctaggagaagctgcaccttgaggaaggatcaggaagcctgggtgggtggaggggccgagaggcggaggagccgaatctgggcctgtttcgggcaggggacagtggagcaggaggcaggagggcaggaaagagtttcgggagctcggggctccacaggctgcaggagagtgcaggacactgggtgagaggagaggctggccgggctgctgggctgctgggctgccacaagtgctctggagaggggcctgggcctgactgagcccctaacaggcagcggtgggcgcacttgccctgaccacataagcaccatcgcccctttccaacacctgatgccctcagcatttcaaagcactggaatcaaactgaaccaagcctggaccagcctattcaggaccagcgcagggctctccagcaatcttggcagcactaacttagcggcatcgctggggtcgtgggcttgggaagaccattcctggaggtcgcctgggcatttccacctgccttctgggggacatcgaaggccgagcccgggccccagctccctggggtcatacaagactgtgcacgtggccttggcttccctggcatgccacagccccgggagggcgctaaagggggactggccaggcacaagctcccgctcggtggcactgaccaggacaggacttgctcaggcctggagagtggcaccagccagccagcattggaagtagttcggttttgctttctgtttgcttttcacttttgttttgtggcttggagcaggtagatgggtgatgtggccccaggttaagatggtggtgatccctaccctgtacatcatcccatatgtgccttgtgagccagagaccctggggatccaggggcctcagaccttccgacggggcagcgtgttagaggtggctctggtgcaatcaccctgtctccccagcagcagcaaatagtgactgttttgttattcactgttaacatctcatggctggccaaagagaaagtgagtgtataacaagctcaggggtggccctcagatcagctgggatctgcttggcccaggccagatgctccacagacagacgaaaaagaaactgtttcccctggaaatacccccatggtccagtcagctagagagcacaggcctggcaaggagggcaatgggttcagggtttgaccaggagagaggcactgaagtgagaaagccaggggctgggccagggccctctgcactggggagatgatgccatttccccatcgccacggttttgttttcattatgttaaaatacacagctcagtgccattagggacatttacagtgttgtgcagccgccaccgtccatctccagaactcttcccttttcccaaactggaactctgtccccatggaacagcaactccacatcccctccctcagcccctggtgctcaccctctacttctgtctctttggattttactactccagggaccctacatgagtggagtcacacagtgtttgtcctgtgtct

SEQ ID NO: 6512 - DNA, 2300 bp, Homo sapien
tactgcttaagagtctgccccgttcctggcactgtcacaacctcttgtttctctttcatccagcctgtgtggttcctgtgggagggaagcaatctgaggctggacacagtgggtctctgggagcaggcgcacggtacagtgctgagcactactgtgggcggcaagccacccaggtgccgaggcaagagaccgagggcacgagctgttccagtataataaaatataaaataagaatagttataccagatatagatcttagatatgattatatatgaatatcattaatcattagtttgtagcaattactctttattccaatattataataatcctcgctctataatcataatctaggaaaaaccaggccatacagagatagcagctgaggggacatagtgaggagtgaccagaagacaagagtgtgaacctcctgttatgcccggacacggccaccagaagggttccttggtctagtggtaacgccagcgtctgggaggatgcccgttgccaagcggactgtggtctagcggtagcgtaagtgtcaaggaaaaacacccgctacttagcagaccgggaaagggagtctcccttgccccgcgggagtctggagaagactctgctcctccacctcttgtggagggcctgacatgagtcaggctcgcccgcagttatccggaggcctaaccgtctccctgtgatgctgtgcttcagcggtcacgctcctagtcctccttcatgttccatcctgtacacctggctctaccttctagatagcagtagcaaattagtgaaagtactaaaagtctctgatatgcagaaataatggcgtaagctgcctctctctgtctcctctctctctctgccttggctgccaggcagggaagggccccctgtccagtggacacgtgacccacgtggccttacctatcattgaagatggctcactctccttaacctacccctttgtcttgtatccaataaatatcagtgcagcctggcattcggggccactaccggtctccgcgtcttggtggtagtggtcccccgggcccagctgtcttctcttttatctctttgtcttgtgtctttatttctacaatctctcatctccacacatggggagaaaaacccaccgaccctgtggggctggtccctacacactacagacagataaccgggttcctgtctgcatttccatttgttggccatttctgaaaatgcttactttggagattgagacaatacgggccagggaagtgtatgatggatttgccaacaaaaagtcactaaaatcatagccaagcgatagatgctgatgaaatgcatcctccttcgggatatgacaccaggactagcactctcaaaatgtctacgcaatggcactgatgtctgtgaaggcccagcagtattcgcactcaccattatgcagctctggggccccatgactgatggtcttggctgccgagcttcccagcagattctgggttaggttctcaccatggcccccaggacagtgcagacccatgctcctcagcccctgggtgggcccagagttgtaggaggaagtctgctgggacttctagctacgcagccccagaacacctgctcctctgcttcccaaactcaggctcagagctggggagctcctccctgtgcgatgttctgcagcccttccctccctagggaaggcccttgtgcttacccgtaaccgttgtccacaatcttctggacaaagttcacaatttctggcacatactcactaacccgggttaagacatctggagggagaacctgtgcaagacatgagaatgtcctgggattttcccttctgaaaaccacgcgctccataaaaacgttcccaattcataaaacgaaaagcccattatgcccctcaactcaagttcaatgttgacttggccgcttaattgagctggccttgccaaaacaggaatttagaaatcagggcccttagcgcaagagagccagcacaagacaatcgtgacacttacattcagagcttccatgtctctgtggaagtccccctcccagaacttgggcagcttggagaagatggaattgtcagtgacatcacagccaagtgtagaatccagccagtcagagagcaaatccttggcttcttccagcaacacctgaagagaaagaaacaaaaatccagcagcgggccacacacttcacatgagaacatctcgtgcagctggtgtgagcccatcagtgccctgaattcaaaggtgctgaccttgacctgtgaagagccaccgtctcctagggagactgtgatg

SEQ ID NO: 6513 - DNA, 2300 bp, Homo sapien
ccccctaatgacctcatcttatgactttatcatctgcaaagaccctatttccaaataaggtcacattcacaggtcctggtggttataggatttccacatcttttgggagagacacaatgcaacccataacaacctgtaacccaatgtgctgtcccaaagaactacaacaccagggggatgctgaggttcagagagtgtccttgccctggtggtagggctgggacgcagcaggactggggaggcgggacccactgctgctagacactgcagcactcttagacacagctcggccacctgagcaggtgatcatttcccagttccgctctgcagaccctttttttttttcccagtagagatgaagtttcactatgttggccaggctggttttgcactcctgacctcaaatgacctggccgccttggtctcccaaagtgctgggattacaggcgtgagccacagtgcccggccccactttgcagatttaaaaacaagacatctggaagctcagagaagttaaactcaccccaggtcttacagccaaactctggcttgcctgacctgatgtcaggaggctttcttagtgcaagaaaggaagggcagggcaagccttagccgaatgtttatctctaagaggcttctgactctcctgggcgcctccggttccttctcccaggaaggcatgtggccgagctgggcttgggtgactcatggtcctagagtgatgagtgagaaacaggcactgtgagagtcatggtaggacctggccagaacttcgtcccctaagtcctggacttggtccctcctttgggattagttggggtctcacagagcctcccacatcctgggcaagttacagcacatgctacaggatctttgcagaaatgtaaacaaactctttcttcttttttttttccagccaccagtagaatttagaatttatttatttattattttatttatttatttatttatttatttatttgagacggagtctcactctgttgccaggctggagtgcaatggcgcaatctcggctcattgcaacctccacctccctggttcaagcgattctcctgcctcagcctcctgagtagctgggactacaggcaagcgccaccatgtccagctaatttttgcatttttagcagagacagggtttcaccatgttggccaggatggtctcgatctcttgccctcataatccgcccacctcggcctcccaaagtgctgggattacaggtgtgagccaccgtgcccggccttagaatttattatgaaattagacatgaggttccaaaaagtaactagaagattttttactttttattttttgagaaagggtctcactctgtcgcctaggctggaatgcagtggcacagtcgtagctcactgcagcttcaaactcctggactcaaatgatcctcctgccttgtcctttcaaggtgctgggattacaggcatgagccactaatcctggctaataatttttcttgacatattaaaattctgtttcttaaatagcatttcctctcattttggatgggtgcacgaaccttgggtgggatatccttgggaggtgacatcatgcacacagaaggcaggagccctaagggggttggggatggctccagaatggggtctgagaaggagatggagaagcctgttcacgcaacacttcatagtggcttgctttccgcagggtcattggcagggcggtccctaggcctggagcgctcttcccgcccatccccaggccctgctccaggtcggcctcctgggaaccatcccgtctcgccagcacaccctgtcccgaggccgcctctgacctccaggctgggcctggtccccacggcgcttagcgcaatcatgacttaaacacctattacaggacgctcagtctttagtgcttgtctccccgcggctgggctgactactcccagcacggccactgaacgcttggccgcgcgatgctccggagcgcgggtcgccattgggttgaactacagctcccagcatgctccgggccggcgacatccggagcccctggtagttgcctagcgaccgggcgtgtcccggaagacgggcccggcgtggggcgcgacttccggggcggcggttgcatcagattctaggaagtgtctgtagccgcagctgcgggtccgggattcccagccatggcagattcctccgggcagcagggtgagcggcgcggccgggccaggctgagggcggctgggggcctgactgggcgctgggtgctcggctcgaagggcagcgagtccttatgtctgaggggcccg
